(19) United States
(12) Patent Application Publication
(10) Pub. No.: US 2013/0096032 A1
(43) Pub. Date: Apr. 18, 2013

(54) Plant polymorphic markers and uses thereof

(71) Applicant: MONSANTO TECHNOLOGY LLC, St. Louis, MO (US)

(72) Inventors: David F. Bush, Chicago, IL (US); Steven D. Roundsley, Boylston, MA (US); Roger C. Wiegand, Wayland, MA (US)

(73) Assignee: MONSANTO TECHNOLOGY LLC, St. Louis, MO (US)

(21) Appl. No.: 13/694,564

(22) Filed: Dec. 13, 2012

Related U.S. Application Data
(63) Continuation of application No. 12/213,777, filed on Jun. 24, 2008.
Application No. 12/213,777 is a division of application No. 10/746,294, filed on Dec. 29, 2003, now abandoned.
Application No. 10/746,294 is a continuation-in-part of application No. 09/803,736, filed on Mar. 12, 2001, now abandoned.
Application No. 09/803,736 is a continuation-in-part of application No. 09/692,412, filed on Oct. 20, 2000, now abandoned.
Application No. 09/692,412 is a continuation-in-part of application No. 09/534,859, filed on Mar. 29, 2000, now abandoned.

(51) Int. Cl. C12Q 1/68

(52) U.S. Cl. CPC C12Q 1/6895
USPC 506/16

(57) ABSTRACT

The present invention is in the field of plant genetics. More specifically, the invention relates to nucleic acid markers associated with Arabidopsis thaliana ecotypes. The invention also relates to methods for detecting polymorphisms. The invention further relates to methods of using nucleic acid markers, for example, for genome mapping, gene identification, gene isolation and gene analysis.

### CROSS REFERENCE TO RELATED APPLICATION

[0001] This application is a continuation-in-part of application Ser. No. 09/692,412 filed Oct. 20, 2000, and a continuation in part of application Ser. No. 09/534,859, filed Mar. 29, 2000, and a continuation in part of application Ser. No. 09/803,736, filed Mar. 12, 2001, all of which are herein incorporated by reference in their entirety.

### INCORPORATION OF SEQUENCE LISTING

[0002] This application contains a sequence listing, which is contained on three identical CD-Rs: two copies of a sequence listing (Seq. listing: Copy 1 and Seq. listing: Copy 2) and a sequence listing Computer Readable Form (CRF), all of which are herein incorporated by reference. All three CD-Rs each contain one file called “marker patent.txt” which is 13,814,237 bytes in size (measured in MS-DOS) and was created on Dec. 23, 2003.

### INCORPORATION OF TABLE A

[0003] Table A from U.S. application Ser. No. 12/213,777 filed on Jun. 24, 2008, published as US 2009/0215647 A 1 on Aug. 27, 2009, is herein incorporated by reference in its entirety.

### FIELD OF THE INVENTION

[0004] The present invention is in the field of plant genetics. More specifically, the invention relates to nucleic acid markers associated with Arabidopsis thaliana ecotypes. The invention also relates to methods for detecting polymorphisms and using polymorphic markers, for genotyping applications, e.g. identifying and isolating regions of DNA associated with phenotypic traits.

### BACKGROUND OF THE INVENTION

[0005] I. Arabidopsis thaliana

[0006] The identification in Arabidopsis thaliana of polymorphic markers is important in the development of nutritionally enhanced or agriculturally enhanced crops. Such polymorphic markers are useful in, for example, genetic mapping or linkage analysis, marker assisted breeding, physical genome mapping, transgenic crop production, crop monitoring diagnostics, and gene identification and isolation.

[0007] Arabidopsis thaliana is widely used as a model organism for basic and applied research in the biology of flowering plants. Arabidopsis thaliana is a model system for plant genomic research in part due to its small and characterized genome, which is estimated to be comprised of approximately 20,000 to 25,000 genes. The genome is estimated to have a haploid content of around 100 Mb, present on five chromosomes. Reported partial sequence analysis has provided information on genome features such as gene density and gene structure (Settles and Byrne, Genome Research 8:83-85 (1998), the entirety of which is herein incorporated by reference). Based on reports from the European Union Sequencing Consortium, the average gene density is one gene every approximately 4.8 kb.

[0008] Other important characteristics that make Arabidopsis thaliana a useful test system include its rapid life-cycle, small size, which allows for controlled growth in restricted space, its prolific seed production, the availability of characterized and uncharacterized mutants and the existence of a reliable transformation system.

[0009] Molecular genetics is often used in the analysis of plant genes and is particularly useful in the analysis of complex biological processes such as developmental regulation. In one approach the use of mutant plants, e.g. Arabidopsis thaliana mutants, in molecular genetic research requires the location of the mutation. Molecular markers are a useful way to locate such mutations.

[0010] Identification of target loci and the isolation of associated genes using molecular markers has been reported (Liu et al., Proc. Natl. Acad. Sci. USA, 96:6535-6540 (1999); Muramoto et al., The Plant Cell, 11:335-347 (1999); Bowman and Smyth, Development, 126:2387-2396 (1999); Michaels and Amasino, The Plant Cell, 11:949-956 (1999); Ha et al., The Plant Cell, 11:1153-1163 (1999); Walker et al., The Plant Cell, 11:1337-1349 (1999); Sedbrook et al., Proc. Natl. Acad. Sci. USA, 96:1140-1145 (1999); Kiyosue et al., Proc. Natl. Acad. Sci. USA, 96:4186-4191 (1999); and Davis et al., Proc. Natl. Acad. Sci. USA, 96:6541-6546 (1999), all of which are herein incorporated by reference in their entirety). The use of markers to isolate a genomic region of interest is often referred to as map based cloning, chromosome walking or positional cloning. Many of the Arabidopsis thaliana markers that have been used in map based cloning are anchored to genetic maps such as the Lister & Dean map (See e.g. genome-www3.stanford.edu/cgi-bin/AtDB/RIintromap).

[0011] Physical or partial physical maps of the Arabidopsis thaliana genome have also been reported (See e.g. genome-www3.stanford.edu/atdb_welcome.html). A physical map of Arabidopsis thaliana, Columbia based on a collection of bacterial artificial chromosomes (BACs) is available (Marra et al., Nat. Genet., 22(3):265-270 (1999); Mozo et al., Nat. Genet., 22(e):271-275 (1999), both of which are herein incorporated by reference in their entirety). An overlapping series of BACs representing the Arabidopsis thaliana, Columbia genome is available from AIMS, Arabidopsis Biological Resource Center, 309 B&Z Building, 1735 Neil Avenue, Columbus, Ohio 43210, USA.

[0012] Cho et al. reported a low density biallelic polymorphic map based on a comparison of Arabidopsis thaliana, Columbia and Arabidopsis thaliana, Landsberg erecta ecotypes by screening approximately 0.5% of the genome for such polymorphisms (Cho et al., Nature Genetics 23:203-207 (1999), the entirety of which is herein incorporated by reference). In this survey 487 single nucleotide polymorphisms (SNPs) were reported. Cho et al. also reported the use of oligonucleotide arrays to detect Arabidopsis thaliana SNPs.

[0013] The present invention provides polymorphic nucleic acid markers whose physical location is known within the Arabidopsis thaliana genome. Moreover, the physical location of such markers is further known within a particular BAC and the position of that BAC relative to other BACs in the genome is also known.

[0014] Successful isolation of a region of Arabidopsis thaliana DNA associated with a trait of interest requires a nucleic acid marker to be sufficiently close to the trait. As the present invention provides a collection of nucleic acid markers in the Arabidopsis thaliana genome which allows for the efficient isolation of regions of Arabidopsis thaliana DNA associated with traits of interest. Moreover, the association of a collection of nucleic acid markers with a trait of interest may be simultaneously investigated.

### SUMMARY OF THE INVENTION

[0015] The present invention provides a collection of nucleic acid molecules capable of detecting a set of polymorphisms as shown in Table A.

[0016] The present invention also includes and provides a method of isolating a region of genomic DNA associated with a phenotype of interest comprising: (A) identifying an Arabidopsis plant of a first ecotype with a phenotype of interest; (B) crossing said Arabidopsis plant with an Arabidopsis plant of a second ecotype lacking said phenotype; (C) propagating and self pollinating seeds from said cross; (D) selecting progeny of self pollinated seeds with said phenotype; (E) screening progeny of self pollinated seeds with said phenotype with a collection of nucleic acid molecules, said collection of nucleic acid molecules capable of detecting a set of polymorphisms where the polymorphisms are distributed throughout the genome of said self pollinated seeds with said phenotype at an average density of more than one polymorphism per about 100 kb, wherein at least one of the polymorphisms is selected from Table A; (F) calculating the linkage of each of said polymorphisms to said phenotype; and (G) isolating said region of genomic DNA associated with said phenotype based on its linkage to one or more of said nucleic acid molecules.

[0017] The present invention also provides a method of identifying a region of genomic DNA associated with a phenotypic trait of interest comprising: (A) screening a mapping population of Arabidopsis plants to determine the linkage of the phenotypic trait with a collection of nucleic acid molecules, wherein the nucleic acid molecules are capable of detecting a set of polymorphisms, where the polymorphisms are distributed throughout the genome of the mapping population of Arabidopsis plants at an average density of more than one polymorphism per about 100 kb, wherein at least on eof the polymorphisms is selected from Table A; (B) calculating the linkage of each of the polymorphisms to the phenotypic trait; and (C) identifying the genomic DNA region associated with said phenotypic trait based on its linkage to one or more of said nucleic acid molecules.

[0018] The present invention also provides a method of identifying a nucleic acid molecule associated with a phenotypic trait of interest comprising: (A) screening a mapping population of Arabidopsis plants to determine the linkage of said phenotypic trait with a collection of polymorphisms, wherein said polymorphisms are distributed throughout the genome of said mapping population of Arabidopsis plants at an average density of more than one polymorphism per about 100 kb, wherein at least one of the polymorphisms is selected from Table A; (B) calculating the linkage of each of said polymorphisms to said phenotypic trait; and (C) isolating said nucleic acid molecule associated with said phenotypic trait based on its linkage to one or more of said polymorphisms.

[0019] The present invention also provides a method of isolating a nucleic acid molecule associated with a phenotypic trait comprising: (A) screening a mapping population of Arabidopsis plants to determine the linkage of said phenotypic trait with a collection of polymorphisms, wherein at least one polymorphism is selected form Table A; and (B) isolating said nucleic acid molecule associated with said phenotypic trait based on its linkage to one or more of said polymorphisms.

[0020] The present invention further provides a collection of non-identical nucleic acid molecules capable of detecting polymorphisms present in an Arabidopsis mapping population, wherein said collection of non-identical nucleic acid molecules is capable of detecting at least 25 polymorphisms selected from the group consisting of Table A. Such a collection may also be recorded on a computer readable medium having recorded thereon at least 100 of the polymorphisms set forth in Table A. Such a collection may also be deposited on a substrate.

[0021] The present invention also provides a method of introgressing a trait of interest into a plant comprising using a nucleic acid marker for marker assisted selection of said plant, said nucleic acid marker capable of detecting a polymorphism selected from Table A, and introgressing said trait into said plant.

[0022] The present invention further provides a method for identifying transposons in the DNA of an organism comprising identifying INDELs in said DNA and comparing the sequence of said INDELs to the sequence of one or more known transposons.

[0023] The present invention also provides a method of identifying a nucleic acid molecule associated with a phenotypic trait comprising: (A) screening a mapping population of Arabidopsis plants to determine the linkage of said phenotypic trait with a collection of polymorphisms, where the polymorphisms are distributed throughout the genome of said mapping population of Arabidopsis plants at an average density of more than one polymorphism per about 100 kb; and (B) identifying said nucleic acid molecule associated with said phenotypic trait based on its linkage to one or more of said polymorphisms.

[0024] Also provided is a method of identifying a nucleic acid molecule associated with a phenotypic trait of interest comprising: (A) screening a mapping population of Arabidopsis plants to determine the linkage of said phenotypic trait with a collection of polymorphisms, wherein said polymorphisms are distributed throughout the genome of said mapping population of Arabidopsis plants wherein at least one of the polymorphisms is selected from Table A; (B) calculating the linkage of each of said polymorphisms to said phenotypic trait; and, (C) isolating said nucleic acid molecule associated with said phenotypic trait based on its linkage to one or more of said polymorphisms, and wherein said collection of polymorphisms is designed from features of polymorphisms listed in Table A. Such a method may also be recorded on computer readable medium.

[0025] The present invention also provides a computer readable medium having recorded thereon polymorphisms selected from the group consisting of Single Nucleotide Polymorphisms 466799, 471736, 459697, 459698, 459699, 459700, 459701, 445015, 459702, 459703, 445016, 445017, 461062, 447523, 461063, 447524, 447525, 461064, 461065, 447526, 461066, 450823, 450824, 450825, 450826, 428620, 450827, 462117, 450828, 462118, 428621, 428622, 428623, 450829, 462119, 428624, 428625, 428626, 450830, 450831, 450832, 450833, 448562, 424491, 424492, 424493, 424494, 424495, 424496, 424497, 448563, 448564, 424498, 424499, 448565, 461975, 424500, 424501, 424502, 424503, 448566, 448567, 448568, 448569, 448570, 424504, 424505, 424506, 424507, 424508, 424509, 424510, 424511, 448571, 424512, 424513, 424514, 424515, 448572, 426007, 426008, 426009, 426010, 449396, 462027, 449397, 449398, 426011, 426012, 449399, 449400, 462028, 449401, 462029, 449402, 426013, 426014, 426015, 426016, and 426017.

[0026] Also provided are a collection of non-identical nucleic acid molecules capable of detecting polymorphisms in an Arabidopsis thaliana mapping population, wherein said collection of non-identical nucleic acid molecules is capable of detecting polymorphisms selected from the group consisting of Single Nucleotide Polymorphisms 466799, 471736, 459697, 459698, 459699, 459700, 459701, 445015, 459702, 459703, 445016, 445017, 461062, 447523, 461063, 447524, 447525, 461064, 461065, 447526, 461066, 450823, 450824, 450825, and 450826.

[0027] The present invention also provides a computer readable medium having recorded thereon Single Nucleotide Polymorphisms 466799 or 471736.

[0028] The present invention further provides a computer readable medium having recorded thereon a set of polymorphisms wherein said polymorphisms are distributed throughout the genome of Arabidopsis at an average density of more than one polymorphism per about 100 kb.

### DETAILED DESCRIPTION OF THE INVENTION

[0029] The genomes of animals and plants naturally undergo spontaneous mutation in the course of their continuing evolution (Gusella, Ann. Rev. Biochem. 55:831-854 (1986), the entirety of which is herein incorporated by reference). A “polymorphism” is a variation or difference in the sequence of a genetic region that arises in some of the members of a species. Variant sequences can be defined with reference to an arbitrary or non-arbitrary standard sequence for the species. A polymorphism is thus said to be “allelic,” in that, due to the existence of the polymorphism, some members of a species may have the “standard” sequence (i.e. the standard “allele”) whereas other members may have a variant sequence (i.e., a variant “allele”). Thus, as used herein, an allele is one of two or more alternative versions of a gene or other genetic region at a particular location on a chromosome. In the simplest case, only one variant sequence may exist, and the polymorphism is thus said to be bi-allelic. In other cases, the species' population may contain multiple alleles, and the polymorphism is termed tri-allelic, etc.

[0030] A single gene or genetic region may have multiple different unrelated polymorphisms. For example, it may have a one bi-allelic polymorphism at one site, another bi-allelic polymorphism at another site and a multi-allelic polymorphism at another site. When all the sequences for a group of alleles at a chromosomal locus in a plant are the same, the alleles are said to be “homozygous” at that locus. When the sequence of any allele at a particular locus in a plant is different, the population of alleles is said to be “heterozygous” at that locus.

[0031] Phenotypic traits can vary due to environmental and/or genetic factors. For example, polymorphisms at a particular chromosomal locus can affect the phenotypic trait associated with that locus.

[0032] As used herein, a phenotypic trait of interest may be any trait exhibited by a plant, whether naturally occurring or otherwise, that is capable of being inherited. Moreover, the phenotypic trait of interest may, for example, be transient, permanent or only present when the plant or part thereof is subjected to environmental stimuli or challenge. A phenotypic trait of interest may be a desired trait. In other cases the phenotypic trait of interest may be an undesired trait. Furthermore, phenotypic traits are not limited to visible traits. While the phenotypic trait may be any trait, preferred traits of interest are those that have agricultural significance. Examples of agricultural traits include those that affect a component of yield, those that provide disease or chemical resistance, and those that affect developmental traits such as pollen or ovule production, etc., and those that affect composition of plants or plant parts, including seed proteins or oils, starch or sugar composition, nutrient content and the like.

[0033] Many phenotypic traits are the result of multiple genes or genetic factors, for example, a phenotypic trait that is the result of a quantitative trait allele. An allele of a quantitative trait locus (QTL) can, of course, comprise multiple genes or other genetic factors even within a contiguous genomic region or linkage group. As used herein, an allele of a quantitative trait locus can therefore encompass more than one gene or other genetic factor where each individual gene or genetic component is also capable of exhibiting allelic variation and where each gene or genetic factor also has a phenotypic affect on the quantitative trait in question.

[0034] As used herein, a “marker” is an indicator for the presence of at least one polymorphism. A marker is preferably a nucleic acid molecule. It is understood that a marker can, for example, be an oligonucleotide probe or primer.

[0035] A “nucleic acid marker” as used herein means a nucleic acid molecule that is capable of being a marker for detecting a polymorphism.

[0036] The term “oligonucleotide” as used herein refers to short nucleic acid molecules useful, e.g. for hybridizing probes, nucleotide array elements or amplification primers. Oligonucleotide molecules are comprised of two or more nucleotides, i.e. deoxyribonucleotides or ribonucleotides, preferably more than five and up to 30 or more. The exact size will depend on many factors, which in turn depend on the ultimate function or use of the oligonucleotide. Oligonucleotides can comprise ligated natural nucleic acid molecules or synthesized nucleic acid molecules and comprise between 10 to 150 nucleotides or between about 12 and about 100 nucleotides which have a nucleotide sequence which can hybridiaze to a strand of polymorphic DNA, e.g. to permit detection of a polymorphism. Such oligonucleotides may be nucleic acid elements for use on solid arrays (e.g. synthesized or spotted). In preferred aspects of the invention such oligonucleotides can comprise as few as 12 hybridizing nucleotides, e.g. for assays where the oligonucleotide also comprises a detectable label. In other preferred aspects of the invention the oligonucleotide can comprise as few as about 15 hybridizing nucleotides, e.g. for single base extension assays.

[0037] Such oligonucleotides may also be primers for use in polymerase chain reaction (PCR) or other reactions. The term “primer” as used herein refers to a nucleic acid molecule, preferably an oligonucleotide whether derived from a naturally occurring molecule such as one isolated from a restriction digest or one produced synthetically, which is capable of acting as a point of initiation of synthesis when placed under conditions in which synthesis of a primer extension product which is complementary to a nucleic acid strand is induced, i.e., in the presence of nucleotides and an agent for polymerization such as DNA polymerase and at a suitable temperature and pH. The primer is preferably single stranded for maximum efficiency in amplification, but may alternatively be double stranded. If double stranded, the primer is first treated to separate its strands before being used to prepare extension products. Preferably, the primer is an oligodeoxyribonucleotide. The primer must be sufficiently long to prime the synthesis of extension products in the presence of the agent for polymerization. The exact lengths of the primers will depend on many factors, including temperature and source of primer. For example, depending on the complexity of the target sequence, the oligonucleotide primer typically contains at least 15, more preferably 18 nucleotides, which are identical or complementary to the template and optionally a tail of variable length which need not match the template. The length of the tail should not be so long that it interferes with the recognition of the template. Short primer molecules generally require cooler temperatures to form sufficiently stable hybrid complexes with the template.

[0038] The primers herein are selected to be “substantially” complementary to the different strands of each specific sequence to be amplified. This means that the primers must be sufficiently complementary to hybridize with their respective strands. Therefore, the primer sequence need not reflect the exact sequence of the template. For example, a non-complementary nucleotide fragment may be attached to the 5′ end of the primer, with the remainder of the primer sequence being complementary to the strand. Alternatively, non-complementary bases or longer sequences can be interspersed into the primer, provided that the primer sequence has sufficient complementarity with the sequence of the strand to be amplified to hybridize therewith and thereby form a template for synthesis of the extension product of the other primer. Computer generated searches using programs such as Primer3 (www-genome.wi.mit.edu/cgi-bin/primer/primer3.cgi), STSPipeline (www-genome.wi.mit.edu/cgi-bin/www-STS_Pipeline), or GeneUp (Pesole et al., BioTechniques 25:112-123 (1998), the entirety of which is herein incorporated by reference), for example, can be used to identify potential PCR primers. Exemplary primers include primers that are 18 to 50 bases long, where at least between 18 to 25 bases are identical or complementary to at least 18 to 25 bases of a segment of the template sequence.

[0039] This invention also contemplates and provides primer pairs for amplification of nucleic acid molecules in order to detect polymorphisms. As used herein “primer pair” means a set of two oligonucleotide primers based on two separated sequence segments of a target nucleic acid sequence. One primer of the pair is a “forward primer” or “5′ primer” having a sequence which is identical to the more 5′ of the separated sequence segments (+ strand). The other primer of the pair is a “reverse primer” or “3′ primer” having a sequence which is the reverse complement of the more 3′ of the separated sequence segments (+ strand). A primer pair allows for amplification of the nucleic acid sequence between and including the separated sequence segments. Optionally, each primer pair can comprise additional sequences, e.g. universal primer sequences or restriction endonuclease sites, at the 5′ end of each primer, e.g. to facilitate cloning, DNA sequencing, or reamplification of the target nucleic acid sequence.

[0040] As used herein, a “mapping population” is a collection of plants capable of being used with markers to map the genetic position of traits.

[0041] As used herein, a “polymorphic marker” is a marker capable of detecting one or more polymorphisms.

[0042] The present invention provides nucleic acid molecules which are markers, i.e. capable of detecting polymorphisms that are distributed throughout the genome of a mapping population.

[0043] As used herein, a “characterized polymorphism” is a polymorphism whose physical position on a genome is known. In a preferred embodiment, the physical position of a characterized polymorphism on an isolated nucleic acid molecule, such as a bacterial artificial chromosome comprising Arabidopsis thaliana genomic DNA, is known. Thus the present invention also provides nucleic acid molecules capable of detecting characterized polymorphisms throughout a genome.

[0044] In a further preferred embodiment, a characterized polymorphism is any polymorphism where the nucleic acid sequences of at least two of the polymorphisms present in an Arabidopsis mapping population are known (sequenced characterized polymorphism). In a particularly preferred embodiment, a characterized polymorphism is a polymorphism from Table A. In another particularly preferred embodiment, a characterized polymorphism from Table A is part of a collection of polymorphisms, where preferably over 25%, more preferably over 50% and even more preferably over 75% of the polymorphisms are selected from the polymorphisms in Table A.

[0045] The present invention provides nucleic acid molecules capable of detecting insertion/deletion polymorphisms (INDELs) in Arabidopsis at an average density of one INDEL per 8.4 kb. The present invention also provides nucleic acid molecules capable of detecting single nucleotide polymorphisms (SNPs) at an average density of one SNP per 3.9 kb. The present invention also provides nucleic acid molecules capable of detecting polymorphisms at an average density of one polymorphism per 2.7 kb.

[0046] As used herein, an “INDEL” is any insertion/deletion polymorphism characterized by additional nucleotides in at least one allele as compared to a reference allele. As used herein, a “SNP” is any polymorphism characterized by a different single nucleotide at a particular physical position in at least one allele.

[0047] The polymorphisms capable of detection by nucleic acid molecules of the present invention are distributed throughout the genome of the mapping population in a manner that allows the efficient identification of a genomic region associated with a phenotypic trait. In a preferred embodiment, the polymorphisms are distributed throughout the genome where 60%, preferably 70%, more preferably 80%, even more preferably 90%, 95% or 100% of the genome has a characterized polymorphism at a density of higher than one polymorphism per 100 kb, more preferably higher than one polymorphism per 50 kb, and even more preferably higher than one polymorphism per 25 kb, 10 kb, 7 kb, 5 kb or 3 kb. In another preferred embodiment, the polymorphisms are distributed throughout the genome where 60%, preferably 70%, more preferably 80%, even more preferably 90%, 95% or 100% of genome has a characterized polymorphism at a density of higher than one polymorphism per 3.5 cM, more preferably higher than one polymorphism per 3.25 cM, and even more preferably higher than one polymorphism per 3.0 cM, 2.75 cM, 2.5 cM, 2.0 cM, 1.5 cM, 1.0 cM or 0.5 cM.

[0048] In a preferred embodiment of the present invention, the efficient identification of a genomic region associated with a phenotypic trait, e.g. a QTL or a single gene, is provided, where the genomic region is less than 100 kb, more preferably less than 50 kb, and even more preferably less than 25 kb, 10 kb, 7 kb, 5 kb or 3 kb from a characterized polymorphism. In another preferred embodiment of the present invention the efficient identification of a genomic region associated with a phenotypic trait where the genomic region is less than 3.5 cM, more preferably less than 3.25 cM, and even more preferably less than 3 cM, 2.75 cM, 2.5 cM, 2.0 cM, 1.5 cM, 1.0 cM or 0.5 cM from a characterized polymorphism.

[0049] It is understood that the distribution of polymorphisms need not be uniform in a genome as certain regions will exhibit a higher average density of polymorphisms (e.g. non-centromeric regions) and certain regions will exhibit a lower average density of polymorphisms (e.g. centromeric regions).

[0050] In a preferred embodiment, the efficient identification of a genomic region associated with a phenotypic trait of interest will be obtained by a simultaneous screening for the presence of 25 or more, more preferably 50 or more, even more preferably 75 or more, 100 or more, 150 or more, 200 or more, 250 or more, 300 or more, 400 or more or 500 or more, 1,000 or more, 2,000 or more, 3,000 or more, 4,000 or more polymorphisms. When high throughput assays are emploued, e.g. with microarrays, it may be feasible to screen for the presence of 5,000 or more polymorphisms, e.g. at least 10,000 or even 15,000 polymorphisms. In an even more preferred embodiment, the efficient identification of a genomic region associated with a phenotypic trait of interest will be obtained by a simultaneously screening for the presence of 25 or more, more preferably 50 or more, even more preferably (where appropriate) 100 or more, or 250 or more etc. of the polymorphisms in Table A.

[0051] In another preferred embodiment, the efficient identification of a genomic region associated with a phenotypic trait of interest will be obtained by screening for the presence of 25 or more, more preferably 50 or more, even more preferably 75 or more, 100 or more, 150 or more, 200 or more, 250 or more, 300 or more, 400 or more or 500 or more, 1,000 or more, 2,000 or more, 3,000 or more, 4,000 or more polymorphisms during a single assay. In an even more preferred embodiment the efficient identification of a genomic region associated with a phenotypic trait of interest will be obtained by screening for the presence of 25 or more, more preferably 50 or more, even more preferably (where appropriate) 100 or more or 250 or more etc. of the polymorphisms in Table A during a single assay. A single assay can comprise many steps. One or more of these steps can occur sequentially.

[0052] In an embodiment of the present invention, the assay is carried out using a high throughput system. A particularly preferred high throughput system involves a solid phase array. A particularly preferred solid phase array is a microarray.

[0053] In the assays below, a collection of markers for polymorphisms can comprise from a few up to millions of different nucleic acid molecules. For example, using simple dot-blot hybridization methods, membranes with many nucleic acid molecules can be generated for screening. The solid-phase techniques described below and known in the art can be adapted for high-throughput monitoring of polymorphisms. In such methods different immobilized nucleic acid molecule probes can be placed on a solid support at microarray densities of up to millions of nucleic acid molecules per square inch. Similarly, very large sets of nucleic acid molecules can be immobilized for simultaneous screening against one or more probes.

[0054] Several methods have been described for fabricating microarrays of nucleic acid molecules and using such microarrays in detecting nucleic acid sequences. For instance, microarrays of markers for polymorphisms can be fabricated by spotting nucleic acid molecules, e.g. oligonucleotides, onto substrates or fabricating oligonucleotide sequences in situ on a substrate. Spotted or fabricated nucleic acid molecules can be applied in a high density matrix pattern of up to about 30 non-identical nucleic acid molecules per square centimeter or higher, e.g. up to about 100 or even 1,000 per square centimeter or higher. Useful substrates for arrays include nylon, glass and silicon. See, for instance, U.S. Pat. Nos. 5,202,231; 5,242,974; 5,384,261; 5,405,783; 5,412,087; 5,424,186; 5,429,807; 5,436,327; 5,445,934; 5,472,672; 5,525,464; 5,527,681; 5,529,756; 5,532,128; 5,545,531; 5,554,501; 5,556,752; 5,561,071; 5,571,639; 5,593,839; 5,599,695; 5,624,711; 5,658,734; 5,700,637; 5,744,305; 5,800,992; 5,807,522; 6,004,755 and 6,087,102 the disclosures of all of which are incorporated herein by reference in their entireties.

[0055] Sequences can be efficiently analyzed by hybridization or primer extension. See, for instance, U.S. Pat. Nos. 5,202,231; 5,445,934; 5,492,806; 5,525,464; 5,695,940; 5,700,637; 5,744,305; 5,800,992; 5,807,522; and 5,830,645, all of which are incorporated herein by reference in their entirety. Nucleic acid molecule microarrays may be screened with molecules or fragments thereof to determine nucleic acid molecules that specifically bind molecules or fragments thereof.

[0056] In a preferred embodiment, a microarray of the present invention comprises at least 10 nucleic acid molecules that specifically hybridize under high stringency to at least 10 polymorphic nucleic acid sequences characterized by this invention. In a more preferred embodiment, a microarray of the present invention comprises at least 100 nucleic acid molecules that specifically hybridize under high stringency to at least 100 characterized polymorphic nucleic acid sequences; more preferably at least 1,000 or 2,500 marker nucleic acid molecules that specifically hybridize under high stringency to at least 1,000 or 2,500 characterized polymorphic nucleic acid sequences; even more preferably at least at least 4,000 or more marker nucleic acid molecules that specifically hybridize under high stringency to at least 4,000 or more characterized polymorphic nucleic acid sequences.

[0057] In a preferred embodiment, a microarray of the present invention comprises at least 10 nucleic acid molecules capable of detecting or characterizing by primer extension to at least 10 polymorphic nucleic acid sequences characterized by this invention. In a more preferred embodiment, a microarray of the present invention comprises at least 100 nucleic acid molecules capable of detecting or characterizing by primer extension to at least 100 characterized polymorphic nucleic acid sequences; even more preferably at least 1,000 or 2,500 nucleic acid molecules capable of detecting or characterizing by primer extension to at least 1,000 or 2,500 characterized polymorphic nucleic acid sequences; even more preferably at least 4,000 or more nucleic acid molecules capable of detecting or characterizing by primer extension to at least 4,000 or more characterized polymorphic nucleic acid sequences.

[0058] In a preferred embodiment, the microarray is a variant detector array (VDA) (Cho et al., Nature Genetics 23:203-207 (1999); Wang et al., Science 280: 1077-1082 (1998), the entirety of which is herein incorporated by reference; Winzeler et al., Curr. Opin. Genet. Dev. 4: 602-608 (1997), the entirety of which is herein incorporated by reference). For example, each detection block can consist of four variant detector arrays (VDAs) corresponding to the alternative alleles: two for the forward strand sequence and two for the reverse strand sequence (See e.g. Cho et al., Nature Genetics 23:203-207 (1999)). For each of the interrogated positions (for example, −5 to +5 relative to the polymorphic position), a set of four suitable length oligonucleotides per SNP or other polymorphism (e.g. 25-mers are prepared where the oligonucleotides are complementary to the SNP or other polymorphic region except at the interrogated position). Hybridization of the oligonucleotides with the matching allele results in a strong signal.

[0059] The detection or screening of polymorphisms in a sample of DNA may be facilitated, for example, through including the use of nucleic acid amplification methods. Such methods specifically increase the concentration of polynucleotides that span the polymorphic site, or include that site and sequences located either distal or proximal to it. Such amplified molecules can be readily detected by gel electrophoresis or other means. For instance, polymorphisms in DNA sequences can be detected by a variety of effective methods well known in the art including those disclosed in U.S. Pat. Nos. 5,468,613 and 5,217,863; 5,210,015; 5,876,930; 6,030,787 6,004,744; 6,013,431; 5,595,890; 5,762,876; 5,945,283; 5,468,613; 6,090,558; 5,800,944 and 5,616,464, all of which are incorporated herein by reference in their entireties. In particular, polymorphisms in DNA sequences can be detected by hybridization to allele-specific oligonucleotide (ASO) probes as disclosed in U.S. Pat. Nos. 5,468,613 and 5,217,863. The nucleotide sequence of an ASO probe is designed to form either a perfectly matched hybrid or to contain a mismatched base pair at the site of the variable nucleotide residues. The distinction between a matched and a mismatched hybrid is based on differences in the thermal stability of the hybrids in the conditions used during hybridization or washing, differences in the stability of the hybrids analyzed by denaturing gradient electrophoresis or chemical cleavage at the site of the mismatch.

[0060] If a polymorphism creates or destroys a restriction endonuclease cleavage site, or if it results in the loss or insertion of DNA (e.g., a Variable Number of Tandem Repeats (VNTR) polymorphism), it will alter the size or profile of the DNA fragments that are generated by digestion with that restriction endonuclease. As such, individuals that possess a variant sequence can be distinguished from those having the original sequence by restriction fragment analysis. Polymorphisms that can be identified in this manner are termed “restriction fragment length polymorphisms” (“RFLPs”). RFLPs have been widely used in human and plant genetic analyses (Glassberg, UK Patent Application 2135774; Skolnick et al., Cytogen. Cell Genet. 32:58-67 (1982); Botstein et al., Ann. J. Hum. Genet. 32:314-331 (1980); Fischer et al., PCT Application WO 90/13668; Uhlen, PCT Application WO 90/11369, all of which are herein incorporated by reference in their entirety).

[0061] An alternative method of determining polymorphisms is based on cleaved amplified polymorphic sequences (CAPS) (Konieczny, A. and F. M. Ausubel, Plant J. 4:403-410 (1993); Lyamichev et al., Science 260:778-783 (1993), the entireties of which are herein incorporated by reference). One advantage of this method is the large amount of target DNA that is generated by amplification which elimiates the requirement for radiolabeling for detection of the polymorphism.

[0062] Polymorphisms can also be identified by single strand conformation polymorphism (SSCP) analysis. The SSCP technique is a method capable of identifying most sequence variations in a single strand of DNA, typically between 150 and 250 nucleotides in length (Elles, Methods in Molecular Medicine: Molecular Diagnosis of Genetic Diseases, Humana Press (1996), the entirety of which is herein incorporated by reference; Orita et al., Genomics 5:874-879 (1989), the entirety of which is herein incorporated by reference). Under denaturing conditions a single strand of DNA will adopt a conformation that is uniquely dependent on its sequence. This conformation usually will be different even if only a single base is changed. Most conformations have been reported to alter the physical configuration or size sufficiently to be detectable by electrophoresis. A number of protocols have been described for SSCP including, but not limited to Lee et al., Anal. Biochem. 205:289-293 (1992); the entirety of which is herein incorporated by reference; Suzuki et al., Anal. Biochem. 192:82-84 (1991), the entirety of which is herein incorporated by reference; Lo et al., Nucleic Acids Research 20:1005-1009 (1992), the entirety of which is herein incorporated by reference; Sarkar et al., Genomics 13:441-443 (1992), the entirety of which is herein incorporated by reference).

[0063] Polymorphisms may also be detected using a DNA fingerprinting technique called amplified fragment length polymorphism (AFLP), which is based on the selective PCR amplification of restriction fragments from a total digest of genomic DNA to profile that DNA. Vos et al., Nucleic Acids Res. 23:4407-4414 (1995), the entirety of which is herein incorporated by reference. This method allows for the specific co-amplification of many restriction fragments, which can be analyzed without knowledge of the nucleic acid sequence. AFLP employs basically three steps. Initially, a sample of genomic DNA is cut with restriction enzymes and oligonucleotide adapters are ligated to the restriction fragments of the DNA. The restriction fragments are then amplified using PCR by using the adapter and restriction sequence as target sites for primer annealing. The selective amplification is achieved by the use of primers that extend into the restriction fragments, amplifying only those fragments in which the primer extensions match the nucleotide flanking the restriction sites. These amplified fragments are then visualized on a denaturing polyacrylamide gel (Beismann et al., Mol. Ecol. 6:989-993 (1997); Janssen et al., Int. J. Syst. Bacteriol 47:1179-1187 (1997); Huys et al., Int. J. Syst. Bacteriol. 47:1165-1171 (1997); McCouch et al., Plant Mol. Biol. 35:89-99 (1997); Nandi et al., Mol. Gen. Genet. 255:1-8 (1997); Cho et al. Genome 39:373-378 (1996); Simons et al., Genomics 44:61-70 (1997); Cnops et al., Mol. Gen. Genet. 253:32-41 (1996); Thomas et al., Plant J 8:785-794 (1995), all of which are herein incorporated by reference in their entirety).

[0064] Polymorphisms may also be detected using random amplified polymorphic DNA (RAPD) (Williams et al., Nucl. Acids Res. 18:6531-6535 (1990), the entirety of which is herein incorporated by reference).

[0065] SNPs and insertion/deletions can be detected by methods as disclosed in U.S. Pat. Nos. 5,210,015; 5,876,930 and 6,030,787 in which an oligonucleotide probe having reporter and quencher molecules is hybridized to a target polynucleotide. The probe is degraded by 5′→3′ exonuclease activity of a nucleic acid polymerase. A useful assay is available from AB Biosystems as the Taqman® assay.

[0066] Specific nucleotide variations such as SNPs and insertion/deletions can also be detected by labeled base extension methods as disclosed in U.S. Pat. Nos. 6,004,744; 6,013,431; 5,595,890; 5,762,876; and 5,945,283. These methods are based on primer extension and incorporation of detectable nucleoside triphosphates. The primer is designed to anneal to the sequence immediately adjacent to the variable nucleotide which can be can be detected after incorporation of as few as one labeled nucleoside triphosphate. U.S. Pat. No. 5,468,613 discloses allele specific oligonucleotide hybridizations where single or multiple nucleotide variations in nucleic acid sequence can be detected in nucleic acids by a process in which the sequence containing the nucleotide variation is amplified, spotted on a membrane and treated with a labeled sequence-specific oligonucleotide probe.

[0067] SNPs generally occur at greater frequency than other polymorphic markers and are spaced with a greater uniformity throughout a genome than other reported forms of polymorphism. The greater frequency and uniformity of SNPs means that there is greater probability that such a polymorphism will be found near or in a genetic locus of interest than would be the case for other polymorphisms. SNPs are located in protein-coding regions and noncoding regions of a genome. Some of these SNPs may result in defective or variant protein expression (e.g., as a result of mutations or defective splicing). Analysis (genotyping) of characterized SNPs can require only a plus/minus assay rather than a lengthy measurement, permitting easier automation.

[0068] Other methods for identifying and detecting SNPs include the direct or indirect sequencing of the site, the use of restriction enzymes (Botstein et al., Am. J. Hum. Genet. 32:314-331 (1980); and Konieczny and Ausubel, Plant J. 4:403-410 (1993)), enzymatic and chemical mismatch assays (Myers et al., Nature 313:495-498 (1985)), allele-specific PCR (Newton et al., Nucl. Acids Res. 17:2503-2516 (1989); and Wu et al., Proc. Natl. Acad. Sci. USA 86:2757-2760 (1989)), ligase chain reaction (Barany, Proc. Natl. Acad. Sci. USA 88:189-193 (1991)), single-strand conformation polymorphism analysis (Labrune et al., Am. J. Hum. Genet. 48: 1115-1120 (1991)), single base primer extension (Kuppuswamy et al., Proc. Natl. Acad. Sci. USA 88:1143-1147 (1991); and Goelet, U.S. Pat. Nos. 6,004,744 and 5,888,819 both of which are incorporated herein by reference), solid-phase ELISA-based oligonucleotide ligation assays (Nikiforov et al., Nucl. Acids Res. 22:4167-4175 (1994)), dideoxy fingerprinting (Sarkar et al., Genomics 13:441-443 (1992)), oligonucleotide fluorescence-quenching assays (Livak et al., PCR Methods Appl. 4:357-362 (1995)), 5′-nuclease allele-specific hybridization TaqMan™ assay (Livak et al., Nature Genet. 9:341-342 (1995)), template-directed dye-terminator incorporation (TDI) assay (Chen and Kwok, Nucl. Acids Res. 25:347-353 (1997)), allele-specific molecular beacon assay (Tyagi et al., Nature Biotech. 16: 49-53 (1998)), PinPoint assay (Haff and Smirnov, Genome Res. 7: 378-388 (1997)), dCAPS analysis (Neff et al., Plant J. 14:387-392 (1998)), pyrosequencing (Ronaghi et al, Analytical Biochemistry 267:65-71 (1999); Ronaghi et al PCT application WO 98/13523; and Nyren et al PCT application WO 98/28440), using mass spectrometry e.g., the Masscode™ system (Howbert et al WO 99/05319; Howber et al WO 97/27331), mass spectroscopy (U.S. Pat. No. 5,965,363, incorporated herein by reference), invasive cleavage of oligonucleotide probes (Lyamichev et al Nature Biotechnology 17:292-296), and using high density oligonucleotide arrays (Hacia et al Nature Genetics 22:164-167).

[0069] INDELs are identified by comparing sequence of Arabidopsis thaliana ecotypes Columbia and Landsberg erecta. Certain INDELs are believed to have resulted from insertion or excision of transposable elements. Thus, INDEL sequences can be used to identify candidate sequences for active transposons by comparing INDEL sequences to the sequence of known transposons. For instance, certain INDEL sequences of greater than 100 bp were found to exhibit similarity to the sequence of MuDR transposable element from maize.

[0070] Polymorphisms may also be detected using allele-specific oligonucleotides (ASO), which, can be for example, used in combination with hybridization based technology including southern, northern, and dot blot hybridizations, reverse dot blot hybridizations and hybridizations performed on microarray and related technology.

[0071] The stringency of hybridization for polymorphism detection is highly dependent upon a variety of factors, including length of the allele-specific oligonucleotide, sequence composition, degree of complementarity (i.e. presence or absence of base mismatches), concentration of salts and other factors such as formamide, and temperature. These factors are important both during the hybridization itself and during subsequent washes performed to remove target polynucleotide that is not specifically hybridized. In practice, the conditions of the final, most stringent wash are most critical. In addition, the amount of target polynucleotide that is able to hybridize to the allele-specific oligonucleotide is also governed by such factors as the concentration of both the ASO and the target polynucleotide, the presence and concentration of factors that act to “tie up” water molecules, so as to effectively concentrate the reagents (e.g., PEG, dextran, dextran sulfate, etc.), whether the nucleic acids are immobilized or in solution, and the duration of hybridization and washing steps.

[0072] Hybridizations are preferably performed below the melting temperature (Tₘ) of the ASO. The closer the hybridization and/or washing step is to the Tₘ, the higher the stringency. Tₘ for an oligonucleotide may be approximated, for example, according to the following formula: Tₘ=81.5+16.6×(log 10[Na+])+0.41*(% G+C)−675/n; where [Na+] is the molar salt concentration of Na+ or any other suitable cation and n=number of bases in the oligonucleotide. Other formulas for approximating Tₘ are available and are known to those of ordinary skill in the art.

[0073] Stringency is preferably adjusted so as to allow a given ASO to differentially hybridize to a target polynucleotide of the correct allele and a target polynucleotide of the incorrect allele. Preferably, there will be at least a two-fold differential between the signal produced by the ASO hybridizing to a target polynucleotide of the correct allele and the level of the signal produced by the ASO cross-hybridizing to a target polynucleotide of the incorrect allele (e.g., an ASO specific for a mutant allele cross-hybridizing to a wild-type allele). In more preferred embodiments of the present invention, there is at least a five-fold signal differential. In highly preferred embodiments of the present invention, there is at least an order of magnitude signal differential between the ASO hybridizing to a target polynucleotide of the correct allele and the level of the signal produced by the ASO cross-hybridizing to a target polynucleotide of the incorrect allele.

[0074] While certain methods for detecting polymorphisms are described herein, other detection methodologies may be utilized. For example, additional methodologies are known and set forth, in Birren et al., Genome Analysis, 4:135-186, A Laboratory Manual. Mapping Genomes, Cold Spring Harbor Laboratory Press, Cold Spring Harbor, N.Y. (1999); Maliga et al., Methods in Plant Molecular Biology. A Laboratory Course Manual, Cold Spring Harbor Laboratory Press, Cold Spring Harbor, N.Y. (1995); Paterson, Biotechnology Intelligence Unit: Genome Mapping in Plants, R. G. Landes Co., Georgetown, Tex., and Academic Press, San Diego, Calif. (1996); The Maize Handbook, Freeling and Walbot, eds., Springer-Verlag, New York, N.Y. (1994); Methods in Molecular Medicine Molecular Diagnosis of Genetic Diseases, Elles, ed., Humana Press, Totowa, N.J. (1996); Clark, ed., Plant Molecular Biology: A Laboratory Manual, Clark, ed., Springer-Verlag, Berlin, Germany (1997), all of which are herein incorporated by reference in their entirety.

[0075] Detection of one or more of the polymorphisms, preferably one or more of the characterized polymorphisms, may be carried out using a collection of nucleic acid markers.

[0076] Preferred aspects of this invention comprise collections of nucleic acid markers comprising nucleic acid molecules where the collections range in size from about 10 non-identical members or more, to at least about 100 or 200 or higher, more preferably at least about 300 or 350, most preferably at least 400 or 500 or higher, up to about 1,000, or 2000 or even higher, say about 4,000 or greater, or more non-identical members. High density collections of 5,000 or more polymorphism, e.g. at least 10,000 or even 15,000 polymorphisms may be useful for high throughput assays, e.g. with microarrays. As used herein a non-identical member is a member that differs in nucleic acid or amino acid sequence. For example, a non-identical nucleic acid molecule is a nucleic acid molecule that differs in nucleic acid sequence from the nucleic acid molecule to which it is being compared. For example a nucleic acid molecule having the sequence 5′ CCC 3′ is not identical—i.e. is non-identical—to a nucleic acid molecule having the sequence 5′ CCG 3′. In one limited aspect a collection may comprise all of the nucleic acid markers identified by this invention. Collections of nucleic acid markers can be located or organized in a variety of forms, e.g. on microarrays, in solutions, in bacterial clone libraries, etc. As used herein, an “organized” collection is a collection where the nucleic acid or amino acid sequence of a member of such a collection can be determined based on its physical location.

[0077] In order to simultaneously screen for multiple polymorphisms, the nucleic acid markers can be designed for simultaneous use known as multiplexing. Examples of design approaches for multiplexing are set forth in Cho et al., Nature Genetics 23:203-207 (1999); Wang et al., Science 280: 1077-1082 (1998), the entirety of which is herein incorporated by reference; Winzeler et al., Curr. Opin. Genet. Dev. 4: 602-608 (1997), the entirety of which is herein incorporated by reference. Examples of nucleic acid markers that have been optimized for multiplexing are the primers set forth in Table B. Multiplex parameters often require the selection of loci with similar amplification efficiencies, minimizing the concentration of the primers used, and an increased magnesium concentration (Cho et al., Nature Genetics 23:203-207 (1999)).

[0078] In a preferred embodiment, the polymorphism is present and screened for in a mapping population, e.g. a collection of plants capable of being used with markers such as polymorphic markers to map genetic position of traits. The choice of appropriate mapping population often depends on the type of marker systems employed (Tanksley et al., J. P. Gustafson and R. Appels (eds.). Plenum Press, New York, pp. 157-173 (1988), the entirety of which is herein incorporated by reference). Consideration must be given to the source of parents (adapted vs. exotic) used in the mapping population. Chromosome pairing and recombination rates can be severely disturbed (suppressed) in wide crosses (adapted×exotic) and generally yield greatly reduced linkage distances. Wide crosses will usually provide segregating populations with a relatively large number of polymorphisms when compared to progeny in a narrow cross (adapted×adapted).

[0079] An F₂ population is the first generation of selfing (self-pollinating) after the hybrid seed is produced. Usually a single F₁ plant is selfed to generate a population segregating for all the genes in Mendelian (1:2:1) pattern. Maximum genetic information is obtained from a completely classified F₂ population using a codominant marker system (Mather, Measurement of Linkage in Heredity: Methuen and Co., (1938), the entirety of which is herein incorporated by reference). In the case of dominant markers, progeny tests (e.g., F₃, BCF₂) are required to identify the heterozygotes, in order to classify the population. However, this procedure is often prohibitive because of the cost and time involved in progeny testing. Progeny testing of F₂ individuals is often used in map construction where phenotypes do not consistently reflect genotype (e.g. disease resistance) or where trait expression is controlled by a QTL. Segregation data from progeny test populations e.g. F₃ or BCF₂) can be used in map construction. Marker-assisted selection can then be applied to cross progeny based on marker-trait map associations (F₂, F₃), where linkage groups have not been completely disassociated by recombination events (i.e., maximum disequilibrium).

[0080] Recombinant inbred lines (RIL) (genetically related lines; usually >F₅, developed from continuously selfing F₂ lines towards homozygosity) can be used as a mapping population. Information obtained from dominant markers can be maximized by using RIL because all loci are homozygous or nearly so. Under conditions of tight linkage (i.e., about <10% recombination), dominant and co-dominant markers evaluated in RIL populations provide more information per individual than either marker type in backcross populations (Reiter. Proc. Natl. Acad. Sci. (U.S.A.) 89:1477-1481 (1992), the entirety of which is herein incorporated by reference). However, as the distance between markers becomes larger (i.e., loci become more independent), the information in RIL populations decreases dramatically when compared to codominant markers.

[0081] Backcross populations (e.g., generated from a cross between a successful variety (recurrent parent) and another variety (donor parent) carrying a trait not present in the former) can be utilized as a mapping population. A series of backcrosses to the recurrent parent can be made to recover most of its desirable traits. Thus a population is created consisting of individuals nearly like the recurrent parent but each individual carries varying amounts or mosaic of genomic regions from the donor parent. Backcross populations can be useful for mapping dominant markers if all loci in the recurrent parent are homozygous and the donor and recurrent parent have contrasting polymorphic marker alleles (Reiter et al., Proc. Natl. Acad. Sci. (U.S.A.) 89:1477-1481 (1992), the entirety of which is herein incorporated by reference). Information obtained from backcross populations using either codominant or dominant markers is less than that obtained from F₂ populations because one, rather than two, recombinant gamete is sampled per plant. Backcross populations, however, are more informative (at low marker saturation) when compared to RILs as the distance between linked loci increases in RIL populations (i.e. about 0.15% recombination). Increased recombination can be beneficial for resolution of tight linkages, but may be undesirable in the construction of maps with low marker saturation.

[0082] Near-isogenic lines (NIL) (created by many backcrosses to produce a collection of individuals that is nearly identical in genetic composition except for the trait or genomic region under interrogation) can be used as a mapping population. In mapping with NILs, only a portion of the polymorphic loci is expected to map to a selected region.

[0083] Bulk segregant analysis (BSA) is a method developed for the rapid identification of linkage between markers and traits of interest (Michelmore et al., Proc. Natl. Acad. Sci. U.S.A. 88:9828-9832 (1991), the entirety of which is herein incorporated by reference). In BSA, two bulked DNA samples are drawn from a segregating population originating from a single cross. These bulks contain individuals that are identical for a particular trait (resistant or susceptible to particular disease) or genomic region but arbitrary at unlinked regions (i.e. heterozygous). Regions unlinked to the target region will not differ between the bulked samples of many individuals in BSA.

[0084] While any appropriate mapping population may be used in conjunction with this invention, in a preferred embodiment the mapping population is an Arabidopsis population, where the population was created, at least in part, by crossing two different Arabidopsis ecotypes, where one of the ecotypes has a phenotype of interest. In an even more preferred embodiment the ecotypes are Arabidopsi, thaliana, Columbia and Arabidopsis thaliana, Landsberg erecta. In another preferred embodiment, the mapping population is an Arabidopsis population, where the population was created, at least in part, by crossing two different Arabidopsis ecotypes, where one of the ecotypes has a phenotype of interest, propagating and self pollinating seeds from such a cross and selecting a collection of plants with the phenotype of interest to be the mapping population.

[0085] Classical mapping studies often utilize easily observable, visible traits instead of molecular markers. These visible traits are also known as naked eye polymorphisms. These traits can be morphological like plant height, fruit size, shape and color or physiological like disease response, photoperiod sensitivity and crop maturity. Visible traits are useful and are still in use because they represent actual phenotypes and are easy to score without any specialized lab equipment. By contrast, many nucleic acid markers are arbitrary loci for use in linkage mapping and often not associated with specific plant phenotypes (Young, Encyclopedia of Agricultural Science, Vol. 3, pp. 275-282 (1994), the entirety of which is herein incorporated by reference). Many morphological markers cause such large effects on phenotype that they are undesirable in breeding programs. Many other visible traits have the disadvantage of being developmentally regulated (i.e., expressed only at certain stages; or in specific tissue and organs). Oftentimes, visible traits mask the effects of linked minor genes making it nearly impossible to identify desirable linkages for selection (Tanksley et al., Biotech. 7:257-264 (1989), the entirety of which is herein incorporated by reference).

[0086] Although a number of important agronomic characteristics are controlled by loci having major effects on phenotype, many economically important traits, such as yield and some forms of disease resistance, are quantitative in nature. This type of phenotypic variation in a trait is typically characterized by continuous, normal distribution of phenotypic values in a particular population (polygenic traits) (Beckmann and Soller, Oxford Surveys of Plant Molecular Biology, Miffen. (ed.), Vol. 3, Oxford University Press, UK., pp. 196-250 (1986), the entirety of which is herein incorporated by reference). Loci contributing to such genetic variation are often termed minor genes, as opposed to major genes with large effects that follow a Mendelian pattern of inheritance. Polygenic traits are also predicted to follow a Mendelian type of inheritance, however the contribution of each locus is expressed as an increase or decrease in the final trait value. The nucleic acid markers of the present invention can be used to identify and isolate nucleic acid regions or molecules associated with desired polygenic or single gene traits.

[0087] In one embodiment, the nucleic acid markers of the present invention are used to isolate or identify an allele of a quantitative trait locus or Mendelian locus.

[0088] Nucleic acid markers of the present invention capable of detecting one or more of the polymorphisms may be employed in genetic or physical studies using linkage analysis. Mapping marker genetic locations is based on the observation that two markers located near each other on the same chromosome will tend to be passed together from parent to offspring. During gamete production, DNA strands occasionally break and rejoin in different places on the same chromosome or on the homologous chromosome. The closer the markers are to each other, the more tightly linked and the less likely a recombination event will fall between and separate them. Recombination frequency thus provides an estimate of the distance between two markers.

[0089] Linkage analysis is based on the level at which markers and genes are co-inherited (Rothwell, Understanding Genetics. 4^{th} Ed. Oxford University Press, New York, p. 703 (1988), the entirety of which is herein incorporated by reference). Statistical tests like chi-square analysis can be used to test the randomness of segregation or linkage (Kochert, The Rockefeller Foundation International Program on Rice Biotechnology, University of Georgia Athens, Ga., pp. 1-14 (1989), the entirety of which is herein incorporated by reference). In linkage mapping, the proportion of recombinant individuals out of the total mapping population provides the information for determining the genetic distance between the loci (Young, Encyclopedia of Agricultural Science, Vol. 3, pp. 275-282 (1994), the entirety of which is herein incorporated by reference). Any statistical analysis that establishes linkage may be used. An example of a suitable linkage approach is Intermap as set forth in Cho et al., Nature Genetics 23: 203-207 (1999). Example 6 sets forth another exemplary linkage approach.

[0090] In segregating populations, target genes have been reported to have been placed within an interval of 5-10 cM with a high degree of certainty (Tanksley et al., Trends in Genetics 11(2):63-68 (1995), the entirety of which is herein incorporated by reference). The markers defining this interval are used to screen a larger segregating population to identify individuals derived from one or more gametes containing a crossover in the given interval. Such individuals are useful in orienting other markers closer to the target gene. Once identified, these individuals can be analyzed in relation to all molecular markers within the region to identify those closest to the target.

[0091] Markers of the present invention can be employed to locate genes. The genetic linkage of additional marker molecules can be established by a genetic mapping model such as, without limitation, the flanking marker model reported by Lander and Botstein, Genetics 121:185-199 (1989), the entirety of which is herein incorporated by reference, and the interval mapping, based on maximum likelihood methods described by Lander and Botstein, Genetics 121:185-199 (1989), the entirety of which is herein incorporated by reference and implemented in the software package MAPMAKER/QTL (Lincoln and Lander, Mapping Genes Controlling Quantitative Traits Using MAPMAKER/QTL, Whitehead Institute for Biomedical Research, Mass., (1990), the entirety of which is herein incorporated by reference). Additional software includes Qgene, Version 2.23 (Department of Plant Breeding and Biometry, 266 Emerson Hall, Cornell University, Ithaca, N.Y. (1996), the manual of which is herein incorporated by reference in its entirety).

[0092] The LOD score essentially indicates how much more likely the data are to have arisen assuming the presence of an allele than in its absence. The LOD threshold value for avoiding a false positive with a given confidence, say 95%, depends on the number of markers and the length of the genome. Graphs indicating LOD thresholds are set forth in Lander and Botstein, Genetics 121:185-199 (1989), the entirety of which is herein incorporated by reference and further described by Ards and Moreno-Gonzalez, Plant Breeding, Hayward, Bosemark, Romagosa (eds.) Chapman & Hall, London, pp. 314-331 (1993), the entirety of which is herein incorporated by reference.

[0093] In a preferred embodiment of the present invention the nucleic acid marker exhibits a LOD score of greater than 2.0, more preferably 2.5, even more preferably greater than 3.0 or 4.0 with the trait or phenotype of interest.

[0094] Additional models can be used. Many modifications and alternative approaches to interval mapping have been reported, including the use of non-parametric methods (Kruglyak and Lander, Genetics, 139:1421-1428 (1995), the entirety of which is herein incorporated by reference). Multiple regression methods or models can be also used, in which the trait is regressed on a large number of markers (Jansen, Biometrics in Plant Breed, van Oijen, Jansen (eds.) Proceedings of the Ninth Meeting of the Eucarpia Section Biometrics in Plant Breeding, The Netherlands, pp. 116-124 (1994); Weber and Wricke, Advances in Plant Breeding, Blackwell, Berlin, 16 (1994), the entirety of which is herein incorporated by reference). Procedures combining interval mapping with regression analysis, whereby the phenotype is regressed onto a single putative QTL at a given interval, and at the same time onto a number of polymorphisms that serve as ‘cofactors,’ have been reported by Jansen and Stam, Genetics, 136:1447-1455 (1994), the entirety of which is herein incorporated by reference and Zeng, Genetics, 136:1457-1468 (1994), the entirety of which is herein incorporated by reference. Generally, the use of cofactors reduces the bias and sampling error of the estimated QTL positions (Utz and Melchinger, Biometrics in Plant Breeding, van Oijen, Jansen (eds.) Proceedings of the Ninth Meeting of the Eucarpia Section Biometrics in Plant Breeding, The Netherlands, pp. 195-204 (1994)), thereby improving the precision and efficiency of QTL mapping (Zeng, Genetics, 136:1457-1468 (1994), the entirety of which is herein incorporated by reference). These models can be extended to multi-environment experiments to analyze genotype-environment interactions (Jansen et al., Theo. Appl. Genet. 91:33-37 (1995), the entirety of which is herein incorporated by reference).

[0095] The nucleic acid markers of the present invention may be used to isolate an allele, a region of genomic DNA associated with a phenotype, etc. Once the genomic region associated with the phenotype of interest is defined relative to at least one nucleic acid marker, preferably at least two nucleic acid markers capable of detecting different polymorphisms, the genomic region associated with the phenotype may be further characterized. One approach is to select additional nucleic acid markers from the genomic region associated with the trait and localize the genomic region associated with the phenotype to a smaller genomic region by a technique such as fine mapping.

[0096] For example, in a preferred embodiment a method for identifying or isolating a genomic region associated with a phenotypic trait that comprises (A) screening a mapping population of Arabidopsis plants to determine the linkage of the phenotypic trait with a first collection of polymorphisms, wherein the first collection of polymorphisms is distributed throughout the genome of the mapping population of Arabidopsis plants at an average density of more than one polymorphism per about 500 kb-100 kb; (B) calculating the linkage of each of the first collection of polymorphisms to the phenotypic trait; (C) identifying a genomic region most closely associated with the phenotypic trait; (D) selecting a second collection of polymorphisms from the genomic region; and (E) screening the mapping population of Arabidopsis plants to determine the linkage of the phenotypic trait with the second collection of polymorphisms from the genomic region, wherein the second collection of polymorphisms have an average density of more than one polymorphism per about 50 kb-1 kb.

[0097] In an embodiment of the present invention, for a fine mapping step of the present invention the collection of marker nucleic acids is capable of detecting a characterized polymorphism at a density of greater than one polymorphism per 50 kb, more preferably at a density greater than one polymorphism per 25 kb, even more preferably at a density greater than one polymorphism per 10 kb or 5 kb. It is understood, that the fine mapping using such a collection of markers may be carried out, for example, in a single assay or simultaneously.

[0098] Once the genomic region associated with the phenotype is identified, the genomic region may be isolated. Alternatively, or in conjunction, such a region may be further defined or characterized. Many approaches are known in the art and may be undertaken (Sambrook et al., Molecular Cloning 1: A Laboratory Manual, 2d ed., Ford et al., eds., Cold Spring Harbor Laboratory Press, Cold Spring Harbor, N.Y. (1989); Sambrook et al., Molecular Cloning 2: A Laboratory Manual, 2d ed., Ford et al., eds., Cold Spring Harbor Laboratory Press, Cold Spring Harbor, N.Y. (1989); Sambrook et al., Molecular Cloning 3: A Laboratory Manual, 2d ed., Ford et al., eds., Cold Spring Harbor Laboratory Press, Cold Spring Harbor, N.Y. (1989); Maliga et al., Methods in Plant Molecular Biology: A Laboratory Course Manual, Cold Spring Harbor Laboratory Press, Cold Spring Harbor, N.Y. (1995); and Birren et al., Genome Analysis: A Laboratory Manual. Volume 2: Detecting Genes, Cold Spring Harbor Laboratory Press, Cold Spring Harbor, N.Y. (1998), all of which are herein incorporated by reference in their entirety). For example, once identified, the sequence of the genomic region associated with the phenotype may be determined and subjected to bioinformatic analysis (Coulson, Trends in Biotechnology 12:76-80 (1994); Birren et al., Genome Analysis 1, Cold Spring Harbor Laboratory Press, Cold Spring Harbor, N.Y. 543-559 (1997); Huang, et al., Genomics 46:37-45 (1997), all of which are herein incorporated by reference in their entirety). Such bioinformatic approaches can provide, for example, information on the location of putative open reading frames, promoters, and a variety of nucleotide motifs. Moreover, also using bioinformatic approaches, the nucleic acid sequence of the genomic region can be compared with other nucleic acid sequences. Such comparisons can facilitate the isolation of Arabidopsis homologs to known genes or genomic regions. Examples of such bioinformation tools are BLAST, GeneScan, GeneMark and AAT.

[0099] Other methods can be utilized to further isolate, define, or characterize the genomic region associated with the phenotype. The expression profiles of mRNA and proteins derived from genes that are located within the genetic region associated with the phenotype can be analyzed. Such analysis, will in certain circumstances, allow the gene or genes associated with the phenotype to be determined.

[0100] A genomic region or sub-region thereof may be isolated using any of the many techniques in the art. In addition to those procedures and methods set forth herein, practitioners are familiar with the standard resource materials which describe specific conditions and procedures for the construction, manipulation and isolation of macromolecules (e.g., DNA molecules, plasmids, etc.), generation of recombinant organisms and the screening and isolating of clones, (see, for example, Sambrook et al., Molecular Cloning: A Laboratory Manual, Cold Spring Harbor Press (1989); Mailga et al., Methods in Plant Molecular Biology, Cold Spring Harbor Press (1995); Birren et al., Genome Analysis Analyzing DNA, 1, Cold Spring Harbor, N.Y., all of which are herein incorporated by reference in their entirety).

[0101] The biological function of a genomic region or subregion thereof such as a gene or open reading frame, can be further investigated using a mutant complementation approach or other reverse genetics approach. For example, a gene or genes identified within the genomic region associated with the phenotype may be isolated from the organism exhibiting the non-mutant phenotype (often referred to as the wild type). Such a gene or genes may be introduced into an appropriate organism that lacks the phenotype (often referred to as mutant) either by crosses or by molecular genetic techniques such as transformation or transfection. Organisms having the introduced genetic material may be screened to determine whether the introduced gene or genes complements, i.e. restores the phenotype of the mutant (Pan, FEBS Lett. 459(3): 405-410 (1999); Kerckhoffs et al., Mol. Gen. Genet. 6: 901-907 (1999); Lizotte et al., Gene 234(1): 35-44 (1999); Berna et al., Genetics 152: 729-742 (1999); Liu et al., Proc. Natl. Acad. Sci. (USA) 96(11): 6535-6540 (1999); Pia et al., Plant Physiol. 119(4): 1527-1534 (1999); Loulergue et al., Gene 225(1-2): 47-57 (1998); Jouannic et al., Eur. J. Bioche,. 258(2): 402-410 (1998), all of which are herein incorporated by reference in their entirety). While gene or genes etc. may be introduced into any organism, preferred organisms are plants, yeasts, and bacteria particularly E. coli. In a more preferred embodiment the organism is Arabidopsis.

[0102] The nucleic acid markers of the present invention may be used for chromosomal walking. Such walking, in conjunction with linkage analysis, can enable the isolation of genes. Once a nucleic acid marker is linked to a region of interest, the chromosome walking technique can be used to find the genes via overlapping clones. For chromosome walking, random molecular markers or established molecular linkage maps are used to conduct a search to localize the gene adjacent to one or more markers capable of detecting a polymorphism. A chromosome walk (Bukanov and Berg, Mo. Microbiol. 11:509-523 (1994), the entirety of which is herein incorporated by reference; Birkenbihl and Vielmetter, Nucleic Acids Res. 17:5057-5069 (1989), the entirety of which is herein incorporated by reference; Wenzel and Herrmann, Nucleic Acids Res. 16:8323-8336, (1988), the entirety of which is herein incorporated by reference) is then initiated from the closest linked marker. Starting from the selected clones, labeled probes specific for the ends of the insert DNA are synthesized and used as probes in hybridizations against a representative library. Clones hybridizing with one of the probes are picked and serve as templates for the synthesis of new probes; by subsequent analysis, contigs are produced.

[0103] The degree of overlap of the hybridizing clones used to produce a contig can be determined by comparative restriction analysis. Comparative restriction analysis can be carried out in different ways all of which exploit the same principle; two clones of a library are very likely to overlap if they contain a limited number of restriction sites for one or more restriction endonucleases located at the same distance from each other. The most frequently used procedures are, fingerprinting (Coulson et al., Proc. Natl. Acad. Sci. (U.S.A.) 83:7821-7821, (1986), the entirety of which is herein incorporated by reference; Knott et al., Nucleic Acids Res. 16:2601-2612 (1988), the entirety of which is herein incorporated by reference; Eiglmeier et al. Mol. Microbiol. 7:197-206 (1993), the entirety of which is herein incorporated by reference), restriction fragment mapping (Smith and Birnstiel, Nucleic Acids Res. 3:2387-2398 (1976), the entirety of which is herein incorporated by reference), and the “landmarking” technique (Charlebois et al. J. Mol. Biol. 222:509-524 (1991), the entirety of which is herein incorporated by reference).

[0104] It is understood that the nucleic acid molecules of the present invention may in one embodiment be used for chromosomal walking. In a preferred embodiment, nucleic acid molecules of the present invention may in one embodiment be used in the chromosomal walking of Brassicaceae, particularly Arabidopsis thaliana.

[0105] Nucleic acid markers of the present invention can be used in comparative mapping and comparative chromosomal walking. Comparative mapping within families provides a method to assess the degree of sequence conservation, gene order, ploidy of species, ancestral relationships and the rates at which individual genomes are evolving. It also provides a method to isolate genetic regions or sub-aspects thereof such as genes. Comparative mapping has been carried out by utilizing molecular markers from one species with another species. As in genetic mapping, nucleic acid markers are needed but instead of direct hybridization to mapping filters, the markers can also be used to select large insert clones from a total genomic DNA library of a related species. The selected clones can then be used to physically map the region in the target species. The advantage of this method for comparative mapping is that no mapping population or linkage map of the target species is needed and the clones may also be used in other closely related species. By comparing the results obtained by genetic mapping in model plants, with those from other species, similarities of genomic structure among plants species can be established. Comparative mapping using nucleic acid markers of the present invention permits the identification and/or isolation of non-Arabidopsis syntenic regions and homolog genes with such regions.

[0106] It is understood that nucleic acid markers of the present invention may in another embodiment be used in comparative mapping. In a preferred embodiment the markers of the present invention may be used in the comparative mapping of non-Arabidopsis plant species, including but not limited to alfalfa, barley, Brassica, broccoli, cabbage, citrus, cotton, garlic, oat, oilseed rape, onion, canola, flax, an ornamental plant, maize, pea, peanut, pepper, potato, rice, rye, sorghum, soybean, strawberry, sugarcane, sugarbeet, tomato, wheat, poplar, pine, fir, eucalyptus, apple, lettuce, lentils, grape, banana, tea, turf grasses, sunflower, oil palm, Phaseolus etc. Particularly preferred non-Arabidopsis plants to utilize for comparative mapping are the Brassicaceae, e.g. oilseed rape.

[0107] Agents of the present invention include nucleic acid molecules and more specifically include nucleic acid markers capable of detecting polymorphisms. In a preferred embodiment the nucleic acid molecules of the present invention are derived from Arabidopsis and in an even more preferred embodiment the nucleic acid molecules of the present invention are derived from Arabidopsis thaliana, Landsberg erecta or Arabidopsis thaliana, Columbia.

[0108] In another preferred embodiment, the nucleic acid molecules of the present invention include those isolated utilizing the nucleic acid markers of the present invention. The present invention also encompasses the use of these and other nucleic acids of the present invention in recombinant constructs. Using methods known to those of ordinary skill in the art, such molecules can be introduced into a host cell or organism of choice. Potential host cells include both prokaryotic and eukaryotic cells. A host cell may be unicellular or found in a multicellular differentiated or undifferentiated organism depending upon the intended use. It is understood that useful exogenous genetic material may be introduced into any cell or organism such as a plant cell, plant, mammalian cell, mammal, fish cell, fish, bird cell, bird or bacterial cell.

[0109] In a preferred embodiment the exogenous DNA is introduced into a plant in a suitable construct. Preferred plants are selected from the group consisting of: alfalfa, Arabidopsis, barley, Brassica, broccoli, cabbage, citrus, cotton, garlic, oat, oilseed rape, onion, canola, flax, an ornamental plant, peanut, pepper, potato, rice, rye, sorghum, strawberry, sugarcane, sugarbeet, tomato, wheat, poplar, pine, fir, eucalyptus, apple, lettuce, lentils, grape, banana, tea, turf grasses, sunflower, soybean, and Phaseolus. A particularly preferred group of plants is rice, cotton, wheat, maize and soybean.

[0110] As used herein, an agent, be it a naturally occurring molecule or otherwise may be “substantially purified,” if, referring to a molecule separated from substantially all other molecules normally associated with it in its native state. More preferably a substantially purified molecule is the predominant species present in a preparation. A substantially purified molecule may be greater than 60% free, preferably 75% free, more preferably 90% free, and most preferably 95% free from the other molecules (exclusive of solvent) present in the natural mixture. The term “substantially purified” is not intended to encompass molecules present in their native state.

[0111] The agents of the present invention will preferably be “biologically active” with respect to either a structural attribute, such as the capacity of a nucleic acid to hybridize to another nucleic acid molecule, or the ability of a protein to be bound by an antibody (or to compete with another molecule for such binding). Alternatively, such an attribute may be catalytic, and thus involve the capacity of the agent to mediate a chemical reaction or response.

[0112] The agents of the present invention may can also be recombinant. As used herein, the term recombinant describes (a) nucleic acid molecules that are constructed or modified outside of cells and that can replicate or function in a living cell, (b) molecules that result from the transcription, replication or translation of recombinant nucleic acid molecules, or (c) organisms that contain recombinant nucleic acid molecules or are modified using recombinant nucleic acid molecules.

[0113] It is understood that the agents of the present invention may be labeled with reagents that facilitate detection of the agent (e.g. fluorescent labels, Prober et al., Science 238:336-340 (1987); Albarella et al., EP 144914, chemical labels, Sheldon et al., U.S. Pat. No. 4,582,789; Albarella et al., U.S. Pat. No. 4,563,417, modified bases, Miyoshi et al., EP 119448, all of which are herein incorporated by reference in their entirety).

[0114] Fragment nucleic acid molecules may encode significant portion(s) of, or indeed most of, these nucleic acid molecules. For example, a fragment nucleic acid molecule can encode an Arabidopsis protein or fragment thereof. Alternatively, the fragments may comprise smaller oligonucleotides. Exemplary fragment sizes include fragments having from about 15 to about 400 nucleotide residues and more preferably, about 15 to about 30 nucleotide residues, or about 50 to about 100 nucleotide residues, or about 100 to about 200 nucleotide residues, or about 200 to about 400 nucleotide residues, or about 275 to about 350 nucleotide residues.

[0115] Nucleic acid molecules or fragments thereof of the present invention are capable of specifically hybridizing to other nucleic acid molecules under certain circumstances. As used herein, two nucleic acid molecules are said to be capable of specifically hybridizing to one another if the two molecules are capable of forming an anti-parallel, double-stranded nucleic acid structure. A nucleic acid molecule is said to be the “complement” of another nucleic acid molecule if they exhibit complete complementarity. As used herein, molecules are said to exhibit “complete complementarity” when every nucleotide of one of the molecules is complementary to a nucleotide of the other. Two molecules are said to be “minimally complementary” if they can hybridize to one another with sufficient stability to permit them to remain annealed to one another under at least conventional “low-stringency” conditions. Similarly, the molecules are said to be “complementary” if they can hybridize to one another with sufficient stability to permit them to remain annealed to one another under conventional “high-stringency” conditions. Conventional stringency conditions are described by Sambrook et al., Molecular Cloning, A Laboratory Manual, 2nd Ed., Cold Spring Harbor Press, Cold Spring Harbor, N.Y. (1989), and by Haymes et al. Nucleic Acid Hybridization, A Practical Approach, IRL Press, Washington, D.C. (1985), the entirety of which is herein incorporated by reference. Departures from complete complementarity are therefore permissible, as long as such departures do not completely preclude the capacity of the molecules to form a double-stranded structure. Thus, in order for a nucleic acid molecule to serve as a primer or probe it need only be sufficiently complementary in sequence to be able to form a stable double-stranded structure under the particular solvent and salt concentrations employed.

[0116] Appropriate stringency conditions which promote DNA hybridization, for example, 6.0× sodium chloride/sodium citrate (SSC) at about 45° C., followed by a wash of 2.0×SSC at 50° C., are known to those skilled in the art or can be found in Current Protocols in Molecular Biology, John Wiley & Sons, N.Y. (1989), 6.3.1-6.3.6, the entirety of which is herein incorporated by reference. For example, the salt concentration in the wash step can be selected from a low stringency of about 2.0×SSC at 50° C. to a high stringency of about 0.2×SSC at 50° C. In addition, the temperature in the wash step can be increased from low stringency conditions at room temperature, about 22° C., to high stringency conditions at about 65° C. Both temperature and salt may be varied, or either the temperature or the salt concentration may be held constant while the other variable is changed.

[0117] Hybridizations involving at least one oligonucleotide can necessitate changes from the above hybridization conditions. Highly stringent conditions are often selected to be equal to the Tₘ point for a particular probe. Sometimes the term “T_{d}” is used to define the temperature at which at least half of the probe dissociates from a perfectly matched target nucleic acid. In any case, a variety of estimation techniques for estimating the Tₘ or T_{d} are available, and generally described in Tijssen, id. Typically, G-C base pairs in a duplex are estimated to contribute about 3° C. to the Tₘ, while A-T base pairs are estimated to contribute about 2° C., up to a theoretical maximum of about 80-100° C. However, more sophisticated models of T_{M} and T_{d} are available and appropriate in which G-C stacking interactions, solvent effects, the desired assay temperature and the like are taken into account. For example, PCR primers can be designed to have a dissociation temperature (T_{d}) of approximately 60° C., using the formula: T_{d}=(((((3×#GC)+(2×#AT))×37)-562)/#bp)-5; where #GC, #AT, and #bp are the number of guanine-cytosine base pairs, the number of adenine-thymine base pairs, and the number of total base pairs, respectively, involved in the annealing of the primer to the template DNA.

[0118] Nucleic acid markers of the present invention can be used to characterize transformants or germplasm, as a genetic diagnostic test for plant breeding or to identify individuals or varieties (Soller and Beckmann, Theor. Appl. Genet. (67):25-33 (1983), the entirety of which is herein incorporated by reference). Such markers can also be used to obtain information about: (1) the number, effect, and chromosomal location of each gene affecting a trait; (2) effects of multiple copies of individual genes (gene dosage); (3) interaction between/among genes controlling a trait (epistasis); (4) whether individual genes affect more than one trait (pleiotropy); and (5) stability of gene function across environments (Gx E interactions).

[0119] In a preferred embodiment, the nucleic acid markers of the present invention may be used in marker assisted introgression of traits into plants. Marker assisted introgression involves the transfer of a chromosome region defined by one or more markers from one germplasm to a second germplasm. An initial step in such a process is the localization of the trait or region by mapping. One use of marker assisted introgression of genomic regions is in the generation of near isogenic lines (NILs) or recombinant near isogenic lines (RILs). In one aspect of the present invention, the nucleic acid markers are used to generate Arabidopsis NILs or RILs. As used herein, introgression is the process of transferring a genetic region from one genetic background to a second but non-identical genetic background.

[0120] Additional markers, such as AFLP markers, RFLP markers, RAPD markers, SNPs, phenotypic markers, isozyme markers can be utilized in combination with or separately from the markers of the invention (Walton, Seed World 22-29 (1993), the entirety of which is herein incorporated by reference; Burow and Blake, Molecular Dissection of Complex Traits, 13-29, Eds. Paterson, CRC Press, New York (1988), the entirety of which is herein incorporated by reference). Examples of additional markers are set forth in Cho et al., Nature Genetics 23: 203-205 (1999).

[0121] DNA markers can be developed from nucleic acid molecules using restriction endonucleases, the PCR and/or DNA sequence information. RFLP can result from single base changes or insertions/deletions. RFLP are highly abundant in plant genomes, have a medium level of polymorphism and are developed by a combination of restriction endonuclease digestion and Southern blotting hybridization. CAPS are similarly developed from restriction nuclease digestion but only of specific PCR products. CAPS are also codominant, have a medium level of polymorphism and are highly abundant in the genome. The CAPS result from single base changes and insertions/deletions. RAPDs are developed from DNA amplification with random primers and result from single base changes and insertions/deletions in plant genomes. RAPDs with a medium level of polymorphisms are highly abundant. AFLP markers require using the PCR on a subset of restriction fragments from extended adapter primers. AFLPs are both dominant and codominant are highly abundant in genomes and exhibit a medium level of polymorphism. SSRs require DNA sequence information. SSRs result from repeat length changes, are highly polymorphic, and do not exhibit as high a degree of abundance in the genome as CAPS, AFLPs and RAPDs. SNPs also require DNA sequence information. SNPs result from single base substitutions. They are highly abundant and exhibit a medium of polymorphism (Rafalski et al., In: Nonmammalian Genomic Analysis, ed. Birren and Lai, Academic Press, San Diego, Calif., pp. 75-134 (1996), the entirety of which is herein incorporated by reference).

### Computer Readable Media

[0122] A polymorphism or nucleic acid molecule of the present invention can be “provided” in a variety of mediums to facilitate use. Moreover, the nucleic acid markers and other nucleic acid molecules of the present invention may also be so presented.

[0123] In one embodiment, a polymorphism may be presented in a manner that sets forth 1, more preferably 2, 3, 4, 5, 6, or 7 of the following features alone or in combination with other features: (1) type of polymorphism (e.g. SNP, insertion, deletion etc.); (2) physical location of the polymorphism on a chromosome; (3) nucleotide sequence variation associated with one or more of the alleles; (4) nucleotide sequences of nucleic acid marker molecules capable of detecting the polymorphism; (5) physical location of the polymorphism relative to a piece of isolated DNA (e.g., BAC); (6) methodology for detecting the polymorphism; (7) physical distance from that polymorphism to another polymorphism; and (8) genetic linkage with a phenotype or other polymorphism.

[0124] Such a medium can also provide a subset thereof in a form that allows a skilled artisan to examine these features.

[0125] In one application of this embodiment, a polymorphism and associated features of the present invention can be recorded on computer readable media. In another embodiment, a nucleic acid sequence of the present invention can be recorded on computer readable media alone or in combination with a polymorphisms and associated features. As used herein, “computer readable media” refers to any medium that can be read or accessed by a computer, either directly or indirectly through a network. Such media include, but are not limited to: magnetic storage media, such as disks or magnetic tape; optical storage media such as optical disks; electrical storage media such as read-only memory (ROM) or Random Access Memory (RAM); and hybrids of these categories such as magnetic/optical storage media. A skilled artisan can readily appreciate how any of the known computer readable mediums can be used to create a manufacture comprising computer readable medium having recorded thereon a nucleotide sequence of the present invention.

[0126] As used herein, “recorded” refers to a process for storing information on computer readable medium. A skilled artisan can readily adopt any of the known methods for recording information on computer readable medium to generate media comprising the information of the present invention. A variety of data storage structures are available to a skilled artisan for creating a computer readable medium having recorded thereon a nucleotide sequence of the present invention. The choice of the data storage structure will generally be based on the means chosen to access the stored information. In addition, a variety of application programs and formats can be used to store the information of the present invention on computer readable medium. The sequence information can be represented, for example, in a word processing file, formatted in commercially-available software such as WordPerfect and Microsoft Word, in a network-accessible format, such as an HTML file or web page, an ASCII file, or stored in a database application, such as DB2, Excel, Sybase, Oracle, or the like. A skilled artisan can readily adapt any number of data file formats (e.g., text file or database) or data structures in order to obtain computer readable medium having recorded thereon the information of the present invention.

[0127] A skilled artisan is provided with access to the information for a variety of purposes. Publicly available computer software allows a skilled artisan to access, for example, sequence information provided in a computer readable medium.

[0128] The present invention further provides systems, particularly computer-based systems, which contain the information described herein. As used herein, “a computer-based system” refers to the hardware, software, and data storage used to analyze the information including the nucleic acid sequence information of the present invention. The minimum hardware of the computer-based systems of the present invention comprises a central processing unit (CPU), input/output apparatus, and data storage. A skilled artisan can readily appreciate that any one of the currently available computer-based systems are suitable for use in the present invention.

[0129] As indicated above, the computer-based systems of the present invention comprise a data storage having stored therein a polymorphism and any associated information of the present invention and the necessary hardware and software for supporting and implementing a search. As used herein, “data storage” refers to memory that can store information of the present invention, or a memory access apparatus (hardware and/or software) that can access manufactures having recorded thereon the information of the present invention.

[0130] Having now generally described the invention, the same will be more readily understood through reference to the following examples which are provided by way of illustration, and are not intended to be limiting of the present invention, unless specified.

### Example 1

[0131] Assembled Arabidopsis thaliana, Landsberg erecta nucleic acid sequence is generated essentially as set forth below:

[0132] DNA Preparation

[0133] DNA from Arabidopsis thaliana, Landsberg erecta seedlings is prepared by a CTAB genomic DNA isolation protocol as described by Dean et al. Plant J 2:69-81 (1992) and modified by Dubois et al. Plant J. 13:141-151 (1998), the entirety of which is herein incorporated by reference.

[0134] A solution of DNA to be sheared is prepared in a 1.5 ml microcentrifuge tube by mixing 15 μg of DNA, 6 μl of 10× mung bean (MB) buffer (10×MB buffer=300 mM NaOAc, pH 5.0, 500 mM NaCl, 10 mM ZnCl₂, 50% glycerol), and water to a final volume of 60 μl. The DNA solution is kept on ice prior to sonication. For sonication, a cup horn probe chilled with ice water for 1 hour prior to sonication is used. The sonicator (Ultrasonic Liquid Processor XL2020, Misonix Inc.) is pulsed for approximately 10 seconds on full power prior to use. DNA samples are sonicated twice for 6 seconds each at 60% power. Four sample tubes may be processed at once in a multi-tube rack which is positioned 1 to 3 mm above the opening in the probe. The DNA is returned to ice and a 1 μl sample is analyzed by electrophoresis on a 0.8% agarose gel in 0.5×TBE gel, run at 60 volts for 30 minutes. Sonication may be repeated if necessary.

[0135] A 0.26 μl aliquot of mung bean nuclease (150,000 u/ml) is added to sheared DNA and the sample is incubated at 30° C. for 10 minutes. To stop the digestion, 20 μl of 1 M NaCl, 140 μl dd H₂O, and 200 ml of phenol:chloroform are added to the sample which is then vortexed and centrifuged for 20 minutes at 13,000 rpm. The resulting aqueous phase is transferred into a new 1.5 ml microcentrifuge tube, 500 μl of 95% ethanol is added, and the DNA is precipitated overnight at −80° C. The sample is centrifuged for 30 minutes at 13,000 rpm, washed with 500 μl of 95% ethanol and centrifuged again for 30 minutes at 13,000 rpm. The sample is then dried under vacuum, and resuspended in 10 μl TE.

[0136] The sheared DNA fragments are sized and purified by preparative agarose gel electrophoresis. Five microliters of 6× BP-XC-glycerol dye (0.25% BP, 0.25% XC, 30% glycerol) is added to the sample. The sample is split into two samples and loaded (12.5 μl per lane) on a 0.8% (1×TAE) low-melting agarose gel (SeaPlaque GTG) and electrophoresed at 60 V, 46 mA for 3.5 hours.

[0137] The gel is photographed under long wave UV and slices containing DNA fragments of 1.3-1.7 kb and 2-4 kb are excised and excess agarose cut away. The gel slices are placed in 1.5 ml microcentrifuge tubes. One gel slice is stored at −20° C. 15 μl of 1 M NaCl is added to the other gel slice, followed by melting of the agarose by incubation at 65° C. for 8 minutes. The resulting approximately 250 μA samples are placed into microcentrifuge tubes. An equal volume of water is added, following which the sample is vortexed and placed at room temperature for 2 minutes to bring the temperature up to 30-35° C. 0.5 ml of water-saturated phenol that has been cooled on ice is added and the sample vortexed vigorously. The sample is placed on ice for 5 minutes, and the vortexing step repeated.

[0138] The sample is centrifuged at 4° C. in a microcentrifuge for 20 minutes. The upper phase is transferred to a clean tube, and the bottom phenol layer is reextracted by addition of 200 μl of dd H₂O. The sample is vortexed and placed on ice for 5 minutes, followed by centrifugation for 15 minutes. The aqueous layer is extracted and added to the aqueous layer from the previous step. Phenol extraction is repeated with 0.5 ml phenol, followed by vortexing and centrifugation for 20 minutes at 4° C. The aqueous layer is removed and repeated sec-butanol extractions are performed until the final volume is reduced to approximately 0.165 ml.

[0139] Two volumes of 95% ethanol (400 μl) are added and the sample is stored at −80° C. overnight. The sample is centrifuged for 30 minutes at room temperature to pellet the DNA, washed once with 95% ethanol and dried briefly under vacuum. The sample is resuspended in 7 μl of TE. A 1 μl sample is run on a 0.8% agarose gel with markers to estimate concentration of recovered fraction.

[0140] M13 Library

[0141] 20 ng of M13 DNA digested with SmaI is mixed with 1 μl of 10× ligation buffer (10× ligation buffer=0.5M tris pH 7.4, 0.1M MgCl₂, 0.1M DDT), 1 μl of 1 mM ATP and 100-200 ng of sheared genomic DNA fragments (1-3 μl volume), and 0.3 μl of high concentration NEB ligase (5 unit/μl) is added. Water is added to a final volume of 10 μl and the sample is incubated overnight at 14° C.

[0142] Plasmid Library

[0143] 200 ng (4 μl) of pSTBlue vector (Novegene) is mixed with approximately 600 ng (12 μl) of sheared genomic DNA fragments from the 2-4 kb size range gel slices and 1.2 μl of Gibco T4 ligase (5 units per μl) is added. Water is added to a final volume of 30 μl and the sample is incubated overnight at 14° C.

[0144] Transformation

[0145] The ligation reaction is titered and diluted for optimal transformation efficiency. When the ligation contains approximately 20 ng of M13 vector, the dilution will typically be from 1:25 to 1:100. A 1:25 dilution is used for plasmid ligation containing approximately 200 ng of vector DNA. To increase transformation efficiency, the ligase is denatured by heating at 65° C. for 7 minutes, and placed at room temperature for 5 minutes following the heating step.

[0146] A sterile electroporation cuvette is chilled for each transformation. Electro-competent cells are removed from the −80° C. freezer and thawed on ice. For each M13 transformation, a sterile tube containing 25 ul of IPTG (25 mg/ml in water), 25 μl of X-Gal (25 mg/ml in dimethylformamide) and 3 ml of YT top agar is prepared, capped and placed in a 45° C. water bath. YT plates are pre-warmed at 37° C. for several hours to avoid cross-contamination problems that may result if water remains on plates. For plasmid transformations, a sterile tube containing 0.5 ml of SOC medium is prepared for each transformation, and L+amp plates are pre-spread with 25 μl of IPTG and 25 μl of X-Gal.

[0147] 25 μA of electro-competent cells are mixed with DNA in diluted ligation mix in the cuvette, and the sample pulsed in an E. coli pulser (BioRad) set to the appropriate voltage (1.80 kV for 0.1 cm cuvettes; 2.50 kV for 0.2 cm cuvettes). The cuvette is removed from the pulser, and the sample immediately transferred to the tube containing SOC or YT top agar. For M13 transfections, the sample is plated immediately on YT plates. For plasmid transformations, the tube is placed in a 37° C. shaker for 15-30 minutes and 30 ul aliquots are plated on L+Amp plates. Plates are incubated at 37° C. overnight.

[0148] Two basic methods can be used for DNA sequencing, the chain termination method of Sanger et al., Proc. Natl. Acad. Sci. (U.S.A.) 74:5463-5467 (1977), the entirety of which is herein incorporated by reference and the chemical degradation method of Maxam and Gilbert, Proc. Natl. Acad. Sci. (U.S.A.) 74:560-564 (1977), the entirety of which is herein incorporated by reference. Automation and advances in technology such as the replacement of radioisotopes with fluorescence-based sequencing have reduced the effort required to sequence DNA (Craxton, Methods 2:20-26 (1991), the entirety of which is herein incorporated by reference; Ju et al., Proc. Natl. Acad. Sci. (U.S.A) 92:4347-4351 (1995), the entirety of which is herein incorporated by reference; Tabor and Richardson, Proc. Natl. Acad. Sci. (U.S.A.) 92:6339-6343 (1995), the entirety of which is herein incorporated by reference). Automated sequencers are available from, for example, Pharmacia Biotech, Inc., Piscataway, N.J. (Pharmacia ALF), LI-COR, Inc., Lincoln, Nebr. (LI-COR 4,000) and Millipore, Bedford, Mass. (Millipore BaseStation).

[0149] In addition, advances in capillary gel electrophoresis have also reduced the effort required to sequence DNA and such advances provide a rapid high resolution approach for sequencing DNA samples (Swerdlow and Gesteland, Nucleic Acids Res. 18:1415-1419 (1990); Smith, Nature 349:812-813 (1991); Luckey et al., Methods Enzymol. 218:154-172 (1993); Lu et al., J. Chromatog. A. 680:497-501 (1994); Carson et al., Anal. Chem. 65:3219-3226 (1993); Huang et al., Anal. Chem. 64:2149-2154 (1992); Kheterpal et al., Electrophoresis 17:1852-1859 (1996); Quesada and Zhang, Electrophoresis 17:1841-1851 (1996); Baba, Yakugaku Zasshi 117:265-281 (1997), all of which are herein incorporated by reference in their entirety).

[0150] A number of sequencing techniques are known in the art, including fluorescence-based sequencing methodologies. These methods have the detection, automation and instrumentation capability necessary for the analysis of large volumes of sequence data. Currently, the 377 DNA Sequencer (Perkin-Elmer Corp., Applied Biosystems Div., Foster City, Calif.) allows the most rapid electrophoresis and data collection. With these types of automated systems, fluorescent dye-labeled sequence reaction products are detected and data entered directly into the computer, producing a chromatogram that is subsequently viewed, stored, and analyzed using the corresponding software programs. These methods are known to those of skill in the art and have been described and reviewed (Birren et al., Genome Analysis: Analyzing DNA, 1, Cold Spring Harbor, N.Y., the entirety of which is herein incorporated by reference).

[0151] PHRED is used to call the bases from the sequence trace files (www.mbt.washington.edu). PHRED uses Fourier methods to examine the four base traces in the region surrounding each point in the data set in order to predict a series of evenly spaced predicted locations. That is, it determines where the peaks would be centered if there are no compressions, dropouts, or other factors shifting the peaks from their “true” locations. Next, PHRED examines each trace to find the centers of the actual, or observed peaks and the areas of these peaks relative to their neighbors. The peaks are detected independently along each of the four traces so many peaks overlap. A dynamic programming algorithm is used to match the observed peaks detected in the second step with the predicted peak locations found in the first step.

[0152] After the base calling is completed, two sequence quality steps occur 1) poor quality end sequences are cut and if the resulting sequence is 50 bp or less it is deleted 2) overall sequence quality is examined and poor sequences are deleted from the data set if they have an average quality cutoff below 12.5. Contaminating sequences (E. coli, yeast, vector, linker) are removed after sequence quality assessment.

[0153] Contigs are assembled using PANGEA clustering tools (PANGEA SYSTEMS. INC) and PHRAP (www.mbt.washington.edu). PANGEA clustering tools are a series of scripts which group sequences (clusters) by comparing pairs of sequences for overlapping bases. The overlap is determined using the following high stringency parameters: word size=8; window size=60; and identity is 93%. Each of the clusters are then assembled using PHRAP. The final assembly output contains a collection of sequences including contigs, sequences representing the consensus sequence of overlapping clustered sequences, and singletons, sequences which are not present in any cluster of related sequences. Collectively, the contigs and singletons resulting from a DNA assembly are referred to as islands.

### Example 2

[0154] INDELs are identified by aligning sequences from Arabidopsis thaliana, Columbia and Arabidopsis thaliana, Landsberg erecta. Finished BAC sequences derived from Arabidopsis thaliana, Columbia are obtained from GenBank (www.ncbi.nlm.nih.gov/entrez/query.fcgi?db=Nucleotide). Because the GenBank sequences are subject to change, the finished sequences of the Arabidopsis thaliana, Columbia BACs are included herein as SEQ ID NO: 1 through SEQ ID NO: 1482. The sequence of each Arabidopsis thaliana, Columbia BAC is used as a query against a database of Arabidopsis thaliana, Landsberg erecta islands using the GAP2 program of the Analysis and Annotation Tool (AAT) for Finding Genes in Genomic Sequences which was developed by Xiaoqiu Huang at Michigan Tech University and is available at the web site genome.cs.mtu.edu/. See Huang, et al., Genomics 46: 37-45 (1997) and Huang, Computer Applications in the Biosciences 10 227-235 (1994), both of which are herein incorporated by reference in their entirety. The GAP2 program compares the query sequence with a cDNA database using a fast database search program and a rigorous alignment program. The database search program quickly identifies regions of the query sequence that are similar to a database sequence. Then the alignment program constructs an optimal alignment for each region and the database sequence. The output file of GAP2 is reviewed for insertions or deletions. Using alignments that are at least 96% identical (as reported by AAT), insertions and deletions are determined by looking for gaps of at least three bases, with three aligned bases on either side of the gap. To ensure that an insertion or deletion is derived from matched sequence, the 10 bp region to either side of the gap is aligned and compared. To be considered an insertion or deletion, the adjacent aligned regions must be at least 90% identical (as reported by AAT). Insertions or deletions smaller than 100 bp are considered candidate markers. INDELs identified by the method of this Example 2 are set forth in Tables A1 and A2 and identified in the “method” column by reference to method 2. More particularly Tables A1 and A2 identify the location and nature of the polymorphism as follows:

[0155] “SEQ NUM” refers to the sequence of the finished BAC of Arabidopsis thaliana, ecotype Columbia where the polymorphism can be found;

[0156] “SEQ ID” refers to an arbitrary name used by applicant to identify the BAC sequence;

[0157] “Chromosome” refers to the chromosome of Arabidopsis thaliana in which the polymorphism is located;

[0158] “BAC Length” refers to the number of nucleotides in the finished BAC sequence;

[0159] “BAC Name” refers to the name of the BAC as used in GenBank;

[0160] “Marker Name” refers to a unique six digit number arbitrarily set by applicant for a polymorphism;

[0161] “Left” refers to the position of the closest nucleotide in the flanking sequence on the 5′ side of the polymorphism;

[0162] “Right” refers to the position of the closest nucleotide in the flanking sequence on the 3′ side of the polymorphism;

[0163] “Type” refers to identification of the polymorphism as a SNP or IND (i.e., INDEL);

[0164] “Method” refers to the method used to identify the polymorphism, where “1” represents the method of Example 3 used to detect SNPs and INDELs of less than 3 nucleotides and “2” represents the method of Example 2 used to detect large INDELs; and

[0165] “Indel Size” refers to the size of INDELs in terms of “n/−n” or “−n/n”, where n is the size of the insertion or deletion and the minus sign indicates the ecotype, Columbia/Landsberg, respectively, with the smaller sequence length in the area of the polymorphism.

[0166] “Columbia/Landsberg” describes the nucleotide base of a SNP in the respective ecotypes, e.g. “T/C.”

### Example 3

[0167] SNPs are identified by comparing Arabidopsis thaliana, Columbia and Arabidopsis thaliana, Landsberg erecta sequences. Each Arabidopsis thaliana, Columbia BAC sequence (extracted from GenBank and represented by a SEQ ID NO: 1 through SEQ ID NO: 124) is compared to a full set of Arabidopsis thaliana, Landsberg erecta contigs using WUBLAST (version 2.0) to locate areas of high identity that could contain a marker. Each identified contig is subsequently compared using WUBLAST to a full set of Arabidopsis thaliana, Columbia BACs (all of SEQ ID NO: 1 through SEQ ID NO: 124). To be selected as a marker candidate, an Arabidopsis thaliana, Landsberg erecta contig must have either one or two matches to an Arabidopsis thaliana, Columbia BAC. A single match suggests that that the sequence is unique. Two matches often result from overlapping BACs. The alignments are evaluated in a conservative manner. False negatives are preferable to false positives. To be included as a candidate polymorphic marker there must be: a minimum alignment of 200 bases between the sequence of an Arabidopsis thaliana, Landsberg erecta contig and the sequence of an Arabidopsis thaliana, Columbia BAC; the alignment must cover at least 75% of the length of the Arabidopsis thaliana, Landsberg erecta contig; a minimum of two reads of the Arabidopsis thaliana, Landsberg erecta region with the two read areas extending at least 25 bases on each side of the polymorphism position; agreement between all Arabidopsis thaliana, Landsberg erecta reads at the polymorphism position; minimum PHRAP consensus quality of 40 at the polymorphism position, with an average quality of 30 for the 25 bases on each side of the polymorphism position; and a maximum 1% polymorphism across the sequence. SNPs and INDELs of less than three nucleotide bases identified as described above are set forth in Tables A1 and A2.

[0168] A set of fifty polymorphisms was selected from among the polymorphisms in Tables A1 and A2 and identified more particularly with primer pairs in Table B as core selection markers. The primer pair oligonucletides for these core markers have the sequence of SEQ ID NO: 1483 through SEQ ID NO: 1582.

[0169] More particularly Table B identifies the primers for use with the core set of 50 polymorphisms as follows:

[0170] “SEQ NUM” refers to the SEQ ID NO for the oligonucleotide primer.

[0171] “Marker Name” refers to either an arbitrary six digit identifier or the public name from GenBank.

[0172] “Primer Name” refers identifies the primer by adding a F (for forward) or R (for reverse) after the corresponding Marker Name.

[0173] “Chromosome” refers to the Arabidopsis thaliana chromosome on which the polymorphism is located

[0174] “Genetic Distance (cM)” refers to the genetic distance of the polymorphism from the beginning of the chromosome.

[0175] “Size of Insert Col/Ler” refers to the number of base pairs inserted in listed ecotype for an INDEL polymorphism. Col identifies the Columbia ecotype and Ler identifies the Landsberg erecta ecotype.

[0176] “Amplicon Size Col/Ler” refers to the length of PCR product using the forward and reverse primers for a polymorphism for the listed ecotype.

TABLE B

| | | | | Genetic | Size of | | Amplicon | |
|---|---|---|---|---|---|---|---|---|
| SEQ | Marker | | | distance | Insert | | Size | |
| NUM | Name | Primer Name | Chromosome | (cM) | Col | Ler | Col | Ler |
| 1483 | 460499 | 460499_F | 2 | 85 | 19 | 0 | 216 | 197 |
| 1484 | 460499 | 460499_R | 2 | 85 | 19 | 0 | 216 | 197 |
| 1485 | 456794 | 456794_F | 5 | 96 | 14 | 0 | 182 | 168 |
| 1486 | 456794 | 456794_R | 5 | 96 | 14 | 0 | 182 | 168 |
| 1487 | nga6 | nga6_F | 3 | 85 | 19 | 0 | 161 | 142 |
| 1488 | nga6 | nga6_R | 3 | 85 | 19 | 0 | 161 | 142 |
| 1489 | nga63 | nga63_F | 1 | 9 | 25 | 0 | 129 | 104 |
| 1490 | nga63 | nga63_R | 1 | 9 | 25 | 0 | 129 | 104 |
| 1491 | 461064 | 461064_F | 1 | 2 | 47 | 0 | 377 | 330 |
| 1492 | 461064 | 461064_R | 1 | 2 | 47 | 0 | 377 | 330 |
| 1493 | 457984 | 457984_F | 4 | 16 | 12 | 0 | 238 | 226 |
| 1494 | 457984 | 457984_R | 4 | 16 | 12 | 0 | 238 | 226 |
| 1495 | 452585 | 452585_F | 1 | 90 | 56 | 0 | 396 | 340 |
| 1496 | 452585 | 452585_R | 1 | 90 | 56 | 0 | 396 | 340 |
| 1497 | 454039 | 454039_F | 5 | 51 | 35 | 0 | 199 | 164 |
| 1498 | 454039 | 454039_R | 5 | 51 | 35 | 0 | 199 | 164 |
| 1499 | 455075 | 455075_F | 5 | 23 | 0 | 15 | 143 | 158 |
| 1500 | 455075 | 455075_R | 5 | 23 | 0 | 15 | 143 | 158 |
| 1501 | nga280 | nga280_F | 1 | 81 | 18 | 0 | 122 | 104 |
| 1502 | nga280 | nga280_R | 1 | 81 | 18 | 0 | 122 | 104 |
| 1503 | AthCDC2BGR | AthCDC2BGR_F | 3 | 74 | 2 | 0 | 147 | 145 |
| 1504 | AthCDC2BGR | AthCDC2BGR_R | 3 | 74 | 2 | 0 | 147 | 145 |
| 1505 | 455469 | 455469_F | 3 | 43 | 18 | 0 | 207 | 189 |
| 1506 | 455469 | 455469_R | 3 | 43 | 18 | 0 | 207 | 189 |
| 1507 | 466785 | 466785_F | 5 | 110 | 24 | 0 | 267 | 243 |
| 1508 | 466785 | 466785_R | 5 | 110 | 24 | 0 | 267 | 243 |
| 1509 | nga162 | nga162_F | 3 | 21 | 17 | 0 | 123 | 106 |
| 1510 | nga162 | nga162_R | 3 | 21 | 17 | 0 | 123 | 106 |
| 1511 | ngal72 | nga172_F | 3 | 6 | 25 | 0 | 179 | 154 |
| 1512 | ngal72 | nga172_R | 3 | 6 | 25 | 0 | 179 | 154 |
| 1513 | 466780 | 466780_F | 2 | 19 | 55 | 0 | 452 | 397 |
| 1514 | 466780 | 466780_R | 2 | 19 | 55 | 0 | 452 | 397 |
| 1515 | 450584 | 450584_F | 1 | 108 | 12 | 0 | 116 | 104 |
| 1516 | 450584 | 450584_R | 1 | 108 | 12 | 0 | 116 | 104 |
| 1517 | 453494 | 453494_F | 1 | 115 | 0 | 16 | 155 | 171 |
| 1518 | 453494 | 453494_R | 1 | 115 | 0 | 16 | 155 | 171 |
| 1519 | 466786 | 466786_F | 5 | 130 | 0 | 14 | 130 | 144 |
| 1520 | 466786 | 466786_R | 5 | 130 | 0 | 14 | 130 | 144 |
| 1521 | 449044 | 449044_F | 4 | 72 | 37 | 0 | 214 | 177 |
| 1522 | 449044 | 449044_R | 4 | 72 | 37 | 0 | 214 | 177 |
| 1523 | 452443 | 452443_F | 1 | 99 | 15 | 0 | 279 | 264 |
| 1524 | 452443 | 452443_R | 1 | 99 | 15 | 0 | 279 | 264 |
| 1525 | 455725 | 455725_F | 5 | 120 | 25 | 0 | 373 | 348 |
| 1526 | 455725 | 455725_R | 5 | 120 | 25 | 0 | 373 | 348 |
| 1527 | 455913 | 455913_F | 3 | 29 | 3 | 0 | 116 | 113 |
| 1528 | 455913 | 455913_R | 3 | 29 | 3 | 0 | 116 | 113 |
| 1529 | nga168 | nga168_F | 2 | 73 | 16 | 0 | 169 | 153 |
| 1530 | nga168 | nga168_R | 2 | 73 | 16 | 0 | 169 | 153 |
| 1531 | nga8 | nga8_F | 4 | 24 | 0 | 43 | 174 | 217 |
| 1532 | nga8 | nga8_R | 4 | 24 | 0 | 43 | 174 | 217 |
| 1533 | 459322 | 459322_F | 2 | 49 | 0 | 43 | 427 | 470 |
| 1534 | 459322 | 459322_R | 2 | 49 | 0 | 43 | 427 | 470 |
| 1535 | 453973 | 453973_F | 4 | 54 | 27 | 0 | 407 | 380 |
| 1536 | 453973 | 453973_R | 4 | 54 | 27 | 0 | 407 | 380 |
| 1537 | 466787 | 466787_F | 5 | 88 | 21 | 0 | 369 | 348 |
| 1538 | 466787 | 466787_R | 5 | 88 | 21 | 0 | 369 | 348 |
| 1539 | nga225 | nga225_F | 5 | 11 | 0 | 72 | 136 | 208 |
| 1540 | nga225 | nga225_R | 5 | 11 | 0 | 72 | 136 | 208 |
| 1541 | nga76 | nga76_F | 5 | 71 | 0 | 69 | 244 | 313 |
| 1542 | nga76 | nga76_R | 5 | 71 | 0 | 69 | 244 | 313 |
| 1543 | 466776 | 466776_F | 1 | 48 | 0 | 27 | 399 | 426 |
| 1544 | 466776 | 466776_R | 1 | 48 | 0 | 27 | 399 | 426 |
| 1545 | 453574 | 453574_F | 4 | 48 | 0 | 30 | 420 | 450 |
| 1546 | 453574 | 453574_R | 4 | 48 | 0 | 30 | 420 | 450 |
| 1547 | 455553 | 455553_F | 5 | 7 | 0 | 32 | 211 | 243 |
| 1548 | 455553 | 455553_R | 5 | 7 | 0 | 32 | 211 | 243 |
| 1549 | 456131 | 456131_F | 5 | 79 | 0 | 32 | 283 | 315 |
| 1550 | 456131 | 456131_R | 5 | 79 | 0 | 32 | 283 | 315 |
| 1551 | 457489 | 457489_F | 5 | 42 | 0 | 28 | 156 | 184 |
| 1552 | 457489 | 457489_R | 5 | 42 | 0 | 28 | 156 | 184 |
| 1553 | 460464 | 460464_F | 3 | 62 | 0 | 18 | 321 | 339 |
| 1554 | 460464 | 460464_R | 3 | 62 | 0 | 18 | 321 | 339 |
| 1555 | 450660 | 450660_F | 5 | 60 | 16 | 0 | 218 | 202 |
| 1556 | 450660 | 450660_R | 5 | 60 | 16 | 0 | 218 | 202 |
| 1557 | 458709 | 458709_F | 2 | 10 | 42 | 0 | 452 | 410 |
| 1558 | 458709 | 458709_R | 2 | 10 | 42 | 0 | 452 | 410 |
| 1559 | AthSO392 | AthSO392_F | 1 | 40 | 0 | 16 | 158 | 174 |
| 1560 | AthSO392 | AthSO392_R | 1 | 40 | 0 | 16 | 158 | 174 |
| 1561 | 466777 | 466777_F | 3 | 51 | 4 | 0 | 189 | 185 |
| 1562 | 466777 | 466777_R | 3 | 51 | 4 | 0 | 189 | 185 |
| 1563 | 459775 | 459775_F | 2 | 63 | 68 | 0 | 426 | 358 |
| 1564 | 459775 | 459775_R | 2 | 63 | 68 | 0 | 426 | 358 |
| 1565 | 466781 | 466781_F | 2 | 40 | 0 | 7 | 213 | 220 |
| 1566 | 466781 | 466781_R | 2 | 40 | 0 | 7 | 213 | 220 |
| 1567 | 466778 | 466778_F | 2 | 2 | 19 | 0 | 283 | 264 |
| 1568 | 466778 | 466778_R | 2 | 2 | 19 | 0 | 283 | 264 |
| 1569 | CZS0D2 | CZS0D2_F | 2 | 56 | 20 | 0 | 204 | 184 |
| 1570 | CZS0D2 | CZS0D2_R | 2 | 56 | 20 | 0 | 204 | 184 |
| 1571 | nga106 | nga106_F | 5 | 33 | 33 | 0 | 171 | 138 |
| 1572 | nga106 | nga106_R | 5 | 33 | 33 | 0 | 171 | 138 |
| 1573 | 450129 | 450129_F | 1 | 32 | 27 | 0 | 392 | 365 |
| 1574 | 450129 | 450129_R | 1 | 32 | 27 | 0 | 392 | 365 |
| 1575 | 466788 | 466788_F | 4 | 7 | 39 | 0 | 271 | 232 |
| 1576 | 466788 | 466788_R | 4 | 7 | 39 | 0 | 271 | 232 |
| 1577 | 454879 | 454879_F | 5 | 132 | 12 | 0 | 299 | 287 |
| 1578 | 454879 | 454879_R | 5 | 132 | 12 | 0 | 299 | 287 |
| 1579 | nga1107 | nga1107_F | 4 | 102 | 20 | 0 | 168 | 148 |
| 1580 | nga1107 | nga1107_R | 4 | 102 | 20 | 0 | 168 | 148 |
| 1581 | 466779 | 466779_F | 4 | 5 | 0 | 49 | 306 | 355 |
| 1582 | 466779 | 466779_R | 4 | 5 | 0 | 49 | 306 | 355 |

### Example 4

[0177] PCR primers can be designed for the flanking sequence of polymorphisms and can be used to either confirm or detect the polymorphisms. Such primers are designed with the program Primer3 (obtained from the MIT-Whitehead Genome Center) with a “perl-oracle” wrapper. The criteria applied to design a primer include:

[0178] Primer annealing temperature (minimum 57° C., optimum 60° C., maximum 63° C.).

[0179] Primer length (minimum 18 bp, optimum 20 bp, maximum 27 bp)

[0180] G+C content (minimum 20%, maximum 80%)

[0181] Minimum target margin of the primer relative to the polymorphism: 50 bp

[0182] Length of the amplified region
[0183] for SNPs: minimum 480 bp, optimum 500 bp, maximum 550 bp
[0184] for INDELs: minimum 200 bp, optimum 400 bp, maximum 500 bp

[0185] PHRED quality score of the gene template (minimum of 0)

[0186] Target sequence on one contig

[0187] Maximum mismatch=12.0 (weighted score from Primer3 program)

[0188] Pair Max Misprime=24.0 (weighted score from Primer3 program)

[0189] Maximum N's=0

[0190] Maximum poly-X=5

The primary goal of the design process is the creation of groups of primer pairs with a common annealing temperature (Tₘ).

[0191] After the Arabidopsis thaliana specific portion of the primers is selected, an additional common primer tail sequence can be added to the 5′ ends. Forward primers for the detection of insertion/deletion polymorphisms have the additional common M13 bases on the 5′ end: (5′-CAGCACGTTGTAAAACGAC-3′); reverse primers for the detection of insertion/deletion polymorphisms were designed without a tail. Forward primers for the detection of SNPs have the additional common M13 bases on the 5′ end: (5′-TGTAAAACGACGGCCAGTT-3′); reverse primers for SNPs have the additional common M13 bases on the 5′ end: (5′-CAGGAAACAGCTATGACC-3′). The primer tail sequences are added so that subsequent amplifications of any primer pair can be done with a specific kit designed to work with oligonucleotides having the primer tail. It is noted that primer pairs are not required to contain the tail sequence, the relevant portion for amplification and/or hybridization probes being the Arabidopsis thaliana specific sequences.

[0192] Using such primers for polymorphic marker flanking sequence, a person skilled in the art can amplify genetic regions from Arabidopsis thaliana, Columbia and Arabidopsis thaliana, Landsberg erecta genomic DNA, as well as from a mixture of Arabidopsis thaliana, Columbia and Arabidopsis thaliana, Landsberg erecta genomic DNA to represent a heterozygote. In the case of SNPs the amplified product is purified and sequenced to confirm the presence of a predicted SNP. For validation of INDELs, the amplified products are analyzed or sized on an agarose gel or an acrylamide gel to determine if the fragments amplified from Arabidopsis thaliana, Columbia and Arabidopsis thaliana, Landsberg erecta genomic DNA are polymorphic. An exemplary PCR amplification reaction procedure to detect an INDEL-type polymorphism in a mapping experiment is a follows: a reaction mixture containing 4 ng/μl DNA (2.6 μl); Taq Gold Polymerase (5 units/μl) (0.1 μl) (Perkin Elmer, Norwalk, Conn.); 5 μm forward and reverse primer (0.2 μl); 1 μm Li-Cor M13 Forward/IRD 700 (0.5 μl)(Lincoln, Nebr.); 50 mM MgCl₂ (0.3 μl); 10 mM dNTPs (2.5 mM each of dCTP, dGTP, dATP and dTTP)(0.8 μl); 10× Taq Gold Buffer (1.0 μl); dH₂O (4.5 μl). Thermal amplification is carried out in an MJ Tetrad as follows: 94° C. 10 minutes; 35 cycles (94° C. 1 minute, 56° C. 1 minute, 72° C. 1 minute); 72° C. 10 minutes; 4° C. hold. PCR products are loaded on a 7% Long Ranger gel and run on Li-Cor's DNA Sequencer Long Redir 4200 or DNA Analyzer Gene Readir 4200 according to manufacturer's protocol. Data is analyzed using GenelmagIR software.

[0193] An exemplary PCR amplification reaction to detect a SNP-type polymorphism in a mapping experiment is a follows: A reaction mixture containing 4 ng/μl DNA (6.6 μl); 5 units Platinum Gold Polymerase (5 units/μl)(0.1 μl) (GibcoBRL, Rockville; Md. (0.11 μl); 5 μm forward and reverse primer with M13 tails (1.39 μl); 50 mM MgCl₂ (0.66 μl); 10 mM dNTPs (2.5 mM each of dCTP, dGTP, dATP and dTTP)(1.04 μl); 10× Taq Platinum Buffer (2.43 μl); dH₂O (12.77 μl). Thermal amplification is carried out in an MJ Tetrad as follows: 94° C. 10 minutes; 35 cycles (94° C. 1 minute, 56° C. 1 minute, 72° C. 1 minute); 72° C. 10 minutes; 4° C. hold. PCR products are purified using QIAGEN's QIAquick 96 PCR Purification Kit as per manufactures' protocol. Purified PCR products are run on agarose gels to confirm amplification, followed by sequencing to confirm the presences of a SNP.

1. (canceled)

2. A collection of non-identical nucleic acid molecules capable of detecting polymorphisms present in an Arabidopsis mapping population, wherein said collection of non-identical nucleic acid molecules is capable of detecting at least 25 polymorphisms selected from the group consisting of Table A.

3. The collection of non-identical nucleic acid molecules capable of detecting polymorphisms present in an Arabidopsis mapping population according to claim 2, wherein said collection of non-identical nucleic acid molecules is deposited on a substrate.

4. (canceled)

The application's sequence listing, which the Patent Office published only in electronic form, follows.

SEQUENCE LISTING (1585 sequences)

SEQ ID NO: 1 - DNA, 86424 bp, Arabidopsis thaliana
tgctacgatctacatttgggaatgtgagtctcttattgtaaccttagggttggtttatctcaagaatcttattaattgtttggactgtttatgtttggacatttattgtcattcttactcctttgtggaaatgtttgttctatcaatttatcttttgtgggaaaattatttagttgtagggatgaagtctttcttcgttgttgttacgcttgtcatctcatctctcaatgatatgggatggtcctttagcatttattctgaagttcttctgcttgatgattttatccttagccaaaaggattggtggtttgaagacacatcatatcaaaaaagctatcgcctcgacgatgctctatttctatccttgtagcacacattttggcactcaaaaaagtatttttagatgtttgttttgcttctttgaagtagtttctctttgcaaaattcctctttttttagagtgatttggatgattcaagacttctcggtactgcaaagttcttccgcctgattaattatccattttacctttgtcgtagatattaggtaatctgtaagtcaactcatatacaactcataatttaaaataaaattatgatcgacacacgtttacacataaaatctgtaaatcaactcatatacccgttattcccacaatcatatgctttctaaaagcaaaagtatatgtcaacaattggttataaattattagaagttttccacttatgacttaagaacttgtgaagcagaaagtggcaacaccccccacctcccccccccccccccaccccccaaattgagaagtcaattttatataatttaatcaaataaataagtttatggttaagagttttttactctctttatttttctttttctttttgagacatactgaaaaaagttgtaattattaatgatagttctgtgattcctccatgaatcacatctgcttgatttttctttcataaatttataagtaatacattcttataaaatggtcagagaaacaccaaagatcccgagatttcttctcacttactttttttctatctatctagattatataaatgagatgttgaattagaggaacctttgattcaatgatcatagaaaaattaggtaaagagtcagtgtcgttatgttatggaagatgtgaatgaagtttgacttctcattgtatatgagtaaaatcttttcttacaagggaagtccccaattggtcaacatgtgaaagcacgtgtcatgttcttacttttgtttgggtaatcttctaattactgtatatggaagatgtgaatgaagttttggtcctgaatgtggccaaggttccgtcatttggagatacgaaatcaaatctcctttaagattttgtttttataatgtgttcttccatccacatctatctccatatgatatggaccatatcatacatcatcatttgtccaaatgcatgaatgaatttggaaataggtacgagaatgccaacaatgacaagaagggatcaaagacagtttttaaaacaatattttacagggttttaatctaattctaagttttggtcactcactttgttaaaagaataattcagtgtctggacactaaaatcttccaaaaaccccatatacatatatgctatttcgatacttatatttatttactcagcataaaaaatattaaccatgtattcatagtaaaatgtttcatgtgatatcaaaccagcgacaacaaaagtattattcccctcattatgtttgactcctattatatttttattttaatttttttcactatcatctttcttgcaatgaaagtcccatatattggtcaacatttcaaaccacttgttctcttttatgttttggtaagagctatcttctaaatttataatacgcataaattcaaaagtaaaagaaaattttggtcatgaatgttgtttaagtcatttggagatacgaaatcaaatctccttgtagattttgtttttagaatgtcgttcctttttcatcatcttagctatatctacagctatatatcctatctttaaacctatattattttttcctctcttcaccaaagccatgttttttagttgtggcgaaaaataagaaatccatacatcaacatatcgctttcgttaccttaaattttggcttgttatgaaggcatgtcataacgtttctagtcacaactcacaagcataccaacgaccatgataaatccaaaaagtagaaacaatctattatctaaacccccaaaagacaaaagaaaaaagtagaaagaaaaggtaggcagagatataatgctggttttatttgtttgttaaaagatattgctatttctgccaatattaaaacttcacttaggaagacttgaacctaccacacgttagtgactaatgagagccactagataattgcatgcatcccacactagtactaattttctagggatattagagttttctaatcacctacttcctactatgtgtatgttatctactggcgtggatgcttttaaagatgttacgttattattttgttcggtttggaaaacggctcaatcgttatgagttcgtaagacacatacattgttccatgataaaatgcaaccccacgaaccatttgcgacaagcaaaacaacatggtcaaaattaaaagctaacaattagccagcgattcaaaaagtcaaccttctagatggatttaacaacatatcgataggattcaagattaaaaataagcacactcttattaatgttaaaaaacgaatgagatgaaaatatttggcgtgttcacacacataatctagaagacagattcgagttgctctcctttgttttgctttgggagggacccattattaccgcccagcagcttcccagccttcctttataaggcttaatttatatttatttaaattttatatgttcttctattataatactaaaaggggaatacaaatttctacagaggatgatattcaatccacggttcacccaaaccgattttataaaatttattattaaatcttttttaattgttaaattggtttaaatctgaactctgtttacttacattgattaaaattctaaaccatcataagtaaaaaataatatgattaagactaataaatcttaatagttaatactactcggtttactacatgaaatttcataccatcaattgttttaataatctttaaaattgttaggaccggtaaaaccataccaattaaaccggagatccatattaatttaattaagaaaataaaaataaaaggaataaattgtcttatttaaacgctgacttcactgtcttcctccctccaaattattagatataccaaaccagagaaaacaaatacataatcggagaaatacagattacagagagcgagagagatcgacggcgaagctctttacccggaaaccattgaaatcggacggtttagtgaaaatggaggatcaagttgggtttgggttccgtccgaacgacgaggagctcgttggtcactatctccgtaacaaaatcgaaggaaacactagccgcgacgttgaagtagccatcagcgaggtcaacatctgtagctacgatccttggaacttgcgctgtaagttccgaattttctgaatttcatttgcaagtaatcgatttaggtttttgattttagggtttttttttgttttgaacagtccagtcaaagtacaaatcgagagatgctatgtggtacttcttctctcgtagagaaaacaacaaagggaatcgacagagcaggacaacggtttctggtaaatggaagcttaccggagaatctgttgaggtcaaggaccagtggggattttgtagtgagggctttcgtggtaagattggtcataaaagggttttggtgttcctcgatggaagataccctgacaaaaccaaatctgattgggttatccacgagttccactacgacctcttaccagaacatcaggttttcttctattcatatatatatatatatatatatgtggatatatatatatgtggtttctgctgattcatagttagaatttgagttatgcaaattagaaactatgtaatgtaactctatttaggttcagcagctattttaggcttagcttactctcaccaatgttttatactgatgaacttatgtgcttacctccggaaattttacagaggacatatgtcatctgcagacttgagtacaagggtgatgatgcggacattctatctgcttatgcaatagatcccactcccgcttttgtccccaatatgactagtagtgcaggttctgtggtgagtctttctccatatacacttagctttgagtaggcagatcaaaaaagagcttgtgtctactgatttgatgttttcctaaactgttgattcgtttcaggtcaaccaatcacgtcaacgaaattcaggatcttacaacacttactctgagtatgattcagcaaatcatggccagcagtttaatgaaaactctaacattatgcagcagcaaccacttcaaggatcattcaaccctctccttgagtatgattttgcaaatcacggcggtcagtggctgagtgactatatcgacctgcaacagcaagttccttacttggcaccttatgaaaatgagtcggagatgatttggaagcatgtgattgaagaaaattttgagtttttggtagatgaaaggacatctatgcaacagcattacagtgatcaccggcccaaaaaacctgtgtctggggttttgcctgatgatagcagtgatactgaaactggatcaatggtaagctttttttactcatatataatcacaacctatatcgcttctatatctcacacgctgaattttggcttttaacagattttcgaagacacttcgagctccactgatagtgttggtagttcagatgaaccgggccatactcgtatagatgatattccatcattgaacattattgagcctttgcacaattataaggcacaagagcaaccaaagcagcagagcaaagaaaaggtttaacactctcactgagaaacatgactttgatacgaaatctgaatcaacatttcatcaaaaagatttagtcaaatgacctctaaattatgagctatgggtctgctttcaggtgataagttcgcagaaaagcgaatgcgagtggaaaatggctgaagactcgatcaagatacctccatccaccaacacggtgaagcagagctggattgttttggagaatgcacagtggaactatctcaagaacatgatcattggtgtcttgttgttcatctccgtcattagttggatcattcttgttggttaagaggtcaaatcggattcttgctcaaaatttgtatttcttagaatgtgtgtttttttttgtttttttttctttgctctgttttctcgctccggaaaagtttgaagttatattttattagtatgtaaagaagagaaaaagggggaaagaagagagaagaaaaatgcagaaaatcatatatatgaattggaaaaaagtatatgtaataataattagtgcatcgttttgtggtgtagtttatataaataaagtgatatatagtcttgtataagaaagggattttacatgagacccaaatatgagtaaagggtgttggctcaaagattcatttagcaaccaaagttgcatttgcaaggaaatgaaaaggtgttaacaatgtcactgcgtaacatgacttcgatacaaaatctcaaacaatacatcttcaactgtggattatgatggacttggggttgcaggtgatatgtctatagaaaaacgggtgggaatggaaaatggctgaagaagaaagctccaactaagcatcataactggattgttttagaggagatgagtcaaaggaattcacagtggaactatctcaagaacatgatcattggcttcttattgttcatctccatcattggctggatcattctggttcaagaggtcaaattatatatacataacggatctaagaagtatagtgtagtcaattaaaacaaaacgagacttgaaaataagcataagtattattaagttaacccaatattcgtttcaatgctttagttatcatcagaattctcaacattttcagatatttaacttgcctttggttgctttctcgccatggtagtagcattctccggataagaatcaaggggagcctcaacttcggcttcaaccgtctcctcgtctttcctatgacattcacttggtgttgcaacaatgtgttgatgccccacattcataggagagtcccacatatctccaacattcataggagggttccacatatgcccaccattccaaggagggtaccaccacatatgcccagcattccaagaaagatggagcgacgatatcgtgaggaacaaggtttttgtagggcaaataattgtaggtggttgagttatatccgcccgcacagagtaacagaccaacaattaacttttgatattttagtaaggtctaattcaatttttggtggcgataatatttggcttagtcataaaatacagtatggtataataatgtaaaggtttctcttatcttcaaaccaaaagactatactggaagctgatgggatcatacgattctgaaaaaataagacatatattgcaacagagatccaatttgtatcaaaaatattgtcggctcaaaaatctgacccaccaagaatctaatcaagtgcgcgattaagcatacggctatgcatctggtcattgttgattcagtcatcactggtttaaagacaaacttgcattgtgagattccaaaataacaacaacaaaaaacaatttgcattgagaacattttgaaggtctgacctttaagagccatggagtttgatgttaagagaagtatatcgacaaaaaaaatcactgacattgggaattcccatacctgtaataacaaagattctctatttttgagcaaagagacataacaccatgtttaatcaatacaagaaactttagtgcatgatttatggaatgcttaagaagtttggaacttcaatattaggaattaagtgagaggtaaagctacaacataccaacatcgcaagcagaaatatcttgaagtaactagagatgaatatccccaacataatctctcttcttctgcaaagtttttaaaaaaaattatacataaacaatcttcaggtgacagaagtctgagatctttgatgaaaaactcataataagaactaagaagaagaagaatcagtaatcacctggaaacttcatttagcaaacccttagtcgcaatggcaaaagagatgataaatgcagcgtttgcagataagacaccaatcagaacctgtttcaaatgcgaaattattaccctttctaaacaatctcaatgacttaaatcatttaaaccttaaaggaaaaaaaatctaattaagtccattaaaaagaaacgatctaacctttatagatagaagaacagggctatcagaaaagctcgattcttcatcactttttctcagtagcaagcttctatctatgatgagttcagggcttttcaaataagtttgccgatgaatctcaccaactacacatctgctagctacactttgatagtaaaagattataaaacaaaaggatacaacagtctagaagaagataggcgaagaccaacttccacaacagatgctgcacacacacacacaaaaaaaaaaaaagaacccaacaattcttattggatcagagactactcaatatccccaaacttggaaattagtttgttgcttgaggtctaagatacttctatatatggaaaaagattttcaaagccagatatttccacaagtttgtaatatcaattcaagataagagagctagaatcagacaggaactagcaatgcttgaaatcaagaacttgaattgaaatagttttttacctgaatattgacagttgctggattaattgcattgtagaggacgtgtctatatacctttggtctgtgaaggattaaatcgatgaaaataatctgccaaagaaaacaattaaagaaccaaaaaccaaaattggaaagaaatagggaaacacccaaaaagggaaagaaagtgattaaaacagaccatgcgttcacactcgatgtactcatctgctacttccttgcaatttccctaaatataacaatatgatcaaagatggaaactttgaagaaatttaatagagaatcttataaaccctaattgggtcaaagaagatccattaatacaaaaatcttacgcatttcatgagacgaatgttacccggagagtattgaatgaacaatgactttaccctaaaaccacatcccacgcatctgtgttcactcgccgccattgctctctctctctctctctctctctctctctcaagagaagaagaatacggagcaattagagtccgggtctgggctactgttttaaccctaaatgggcttattcatgggccaagtttttgaagtcttaactttaaatttgttaggcccacttttgctctaagccggggtatttgtaccccaaaatttaaaaatcatatacacgttgtaatttataaatagttcaatttggatcaaaatcttgtccatatgacatagcattttaaaatgcgtaggttcatgaatgaaacatattataggcctcagataaagatatacatattaagtctaaattatttagtcttcagaatttaccacacttactgaaaagtctagtggttcactaatattattactgtcgtgttactttctatatatagttcatgacttgtgagttgtgatggataagtttataagaaaataaattatttattacaattcaacagtgaagaaatttatttagtttgattaaataagaaaggtaaataaatcttcgtttgccacaccaaacaaaaaaaactccttttgttgcatgtaattagcatatggctacaaaatgaaagatttgacaatgaggtttagataaaatagtttcctttcaatataagtaaactcaacataaaaatgaaacggtaagttaaaagtttaatatttgattattactttatttagaaatgtattagaaagggaaagaacccattaacccccaatacgaagtttccttatcatcattaatcatgcctatgaaaaccctaaccggcctacatatttgcagtctcttttaggtcaggaatctaatgagaatgaattattttattttatttaacaataattggagcatgtcattaattctctttattcttcttacacaactaatcatttagatgtgttacaatattatttcctttagtcattttcataattttaatacctccgtacttttcactaatacctccccttttaattttcattatttcttcttttctatcagtctatgcatgcattcttttgaatattaaaatgcattttatattcttttgacaactatgcacaagccttttgagacacatctacacaatataatagcacaagcctttatgagacatatctacacaatatcattgctacttgtagactatttggaatacgtatttacatattccattgtatcatccctttgcaaatgttttatacatataactaacatatacattattcgtaactttgttcccctatatcgaaaaatgtgggctacacatataactaacatatatatatatatgtatgtttatatgatatagtctccatgtctatatatcttatatattacatgtttcatgtttacggtcaagggagtatttttatacgcatacacaatcatacacacttaaccctacttataatgatgtaggttcatatatttatcttattttaggatcattcgatcacaaattatacggaccctcatactctctaaagatatacaaaatccgctatgtcatatccgatccgaattagcagctaaagaaaaacaaacacatgcatctactgaagatttgagtctcgagtgcttagttacatgaactatcacaaaggatatggataatataaggtgtactgaagtatgtctatgcaatgggagggaaatacattctgttaaatgacttgtcgatttgatctttcatgccaaagattaaaaatttaacacttaattaacgcaatcttaccatatattcatggactacatgcagaatagtaattctcccaacctttctagttatttacctgaatgtgtttatgtacatggaccggtaacctcatgtatatatgcacatactgacaatctgacatacatatatatagtagatatgacaacaacaacaaaaaaaaaaaaaattccttgttcgtgaagcatgatctgagagttcctagttagcatgttgtgtgggatcatacttttaatatgctgcaagtaccagtcaattttagtatgggaaactataaacatgtataatcaaccaatgaacacgtcaataacctattgaacagcttagggtgaaaattatgatccgtagagacagcatttaaaagttccttacgtccacgtaaaataatatatcaatttatacatatacatgtgtaaactgtgtatatatagggtaggtatatgtgtatatatatagtaattgacaaatgatttaggttctaacatatattctaaaagtactcatgagtttgtgagatctacacaagatacctgatttgataaaaatggcttcaacttgcaatccaaaccaaaccaaacaaagttaataaccaagggttaataacaaaaacaagaatctagaattagtaaaaaaatgagaaattaatgaacctgtgatcataaaaaaagtcaaacaatgtgaaaacatatcataccttttgttctttttaatataataattgaattactaaatggatggatcagtccttcttccatagctagcttctctttattttctctgcccataacctgcagaaaatctctttaaccgagcaaaattacaagagtaaccaaacaaacaaaataggaccatcagagagagagaaaagagtgcctttttttggacctgcccattagcttagaatgtaccatgaaacactttgtcagtgtagggagataggcacagagagtacaattcatgaaatttataagcttttttcccactcatcaattataatctcaagttataaatatcaaaactgaaaaaagaagaagatgaaaactgttctattgatgaaatgctgtaggcacagaggttcacctagtgtcaagtattaagattaacatataacttatgaagatgatgagtaaccaacgagttatagcgaatattatggatataattagctaacatttgaggcatgtgaacctgttattttatgtaaattatatatatagtttatatacaaaattgaaaagatgcgagtttcaacatggtgacaaaagcctaatgatgatgaacatcaagaaacatgtcggaaaaaaaaatcataaccaaaaaaacgaagaagatcgttttttcttcctctcactagctagaatctaatacccttagaaaaattactaatgaaacaatataaagagagattcaaaacaagaagatgatgaaacttctcatggattgaaattgagagaaagtgaagacttccctttcttagcaaattgatcatcatcgccatcatcaccatcatcattatcatcatcatgatcagtcgataaatttagtcgtagagctgaagaagaagaagaagatgcaccaatttcgccacgtggcaccaaccatgactcttcttgttgattatagtcattgccacattccatattcaccccaaagagccttagtctctttcccgccgtagaaggaggcggaggaagcggcggtaacatcaccggagttaatctcccgggaaccacagggactgagtctataaccaacggctctgatccaacaatgttcctatgatccaacggtgatcccgtgtagtaacaccttccagctaaattcccataaccataccctacgaactcttgacgctgggtgttataataggaacgttggtgatttccgatgtttaagccccggtgaatcgggacggagttatattctggcaatggatgaaatctgttggaatattgagaagtggtcgggaaattgaaattgaaaccaaaattaccaaactgatgtgcttgaacgaggctcatgtcgggtctatgcctccaatctatgtaaagtttggatctttctgactcatctccgatgcctcgttggaaagagacaatgtctcctgcatcgagctttttctctttgacgaaacggctccatcctttggtcataacgtagctctggctagagttccaatacgagtaacggaatctccacatcttgccgtttctgtcttggaagttcaaaagcgtgccgttttggttgtttgaggagtctagagggaaatacctctcagcgtgttgtttagggatcacgagtctgttgagttttccgacgtcgcttggtgttaccactttgtcgaacatgtgttctttctccggaggtggaatcatcatcatcggaaggttgttgttgtttccgctgggaccggagctgctgcttgctccgatgttggaggttaattcttggtctctgtcttgttcttggtcggaacttgttgttgttgtcggagccagggatagatccattatgacttatctgattttccttggagaaatcttgatttacgagatggttcttgaatctttttttttttttttttggtttttggcaaaaccttgctccgtttagttttgagttggctcttagtgggtcttagtgaatcttgatgaagtttaaacctttctcttgttcttcaattggtgaattgttgcggatgtttttcaaagccattgacgatgatgatgactcaactcgagatcttcaacatacattagagagataatattaaaaagaggaaacgaaacaaaaatctagccacaattataaaaaagggtagatgaattagtgaaaaaaaattcaaagaatatattaaaagaagggaagaaggaaaaagaaaatcaaaagttcttgtggtctcaccttataatataagagagagagagggagagagagatgttgatattgaagtcttctttctcttgctggttcgattgtttcttagattttcttctttgaccatgaaaatttagaggaaatatgaaaaccctagaatcggaagaaaactatatatgtatatctttccgttgactttatatagaatgaaatcaaggaaagaaaagagctaagcaaatcaggacttagaactcaaattgggttcttgccaaacaagaggatctctctctttctctttatgaagatgaagaaaaaatggtggcttgagattcttgatagagtttcaagacttagagagagagagcgagattggtaccgagtaatgcgtaggggcccatgaatgatatggttcgggtcatgtgagcttcttgtccttttcattaggcttcgaattagctctttgtattgaaatttcaaaatctctttatacatatgtgtatgtatatgtttagttgtcgacggtgttaatttgagaatccgttaatcttttctctaatgagtatatgtgtgtgtttcttttttgttacctaatttttttttaaaaacaattttttctattatctaattatgtatgctttctactaattattgttggttagcactaattaaaacaatttgaatttataattatatatagtttttgttagttagtaactgacccgggaatcaggatatgtatttatactaacctctatatgtatttttttcttttttcctcctctaacctatatgtatttaccagaaaacaaatgcacattttttccatgtatagaatattctattacaaaagcaatataaatatatgcatgcacgcatattttcacattaaattaaatataattcttaccaactactattccagttgttggcatgccatgattacttaaaactttgtatgcatataccatgtacatatgaatatatgatgtaaccttctggaccgtctctggctatagccgatatctttcgactcattctaagtttgtggatcttgtactcgtccaacatctgattcgttattccgaaaagctcaataaaattatcaattaatcctctgtaaagtttgtcagattaatcataacatttttttggtggtttctgtttataacataaaattttacttaattattgcgtttatctgttcgtcgacttatgggatatctattgattatattaatcagattaatccatcaacaggttgataatctgataaggttaaaagtctttcaaacggtgtaaattatgtgtattgattcacttaatcgtgcgtgctattgcacactaaattttgtttaaaaacttatcaatagcagaaatactataatcaatacgtgtctgtttgttcaaattttgtttagtaattcattgtcagagcgagtcacgtgggttgacagtataatactgttttataagaaggattaaacaatgaaggtttggtaatctctatgtaagaagaaaacacacataactaatttcgcataattaattacccaatattttgtttggtatagttaattatgcaattatttacagatcacaagggggaaagtaggtttggttgctgatgtgtcaacaaattgtgtggtccaaaatttcctacacatacatatcaatcacacacaaaaaaaaaaaattgataataagcaacgtaaccacaaatatatcttttatgtaaatctgtgtatgtttaacctttttctgtggtttcttggtaaattttgtttaaatttaatacgtatctatgtaatgtattaagatcaccatgtcttacgtacgatgttcgtttcaggcataagtcatcattgcagaaagaaaaacccgatcaatagagaaactaagatataaaaaaaacatcagaaaaaaaaaaatcatctgcgctgtatacatcaatttcaatcaaaattatataacaagaattattataatgacattaatatttttattattttattcctatgtgtcatagtcatcaacatccataacaagagcgtttgatgttttgagacagcaagaaaatgtctaaatctgcaacacctggtcaaatatttcccagtaattaaaaagcgtaattattattaatattattgaagtattcttattatacatcatacatgcatcactacattagtcaaaatatatgaatcatctaataagcacgtgtaacggaatatataataagtaggtgatactttgaaacacgacggatcttgtatttgacaaatcgtcgattatgatcaacaattttactaatttataaactatgtatttttctattatatatgcagatttcctacatagctttcgagtaagactaattaatcacgtaagtgtgttaaactgttaattatacttgaactatgtgtttattggactattggttcaagttttcccgtcaaaataaataaaagtcactaaccactgtaaaattgaatctaacgtacgaaatcggtttagtgtgatctttatatttcaaataattttctgtaatcgagatgatataggggtatattatatacatatatatatattttgcctaattataaagtatggcatgaaaaaggttggcctgcaagcagccctcgctctttaatttaaaggcaaagctaaaacaaaaagcaatttattagtgacatataatatttttactatttaccaagctgtaatagcttgaatacaaaggggacctctctacgtattaatctctcacttgccactatttcattgagaaataaatcccattatagatttatgcttaaggaatatatcccattctaatctagttgaccgactctatatacatctctagcttatatttttggtattttaaagttataatttaaacttgattatatcacttttaatatgtatttattatatgacataaaacaaagtgtgaagttctaaacaaaaagcgaatttatattagatatccagattttctttacagtataattaaataatatccaaataaagtttcgactttgtttcattaactacttgtatcctatgatccttataaccctagatattccaaatctaaaagtgaactgaatcccaaatggtctcggagatcatctatcaaataccttagtcatgaatgtatagtctagcgttttgaatacattaatggttcgtaagtatatcagacaagtaccatatggtataaatatgaggtacatatggtgagtatatatatatgtaagatttgaatcaaatggttaaagtaggggttggatttaaaggggaagcaaacataaatgagaaggtgagtgagaaggtgagtgttaccatttcacagcagtaaacatggaatagagtaaggaccactctcactactctctctctagagtttgtccaaaacagcctcacatttttgcatccccacacttctcgatctctttcacacctattttctttattgatacatatttatatattgttgttgttgttgttgttacgttgtgtgtgtgtgcgcgcgtttttctctttcaacttggggaattcggtcccttgagttttgtttttcaatttaaacttttctatacaacgtactgtcctatagccatagagaaatgctaagaatttggtcgttttaaaaagctgctacgtacatagataaaactaggaaggtatggggtgtaattctactatattatttaggaaatacattttaaatataaccttattttttgtaagtaattacataggtatgccattagaaataaaattttaaagagtaaattaattcatttctttaaaaattaaaaagtcaaatactaatttaattaattaaatttaactcaaaaacgaaatacattattaatttccaaaaaagtaaccaattaaaatcaacaaattagatttgatatctaaattatcatattaatttttaaaatgtaaccttattttttgtaagtaattacataggtatgccattagaaataaaattttaaagagtaaattaattcatttctttaaaaattaaaaagtcaaatactaatttaattaattaaatttaactcaaaaacgaaatacattattaatttccaaaaaagtaaccaattataatcaacaaattagatttgatatctaaattatcatattaattttttattaattattatagttcacctctcatctttatatgattctatttttgcaaaaaaataatatcatcgttataaaaaaataattagatttttttcgcatatgccacaatttgaatttttaaaaacgaatataaattgttcaatacatgaaaaaatactataacgggtcaaaagtagatttcagaaaaaactttactgagtactgtgtcatagtttgaatatttatattcaatttcatacatattattttaaaatttataatcttatatactacaataattaataacatattagattttttaatgtgtatgatgtgattcaatttttaatacaagctgaaaaatcctacaattaacgggtttaaatcaatattaatacaagatggttactacatgtgaaactctaaaattaacaatcaaaatacaagtttataattttaaacactaaacaatataaataatatcaacaaaacatatacaactcgcagtttactatacatttaaaatcaaataaaataatatcatatatttataatcaactttacaataaaagtttttagtttaactaaaatataagactacctgctgtataatgcaagttaaaattataaataagcagattaccatcacgatggatgtaccttctcacatacacacctatcaaaaacttaaaacctttcaaaacctcttggtatattcaaattaggattcttcattcatggaatcattattccaagggttttgggatgtcttatgaaatgattttggcagaagaggatgtaaatttttttgaataaaaagtagtcaccaaaatatatgttttattgggattttttagataattaaatcagagaatagggctgggcatatgagtaacccattcgagttcgggtagaacccgttcgggtttgggattaatgggtatatgatttactacctaatagaataattctaaatattcggttcgggtcgcgtccagttgggtttaggtcagtttggatgaaaagtttcaggccctaaaaatactcaaaaaatagaaacgggtattttgtatgtagatagtgcgtctccaaacaaaaaaaaacttttaaatttattaagttttaataaatttaattatatttgaatatattttactaaagtttgacaaatataacaaataattttgacaaacataacaaacataacaaagtatacaatttaatttatacaaaatattaatgcccgtgttgtatagcacggattatgatctagttgggttttattgtcagaaggactacgtatcaatattgtaactatgaataacttttatgactgttgaattaattaataattaaaagaactatttactttgataaatgtaaaaatgtttaataaaatgtaactcatataaataaattaaatatatgactaaaattataatatcaatacaaaagttattgacatataaaagtaaatgaaaccagagtaatatgcaatcctcttttttttttttcaacgaagtaatatgcaatcctcttatgtctatgtcctgtgatatatattattgtctttgtcaatagttgctaacatgctattgttgactagatataaatttggtgtgtgcagtgatacacaacttttattcgtatacacactctggtttttgaaggaaatatcagaatccttatatcatactaaaattatgcataatcatcaaataaataagtatattaagatttattaaagaaatgtgtgcgtgtggatctgcatatactgtatagtgcatatattaatatgttactatgtctatatagctagagagaggggtcgttatcagtagctaggtgcaaaatagagcaggtttatgtgatgttgaagatggcaacaactgtcatgtaccccaaaatctaggagtcttaattaaattagtgtttctaatcacctcaacacgaacatatagattgaaagaagtgggtccaaaaataatatgggcagaaactagaaagtataatacaatatcttttacaagtactatattagaaattctctatattgtgataagtactatattatactattcgttcctctatatatatatgggcaaaacttaggttattaaatattgagaaagcctaaattcgttcctctataaagttattttcattaattaaaaaaagaaaataaacatatatagagaagccgacttttccgagtataagagcttactaacaacgtaacaatatacattcacattatctaaccaaactgaatatagtgtggatcaaaaggtcagaaatttatgtttaaggaaattgatgagatacgaaggttagaagtctgaaaatttgcatgcaccttgtaaaagtgatcgtacgtacgtttaatatagcctctatattataaacacattaatacttaaagggcgtacgttgtatatatagatcatagatgcatgtagtaggagttttgaatactacattattgaagtagtaaaatcaacattggttttggtgtttatatgtagatcgtcataaaacaagttgtttacaaatcattacgattccaacttattttctttcatactgtactatgtgcaacgaattaaagagatctgtagtgatgaaggggggaaaaaataaggctccaatcaagttggtttttgatttcaatcaatgtagaaataatttgtttttcttttttgtcatcattaaaatatttatatttttaggtaaattatgttttcatagtcaagtaactagtttgtgttatttccattcgatttattgtgataagtcgcactagaaatcaagaatgaatggaccgatacggatacggatacggtccatgaatatgaattatcaaagcaacgtttcaaagaggaataaatgaaacgagacaagtatcggtggggtatgtacacatatatatataaaccctaatcaccatgctctccttttgctcgataattatttcaaacatattcttattctaaggtaaaatcatgccaactcgataaaatatttcttcatattgattaactttatatcggagaatatatatatatatatatatattttttaagtatagaaaatagaaatatgacgtgctaaattgagctatggacaaaatcatatatgagaaaatgaatgtagatggatagagtcgtcccacacttaaggttggtccacaatgaataccgttggaggcttcgcaggcttttgttctgtccttgtctctctctcccctaaaaaaaatttgttacgaaaaattcatttgaattaattttggtcggtatgtgtataatattatacaattataatatatttctaggtttagacatttttttattttatttttcatgaagtaaagaacacaaacaaaaacccataaaataatgtaagatagataaaacaagaggatgtcgtcataaataaattggaatttggcatttaatgaaaaagggtgaaaggtgcttgacatacacgcgccgtagtttcttacccggaaagggattggtattgatgttaactagaccgggcccggtttaggctggggcggcggccgaaccgaccacctggctactattcttgtttgtattcgctgattctgcaaatctaaactcggatcttttatggacttggattttcgggtgggtggggttctgctaaagagacggcgctcttgtcattttaagtcggtcactgcaaaacgtgaaccctgtgactgtatttagagtctcgttacgttggatctctctccatgaaccgtccaaagtaggtcaatttttgtgggttcactcacgtatacaacgaagtacggcgctatttaattttccgaaaattttgaaagagacttttataccagaaaagtttgtaatccaaatttttaatatattgcagatttggttcgttttgggcttaaagagcttttattggtgtggtggctcaaatcgtttttgtaggcgtcaggtcaggcccattttcaatgtcgcttgctcatttgatacgctaatatagggctttgcttaagatttgaatgggccgtacccccattttgcttcatgagaatgggatggtaataaagaaaaaaatgacaggaaacaatgaattggtcacgaaaaaatgttgtattactttttccaaaatgcacctttgagaatcttaagattcaatcatacagtgaggtccatgtccacaataagaaatcaaataccaaacaaagtataaacgtgaattgtaagctaggcagtgtatgaagatgcatttgtcttaaagttacgaatctgataaataatattattcgatcgactttagatcgctttccatgcagatttatgcaattatctggaagaagaacaaaacaatatcttagtttcttcggcctcactattcgacttctatcttcaatatattttcgcgtatttttttatttgaattatttggtttttggttagttaactaaacgagcaacagaaccaagatcgaattgcgtttgccgtttggattcaattattgtagaaaattcgacttttcagacatttgttacgttctttctagtagttatattagttattatatgtggagtggaaagagatgaaagtagatgtaaaacataagtgatttcttcatagtgattttaaaactttttgttgattttcaaaattatataatatccataaaaaatagcctatgcgtgttggatgcttacaaagaagaatttgttttcggcgttagccaaaagtcgatggcatttgctaaaggtgttatttgagtggaaatgatctagaacaaaaacgcattgatataccaccactataatgatttggagacgtatctagttctcatcaacttttcaatagtaaacgcattatcaaggtaaacgaagagttttgctttatcagtgtaccatacacacattaatagattgatggacgttagtgactttggtattgactttaacgccaaatggacatcaattctgcaaggcaatgcctagtttcaaagcagcgttacttaacatttaactaaaggtagtgcaaactggttaatactttttaacggctttgcaggaagagtctcgactaaaaggagaggaagagatgagatcgacgaagattttcatatcataaaaagtaatataggtttttgaaaatagttagaataattatttttatttttatttttatgggaaagaagttgcacgagtcggtccacagaatgacagaacaaaagcattttagaagtttagaaccaaccaatcactatagttttccacttgtccgtatctcattggttcatcgaatattaacttacatggaaacagtaaaaagcgtggaataagtcgtaaaactgaaatctaaaaatgaaaagatttcgatttcgatataaatacttaatctttataaaataatatcgaaatcttttcatttttagttttcagttttacacttttacttgataaatttaatacatctgttaattttttttcttctaaaattaacatatgatatctattcgggagataaccctaagaaaactgataaaataaataagttactttttacaaagtcgaataaattatttacccttctgctttaatggcaattatcttaatattgcaaaaaaaaaaagagagaaatattactacaaaacagaagcaagcaagtggaaaacagaccagaagagagaggaagacgaagagagaaacagaacagagtagggatcgatagaccgtggaatctcagaatcacaaacactttgcaaaagggttttcaattcctatttatttacaaagaaatcatcaatagtagtggtctctagggttttgcttgctcttcttcgtgacccctttttacctgcaaacaacaacttcaaaattggcgtgtttcgtacggtctatctaaccctaatctgtcacaaaacactcttcttctctcacccctttttctgggtttattcaattctcgtgcttttggttctgttttcttctctggggatttggttttcttgagtgagtttttctcctctttcttatgttcttgatttgattattatatagaattatggtaatggaggatgagcctagagaagccacaataaagccttcttattggctagatgcttgcgaggacatctcttgtgatcttatcgatgatctcgtgtctgaatttgatccttcctctgttgctgtcaatgaatccactgatgaaaacggcgtcatcaatgattttttcggtgggattgatcacattttagatagtatcaagaacggtggaggcttaccaaacaatggcgtttctgataccaattctcaaatcaacgaggttactgtaactcctcaggttattgctaaggagacagtgaaggagaatgggttgcaaaagaatggcggtaagagagacgaattctcgaaagaggaaggagacaaggataggaagagagctagggtttgtagttatcagagtgaaaggagtaacctttcaggtagagggcatgttaataattctagggagggagataggtttatgaataggaaacgtactcgtaattgggacgaggcgggtaacaataagaagaaaagggaatgtaacaattacagaagagatggtagagatagagaagttaggggttattgggagagggataaagttggttccaatgagttggtttataggtcagggacttgggaagctgatcatgaaagagatgttaagaaagtgagtggtggaaaccgcgaatgcgatgtcaaggcagaggagaacaagagtaagcctgaagaacgtaaagagaaggttgtggaagagcaagcaaggcgataccagttggatgttcttgaacaagctaaagcgaaaaacacgattgctttccttgagaccggtgctggaaagacacttatcgcgattcttcttattaaaagtgttcataaggatctgatgagccagaacagaaaaatgctctcggtgttcttggttcccaaagtgcctttggtttatcaggtaccgcctaataagaaacatgtttgtattcttttttaaaaaattggttacctattggttttggttggttgatttatcttacgttatcagcaagcagaagtgatccgtaatcaaacttgttttcaagttggacattattgtggtgagatgggacaggacttttgggattctcgaaggtggcaacgagagtttgagtctaagcaggttgctttttgatgcttctttttcataccagctttgatcttttatatgaatcagttcttgaagttaacgagtttttttctattttcttctacgcaggttctagttatgacagcacaaattctgttgaatatactgagacacagtatcattagaatggaaacaattgatcttcttattctcgacgagtgtcaccacgctgtcaagaaacatccatactctttagtgatgtcagagttttaccatacaactcctaaagataaaagacctgccatctttggaatgactgcttcgcctgttaatttaaagggtactgattgtttcttgtatacagttctctaagcttgccaatgttcttgaaagtgacactttttgtttgtaaacgtaggtgtttcaagccaagtagattgtgcgataaagatacgtaacctcgagaccaagttggattctacggtttgtactataaaagatcgaaaagaattagagaaacatgtgcctatgccttcagagatagtcgtcgagtatgacaaagctgctactatgtggtctcttcatgagacaataaagcaaatgattgcagctgttgaagaagcggcacaagcaagttcaaggaaaagcaagtggcaatttatgggggctagggatgctggagcaaaggatgaattgagacaggtttatggcgtctctgaaagaacggagagcgatggtgctgccaatttgattcataaacttagagctatcaattatactcttgctgaattgggtcaatggtgtgcttacaaggtaaaaaaacaacttagtaaatagttttcgataatttgaaatggatatgttattttcatatgatataatttttgtgtcttctttcaaggtgggacaatcattcttgtctgctttgcaaagtgatgagagggtgaatttccaagtcgacgtgaagtttcaagaatcatacctcagtgaggtggtgtcactcttgcaatgtgagcttctggaaggcgctgctgctgaaaaagtcgcggcggaagttggcaaaccagaaaatggtaatgcacatgacgagatggaggagggagagctccctgatgatcctggtaagtattaatcacattctttgtctaatcgctttttaccggttttagaaatccaatattaacagagctctatggttttagtggtctcgggaggggagcacgttgatgaagtaataggcgccgcagtggctgatgggaaagttactccaaaagtacaatcattgatcaaactactcctcaaatatcagcacacagctgattttcgagctattgttttcgttgagagggtggttgctgctttggttcttcctaaggttaggattaaagtgaaaaaaacaatttattttcttgtgtataatttttctgcctatgtctctctgagcctggaaattttcaggtttttgcggagctgccttcgcttagttttatacggtgtgccagcatgattggacacaataacagccaggagatgaaatcatctcaaatgcaggatacaatttccaaattccgagatgggcatgtatgattttttttgtctttcattaagacatattttttttttatcttatactgaaatgtcttactatttcctctttctactgtgataggtgacactgttagttgccacaagcgttgctgaggaaggacttgatattaggcaatgtaacgttgttatgcgtttcgaccttgcaaagacggtgctggcatacattcagtctcgtggccgggcaagaaagcctggatcagactacatactcatggttgagaggtacataaaaagctttaagaactacattttgatttttgtaactactggtcaccaaatcagtactgatatgtcaacttgtgttacttgcagaggaaatgtatctcacgcagcgttcctaaggaatgctaggaacagtgaggagacacttcgaaaagaagcaatagaaaggactgatcttagtcatctcaaagatacatcgagattaatctcaattgatgctgtgcctggtacagtttataaggtggaggcaactggtgccatggttagcttgaattccgcggttggtcttgtacatttctactgctctcagcttcctggtgacaggtaagtttgccgataatttttattgtcctaatgacctctccttttcctgtatgagatgatggattgcttctctctcgtgtctcaggtatgcaatccttcgtcctgagtttagcatggagaagcatgaaaagcctgggggccacacggaatattcatgtaggcttcagcttccttgcaatgcaccgtttgaaatacttgagggtcctgtttgcagttcaatgcgtcttgcacaacaggtggacataatagtttgtttgtttatcttacttgttattttctttcagtgttccatgtcttgaagtattgcgtgtttgatatgtaggctgtatgtttagctgcttgcaagaaactgcatgagatgggtgcatttaccgatatgctattaccggacaaaggaagtggtcaagacgctgagaaggctgaccaagatgatgaaggtgagcctgttcctggaactgctagacatagagagttctatcctgaaggtgtggcggatgtacttaaggtaatattagcactaacctatgaaatttttgctaaatgtgcttttagaggaatgtggttttcaatatttgactgtttataccatgcacagggagaatgggtttcatctggaaaggaagtttgtgagagctcaaagctattccatttatacatgtataatgtcagatgtgtagattttggctcttcaaaagatccattcctaagcgaagtttcagagttcgcgattctttttggcaatgagctggatgcagaggttgttgtttctctctccatggatttgagtattagaatttgaagatgtaaccatggttaactaagatttgttttactgtatcaggtattatcgatgtctatggatctttatgttgctcgggccatgatcactaaagcatctcttgctttcaagggatcacttgatattacagaaaaccaggttagactgaacaacaacctctatttttcctaacatttatgtttgcttgagaaactttttatcttatattggtggcatttcttgtgcagctatcatctctaaaaaagtttcatgtgaggttaatgagtatcgtgttggatgttgatgttgaaccctccacgacaccatgggatcctgcaaaggcctacctgtttgtccctgttactgacaatacgtctatggaacccataaaagggatcaactgggaattggttgaaaagattacgaaaaccacagcgtgggacaaccctcttcagagagctcgtcccgatgtatatctcgggactaatgagagaactcttggtggggacagaagggaatatgggtttggtaaacttcgtcacaacattgtatttgggcagaaatctcacccaacttatggtattagaggagctgttgcatccttcgatgttgtgagagcttctggattgttacctgtgagagatgcttttgagaaggaagtagaagaggatttatcaaaaggaaaattgatgatggctgatgggtgcatggttgcagaagatcttattgggaaaatagtgacagccgcacattccgggaagcggttttacgtagattcaatttgttatgacatgagtgcagaaacatctttccctaggaaagagggatatcttggtcccctagagtacaacacgtacgctgactattacaagcaaaagtaagaaaacatcttcaaataattttttgatttcttcaatcctttttctaagtttcattagatactaatacttttctaatatcacgaggacttacatggcctcaagtcacctgtggtgttgtgcaagaaggagaagcaaagtctgtctatgtattatgagatagctacttctatggctaggatatatgttgtacaagaccggcttttcttctacttcttgcacaacctgaggttattgaggctatacaagtcttcttctataatgttatttattaggtatggagttgatttgaactgtaagcaacaacctttgattaaaggacgtggtgtttcgtattgcaagaaccttctttctcctcggtttgaacagtcaggttataagaaattcttttcactttaacaatttaatgatataaccgataaattaacgcttctttgttttttcttgcaattcaaaggtgaatctgagacagtccttgataagacatattacgtgtttcttccacctgaactatgcgttgtgcatccgctttcgggttcacttatccgaggtgctcagaggttaccctctataatgagaagagttgagagcatgttactcgctgttcaactcaaaaatttgattagttatcctattcccacatcaaaggtatatatatatatattatgcttagtgtcttttttttttttgttgaaactatctaatcatatttggtatatatatgtagattcttgaagccttgactgccgcctcgtgccaggaaacgttctgctacgagagagctgagcttttaggagatgcgtatctaaaatgggttgttagtcgttttctgtttctcaagtatcctcaaaagcacgagggtcagcttacaaggatgaggcaacaaatggttagtaatatggttctttatcagtttgctctggttaaagggcttcagtcatatatccaggcggatcgattcgccccgtctaggtggtctgctcctggtgtgcctccggttttcgacgaggacacaaaagatggaggatcttcgtttttcgatgaagagcaaaaacctgtttccgaggaaaacagcgatgtgtttgaagatggggagatggaggatggtgaactagagggtgatttgagttcgtaccgagttttatctagcaaaacgttagctgatgttgttgaggctttgattggtgtttattacgtcgaagggggtaagattgcagctaatcatttgatgaaatggattgggattcacgtggaggatgatcctgatgaagtcgatggaacattgaaaaatgttaatgttccagagagtgtgctcaagagcatcgactttgttggtcttgagagagctcttaaatatgagtttaaagagaaaggtcttcttgttgaagctataacacatgcttcaagaccatcttcaggtgtttcgtgttaccagagattggaatttgttggtgacgcggtcttggatcatctcatcacaagacatctatttttcacatacacaagccttcctcctggtcggttaacagatcttcgagctgcagcggttaacaacgagaattttgctcgcgttgcggttaaacataaactccacttgtaccttcgtcacggttcaagcgccctcgaaaaacaggtaaacaagattaagaaacaaagtatattgttctcaaagagtttcaaatgtttgactgtttggttactttttgtttttcagattcgggaatttgtgaaggaggttcaaaccgagtcatcgaaaccggggtttaactcttttggtttgggagactgcaaagcaccaaaagttcttggagacattgttgaatctattgcaggtgctatttttcttgatagtggaaaagatacaactgctgcttggaaggttagttagttagttatttcggttgaaaatctctaactaactcgtttttttttggaattgtaattcttagcttactaaatcgtatgattcttttccaggtttttcaacctttgcttcagcccatggtgacaccagagacacttccaatgcatccggtgcgagagctacaagagcggtgccagcaacaagcagaagggttagaatacaaagcgagtaggagtggtaacacagcgactgtggaagttttcatcgacggtgttcaagttggagtagcgcaaaacccgcagaagaaaatggctcaaaagctagctgcgaggaacgcacttgcagctttgaaagagaaagaaatagcagaatcaaaggagaagcatatcaacaacggtaatgcgggagaggatcaaggcgagaatgagaatgggaacaagaagaatgggcatcagccgtttacgagacaaacgttgaatgatatttgtttgaggaagaattggccaatgccttcttacaggtaacaacaatttaatagaaagtgggtaaacaaatcaattttgggctttattgagcttatttcgggtttgtggtgaattttgtagatgtgtgaaagaaggaggaccggctcatgcaaagagatttacgtttggggtaagagttaatacgagcgatagaggatggaccgatgagtgtattggcgagccaatgccgagtgttaagaaagctaaggattcagctgcggttcttctacttgagcttttaaataaaactttttcttgattcttttactctcttcaacgagatgtagtcattacattttaaaccttaaaaccatagtggttgtagtgttttaattgatctgttgttattcgagtttaattggtttatagaactcttcaaacaaattaaaccaaaaatttcaatgccaagaaagggtctttaaaacgaaattacagaaggaccaaatgataaggaagaaaaatgcagagataaaagtaatatcaattaggatcatatgcttcttattatcaatgaaaagtaacagaaacatagatgctgcagaaatcttctgaggagaagcttcaacgcctcagggtgtggagaatgtattcagcatagaggtccctgtaatggggaattcagaatccagagttgctttaatgttacaaactaaaaaagatgtaagagagtttggttcttgataaagaaacagaggcttacattgagtactggatagcttcaaccgcagactcagatggcagaaaatcattcactgcaacttccttgttctcgtttttcttgtctgtaagatattagagttaaagggaaaaactaatacttgttgagagatcaatagagatgaataaggaggaacactgaagaaaaaggatacagtcttcgaagaaacgacggatttcagagagacggtgaggaggaagttctttgatgtcagtgtagtgcttatattcaggatcatcaacacacactgcaatgatcttgtcatctttttcaccctaaaattacagcgccaaaaatacaagattggagtacaagaccatttaaactgacctaaaggattagagtaagagaaaaaaaaaacagagtcttttcattgatcaagtttaggttttacctggtcaatcataggcattaatccaatggctctggcacgcagaaaacaacccggaagcacaggttcctacacaaagataataatatatatttgaaatacaaaaaattggtgcaaatagtatagggataatatgagaaagaaagaaagagtaatacctgcatgatgactaagacatcaatggggtcattgtcttcacacaatgtgcgaggaacaaaaccatagttgtgagggtacacaactgatgagtagagaatacgatcaacctgaatgagagaattcaaacttgttgagattgattttgctataagaaaaccattcatataaaaaataaactttgttctcatctaaccttgatgagtcctgtctttttgtcaagctcgtatttgaccttgcttcctttagtgatctcaacaacctaataatcatccaaagataaaatgattagagaatctaataacaacatactctgtttagaacaaagagtaggaaaaaacttaccacattgaaaatctgtggagctccaggtcctagatagattatccagacttatgatttagtaacagaatacaaaagtatgaaatcaaaaagtagcatgtttagaatgatttatataccaatctcaagatcatgccatggatgagcagctacggatcttcttgacaaggatgagagaatcctctcgttaagacgaggagctggtcgctgcagcctctggttatctttagtttcttcactcatctgtcaaaatcagaacgtttcatcactcattgatattgactgaatctaacatcataaccctaattggcagagagagaatcaatcgaatcaagagtattaaatggaaaaagcgaatcaagaccccacaagggaaaacaatccttaaagcagacttgagatcgatcatacccaaattatggattcatatattgttaacgtatcgattactgaaaagatgtataccaaatctgttcactttttctctatagactcgatggatgattgagatttgaagcaacaaaatacccagaagattaaacatggaaaagcatcaaactttgatgatcttagaacgatgacaaaagaaaaaaaaacgtacctttggatcgaaacgaaacagccgattgttgttttctttatcgcaaggatgatgaagaaactttgggagagaaacaagtgaagcccgttggtctagcaagtgattgtaaaatgtatatatgagtcaccaccgagatatacggatcaaacttttatattatcgtaacactcactacactaccactcaattatttacaaagatttacatctttttaaaaatactttattttttattacgaaacatagtttgtgtttttgcggtcactcctataatctatgtaggatacttgcattacatttttcacaaataatttggtttggtagcaaggatatggctcattcagtgagaacaaaaaaattgtatatctactcattcatcagtaaaccaaattaagagattgaaatattgtataaactagctacacaatataagccttctttaggcctctattacttaagcttgtaatagggaaaatgttgtaatgtaggcccaagtagtgtgagtaaaatctttaaggcccagcctagcacctttgggcatttggcgttgggcaacgagcgccttcaagtttgaaacaaacagagagaatcattatgaagaaacaccaaaagacaaaactttctaagttgtaacttttgtacagttcatcttttatcattataaactatttatgatctcatcaatcaatatccacaatttttaaaaagaagaataaagacaaatccattgcttaatggttaattaacagtagtagcagatgacatatagaccacaagtagcatacacaaacagagacaagagacaagacatggggtaatatggtacagaacctgacatgaccaaagaaatgttcggaaggaaaattaaaagtctctttcataaagattggagaagcaaactactaacactagatttaaagatattgataaaaatgtggatgttttttttttacctccaagtctgtcatgtagaagcttctccttccaatcgaagccttttgcagactttttcatcactttgattgtttatgttcccaacttggctctctttcacttccattgaacatctcttgtatggcttaaatcctgtctgtctcgttttaagactcttgcatgttccaacaccgatcattactactccttcttggtctgcagcacaagaatcctggcttttgaaattaggagccaatggcattgacgtgtcactttgttttctattcacattctctgccacttgaggaggcgaaaagctttgaggcaatctttctcttgcaaagagagcctgaaacgctatacgaccctgaaaatattttgatagtgttagttcccagaagaactctgcaatatccatgaatcattggtttttgttttacctcttcggagacttccttccacgaatcagtagttgcattgttgttgctgttgttgtctctcattttaatcttacggttatttaactcaataacatctggctgattctcatctgtctccttcacatcctctttatctttctccattttatctaatgcatcagtttctgcgtcactccctgaaggtgtatttgagccacaggatgagcggtccacaagatttttcttctgggcagtgtttgagtcatgcacagcggcagtaacaacaacctcctcaattttatcatcattggtttttgagtcggcatttagcttggttactccagtctcatctgaatcatcagatgatgaagctggagatttcgaagccaagttttgatcttgcagagctgtgttttgtttctcaaacggttgagtattttcaacggtatccatttcagtcattgctggagttggaactgcaacagttgagaatggaacacatgttattggagctggagcgcatacaggaagaagtccatgagaagcccaccaagcagttgcagcagctactgtagcagcggcaatggcagttatacttggaggagaagagctcattggggttgatgaatcaccagaattcccgacactcgcataaggccagaccgaagcagcgaatgtagctgcagcatgagctgcaggattctgtaggagagttgacataataagattggagaaagtagatgatatctggagaaacgaacggtaatcatcctgtgaatgacaagctggaaacgcttgatgagaagctgtagtagtagcagatgctgttgtagcttgaagatttgcgtgcccgtgagtttcttctctcataggatgaaacatgaagtcttgagataccatacctgagggatgattttgagggcattttgctatattcccgttcacaatatctgcgtggaaatgccaagggtagttttgcatgctgtgcacagtagtaccatcgttaccatctttgtctttgttcttcttgggaacatcttgaaccgcgttgtccacagttgaggtcttacttgtttcaatgtcgccacttacctgctaaaaatcagaatggaacaaataatttgtcatgcacttgaaagcattcatcagattcttcgactacaattttgtagctttcttagacttactttcgttggtaagggatacttgttcacagtagaaacacccgagcaattctcatcttgattttcttttccagttgatgttttctaaccagaaaataaaacataagaagtctatcacaagaccaccaaaatgataaaatgaagaagagaaagatcaggaataaacctcagagaacggcattttttccaaatccaagaacgcctgattcaactgtgaagaagaggccgatgaaacaagttttgcatcttttgctgatgatacttgagaggaagatgtaccgttgttcccaggctttcgaggataaggagtattgggttttcgtttaggacgaggaggcggaatttctatgtccaaagcttggcaaacagggatgcctttaacttcagcctctttctccaactgaaatgtgaaccaaaaactgtgagcttttccaaactggagatggaaaaatgcagctcagatgtgaaatcctgagattcatgaaattgaccacatcaccaaggttgaaaaaagtcttatactgacccgaatttttcggggtagagatgatagagttacttcatgtcctgtcctatagggcaaggaggtttggtttccatatggatggctaaaagaattcatgcaatcccattatttcatcgactttagtgaatatgggacaattgtgtcatccaaatgcaacgctagttatgttaatttggacctatcttatggtctcagagaagaaagctctctgtagagttttttctaacagtaagtttggacagaccaatctaatgttaagtttagttgaacagagtaaatgaaaaagataaaaaacgatcgagatgcaatcctcggaaccaaccaactctacttagcaaaacacactctacttagacgcctaatttctagttgaagcaattagagaaaaggaagaataagaagaaccttctatcatcttttccagacagtgacaggcaacttctaaacatagtcatagatcgatatgaaaaaatggtacctttacacaagataacgaaagtgttttaaaaagatctgaaaggatcatcaacttacctttgtgaagaacttttgtgcatgacttctgatctgaacagcagtctttgtcccaatatgttctgcacacaaaatgaaaagaaaagaaggaatctcccaatcaagaggagataaagacactcctaaacaaaggaatataaaatctcaaagagttcaaactaaacattcaaaagataaactttcgaccttcaattcgttgccaagctcttccataaagcctcaaggcttctagaaacctctcatgctcatcctcagtccatcgctctcgctgctttgttattgtatatggctttcttgcctaaacatttgaaaacccaaaagaaaatcaaatcttcacacaacaacagtccaaatctctcaaacaaaaaaacaccaatcttatttcattagtagtagtaccttagctaataattcttctccagatgtattagtatccataacaggaccggtgcagctattcgctgcttcaaatcctctctaacaagtaaagtataaaaaagaaaccatctttgatctccccaaacatgaaagttttcaaattgcaaagccgttgtgataacctctttagattctagagaaactgcaaaggagaaagtactttatgagaaatatttatccacaaacactaagataagagtgatgagcgaaattcaaaagagaaatcttttcaaagtccaccgtgaaacagtcgctgcttctccagcagaactcaaaagaattccctttattattattcacaaaagcctcacccaaacgaatccaccgcagccaaaaccttcacaaatcttcatatcagtaatcaatcaccagattcgtatcatttatgctaacttttagagctaataagatttagttaatcgcttctataagtttctcagcagccaaacagagatcttagtatgttataggaatcctagaaactgctcataatgtaaactgttatacccttgagagtagccatggaggagacaagtatgcaatctgacttatcatctcaccgggaactccccggagaagtcatcgttcccggaaataatcaaatcggaagcaaaacaaaaaaaaatctctaaaaataaatttaaaaaacagagagaagaaggaagaagataactgaagaagaagaagaagaagaagaagaagaagaagaaggaagactgttttaggctgaagaagactggaagaagaagaagagaagccagaagcaatctcagccacaacaatttttcccctaatttttggaaaaattttaattgaaaagtttatttgaggctggaacagcaccaagggtataaatggaaaaaacagaagtcatcgcagatcgacacgtggtgatattgtagtggctgtctactgcactttttggtatatctcaagttgcttctctacgagccagaagcttcaatgtgaagctcacgtaggtaaaagtgagtgtggtggtccacaattgcttacgtgtaaacgattattggtacaaacttggacgactaaacaagtgggtacggtgccagctgtgatggtgtactgctacgtattggctatgctggatctgggcttgtaataagacattgtatgggcctcacttttacgcctattctatataaatttgcgtattaacatagttgaattaaacccgacaagcttggactgctcggggaacttgcgtctgtataaaaatcttcatcttttcatataatatcatgcaatgcctatacaaaatttcaacaaattatcatcgagaactttggtcaacttgcttatataacatttgtagaaattaaggaacattaattactcttaagtcttaaccgaagcatgtagtatttatttatggaattcagcaaacatcattacactcatttttttagattccagcttacaactgtgttttgcttaaagcagaagcgtttaacatagttatagatactctaatgttggagcagagcttagttgcaatattttttgaagttgacggcctcatcggtcaggaagccactacaaaaggttaccgagaactttggttagttcggttcggttctaggttaaccaaaaaacaatagaccagtttttgttactaaccgaagaactgaactacccgaatctaattgaaataaccgaaattattccaaaataaccaaacaaaccggatttaaatatttcacaaatctctacgttgatgtttggaattataaaattttatctctcattacctctccttaaacattaactaggacataacagttatttgaaacatacattaacaacaatataattaaattaaacgggcgacttagagtcgttatccttattaggagtagtatattgagcttcgttatccattcctgaagacaatgcagttgatgattccgtttctttgttcttcccccacaagaacatgtagagacccgttatggtcactagtgatccaatcacactgtagaccaaaagttttaatgttgtaattagtgttatgcctagacaaaattaatttgatagagattatcgaagaagataccttccaaggtataaaggagtgtgtaaaatgaggaaatcaaatagagtagccgaaatgagagtaagtgggaaaaacgccgatgcgaacacagctcctaattttttaatcccccatgttgttgcaaccgtcgtcattgcttgtcctaccactccctataatatatgataaaaaaaaaccacataaaaaaacccacattaatatcttaagttcttacatactaatcttataatttttaaaaagttaatttataaagatatgatgtttgtaacttacagcgtatatgatgacggtgataacgaatctatcatctatgatccaatcattaacgtctctgctcttgtaaaggctcaagagagcacattgaaatgccgcgaaaattgacataagacaagtgctcgagtatttgcaagggtacttaatacttaaagtcccttgaaacaacatccatagagatagcaacactgttcctatggttaaataaagacatccaagaagccaattattggccttgtcttgatcgttgttgttgtgggaagccccaccgtgagagtgagagtgagagtttgatatttgtgggcctttgtaaaatgttaagaacaaagctccacttatacagatcaaagttccaatcaccttcaacattcctgctttggtctttagaatcttcacattttcagtcctaaaaaaagtaaaattttaatgattattttgaaacaagttattgagaatatgaatcatagtagaaagtatttgttttttttctttcctggcgttacaaaatagagtcgctttttaataattttccgcatcattccatcaaagtttataaaaatgcgacgtatagctaagaaaagacattttttcaggaaaagctttagaaagagggctcagtggatgcagttacgtatacttaaggtaatttgatggaaaagaaaaccaatcagattgcattacaattaataagaaaatataatgttctatattatgttgtcaatactttcagtagtgctttttaaaaatctagattaatatatattatcaattgatgataaagaggttagatggttccatcgttacctgaaaataagggccaaagcgaaggtgattgcaggcaacatgcttaccaaagcacacgaaacagttgctgacgtgtacgacagaccaagcaaaaagaaaaactgcatcaaactcgccctgtcaatttaaacccataaattaattaaaagatctttaataatttagcttatgattagtacaaactattaaactataagaataaattgcaaatggccgacaaaataatataataaaatgcaattaggtttgagaggactaacccgagaaggccactgacgaaatgatcgaccattagcctaaacgttatttgtggtcttgttttcctatttaacaacaatagaaattctttagaaaattcattaaaattatacatatatattaacattcgtggcttctaaatttctacttgcatgttagaatacagaattttcactatctcctatttcgatcaacatatcaaacctttccaagacataggcaaagggaaccaaaattaaagcggaaatagccattcgataagcaccaatgaccatatggttcacaccaacatcaagagctttcttcacaagtgcattcaccgaacccatcgctacatttgacatcaccatcactatgaccggtgaatatttttctactactctcactccttgcatatctccagccatatctctctctatatgtgagttatttttgtgtgtattacttagagagagataagccccaatgtgctttgagtttggcaaccacaaagcttcccatatttataagaaaagtgtgtatgtgttgttccactttggacttacttagctttgacgttaacgttaacctatatttttattctcctgaactacttatctaaaatcttactacagcatatgcatttgttttaatgaaaagttaatcaagcacttcatactacaccctttaattttttatgtgtacaataggattttcaaacgtttaaaatagcataacatattactatattcatcatatatccaaatactctttgcaagattctaaggaaattacataggtacattaccacgccgaagcatttgattttaatctaacgaattcgttaacttttttttttggtgaattacgaattcgttaacttggcatagattaatgttcccacaacctgttatatatatatatatatatatatattttcttctttttttgattccacagcacagtatgtaaatttcgttttgtccggcaaatttggcctttaccataatttttttcaccgccttcagtgccgtagacaaatcaaagctcaaaaataattacggagttttaaattatttcaaatgctatagtaaagttgtaaatatatatatatatatcaattaaactcccttaaccccataagacaagtttttttattagtggttttactgaaaaaatgattattggtgttatgtaaatgataatatattaaggaaaatttttagaacttttattatatattatcgtaatatacgactcgaatttaaaatagaaatcaaaataaaagtgttagtaaaggaaaaaaaaaaaggttgtgaattctatcacgacaagtcatatatattacaaatatcattttctgttaaggttaacagaaaattctaagttgcggtctatttgtcttttaaatcaaacacgaatgagaaattgccactcatttactaatattatattgcgtattctttgcagattatgtctctttataatcatcttgcaaattgacccttaattttaacatgtgggtggtaaaaaaaaaactaaaagaagaaacattactatttccattgataagattgatcgcaatctatctagattgaacttgacaaaacttttgtgatacgaaaaaaagaaggaaaagacaaaaaggagttggtattgctatctgagttcgagtgcatgagtggtcgtgaaagtggaattaatttgggatatgcctacttatgcatggcttcagagttggtttgacataatttttcagaaacaagtgtctaagcctttcatacacgtcttgattttagaagttagactgattttctctatgttcatgagttactttaagtgggctaagaccatctttatcaatggactcttacatgtagttctaaacaattttgatatataacataatgtttaaatattagaaaggctcttacaaaagaagagaataaggaagaaaactcttagctaagagccatttttcatctcaagcacacttttttatttttttttattcttattttgtttaatataatattttaatagttcttatgatattgttaacaacctattgataatgatgctctaagaagtctaaacgtttttttctatctagacaagtatctttttgaagttaaaactaatgttagtttactccttcaaatatagtttggatttagaacactgaaaatatagaacttgaagttgaaattttgttttcctgatattacaaaactataaatcgagcaaatttgtacttgttaaattaacagaatattttttcttaccaactagctacaactattgatctttcttacaacttataaaatgtaatttattacattgtttataaattatttaactcattaaatgcatcaatatataataattttatcttatacatgcatgaacaacttaatagtttttttttttaaacaacctaatgttgtctaaacgattaaatggtttaggtgttaaggcacagaaatcatcctccatttacctcatgttgcttttcttaacaccaagcactaaacaagcgctagctatacaactttggcaaatgaaaactcagtcggaaactaaatgtttgtgtttttttttcacgacatgtttttaaggaaaagaagagaatttttgaacataatatcgaacaaacccactaaaaatagttggagggagcagaaaagcaattgaaagtaacgagacaagaataacgtttttaaaaaagttaagaatatatagtgtgggtcgacatgtacctcactaagttttctaatttataacttctatcttcgagcataattgggaattttgtggccactaatatcgcaaagaaatgtgtatactattatatttgatgtgaggactgaaattacaaaatttattgaatactaacagattatgataataattaccactaaaattctttgattttcttttttatattttaatcttaaataaatggatggatcaaaagttcaaaacactaaactatagtacaacattactcacggattctatatcacagcataaaacttcacataattaaaaaaaggtttacatctctcgcggaaattcttagcatatgattgattcttcatccaccaagtaagttattaattttaggttaaacaaaattcaaaaactttcttaagaattttgtgggttatatatacttccagcctgaataaaggttgagtaacttggtaaatcttgatctccattatagttctaattttgctttctgtttttaatttaaattttggatcaataagaagagacatgcatgtgtttcctgcaaaactccgcgcaacatcgaaactttctcttcttattttcaacatagatgtagggaaagagataattactgtttagtttattctaatttactagaggaaaaaggatttagggagaaaaggtaaattaaatattcatattcttcttagatagatcaaccactgacaataataacaaagaagccactaataaatatgcacgatgactattttctaaatcaaacgtcatatttgattcagattcgagaaatgactgggaaaaagaaaacacttttgaacaagatagactaatcataatcaggtgagatttgtgactttcacaaaataattctccatcttaattgttcgcatcttcattggatcccttttacactttttttttttttctttcattggatccatctagtttgcactacttatatatgtggtatatataaactttaattttgaaagtgtaataaatttagagtgatatcatttagccccccgatggaggattgaattgtctcgaactaatgcgtaatgcaacactatggttttgaatagtgaaataggaagatgcgaataaaaaatagaaacgtataaacgaaaacaatagtgtatgtaattaggtgaaaccgtgaaagtggcgaacgaatcattagcatataagaagaagattgtgtccaccctgagttagatacgaatactttatgtgtgaaatctaattgttcacgatttgactcttcagagtttaaaggctggctaacaagtttaagctgcgttttagggtttgggccaataaattcagcaatgaaccggttttaatggcattaatagcccatagtgaatgttgcaatcaagaaatagttataaaaccatgtacatgggtgatatttttagattatcacaagtacaaaaattatttttatattagtaaagcaattagaatatgcttatcagtatcagcccactgatatttgtgataccagtatcatctgacgtggcttcttctgattggttacatttgacaaaagcaaaaaatattatatatatttattaaacaaacattataaataatactaaaaaatattcttgatgatattttgtgagtatcacctatgaacatgctctaaagatcaatatcttaaaacaaatttagtgatataattaattgaaaaagtttgtattttctggactgaatcacactagggtttgtgtgatttctggtgtaagaaggtaaaaggaggtagttatcagatgggcccacttgaaatcatttcactgggcctaaacaaatataaagcccatttatcatttatggcctttttcagtctcctcccgagatttaaaaccctagttggttgatcttctccaacggggaatggaatcggagagtgacgaaagtcgtgtgtggatcctaaatccttattcgggtctccgaatcggatcctcggagttaagccttacaaaatgaagatgctaatggttctgttttctttatttggaacctgagtattgcatgcacaccaagtgtttggcaaaatgttagagtgagacgacagttggggaggtttgacgattatctttcatttgtagagtagatgaatcgaagaagaagatcgaaaagagaattatacaggtagatataatgggtgataaacaaaatcgagaaggatataatatgtaaaggttacttgtcgaagaaatcagaagacattcattacacattgtttgtgtccaagagatgtctttgcagcaaaagcagaacagttggtttacgactcactcttctcgataccttctctgacgatgattctgcgaccttcatattgctgcaaaagagagattgtgataaagccagagagcagtagaagaagtttcctcaagcaagattctttttatggataacgaacttaactgttccattgaatgataaagccgcatcacgttcttcaccgcttgtaaaagaaagaaaggcaaagactctgtttctcccggtcttacgatcatgtaacactctcgtgcttacgattgtgccaaacttgctaaagtggtttctcaaaccatcaggctgtgtgaaccaagggagatttccgacatagaccttgtgttggctttcgtacatcagaatcttctttggagttgagttcaagacttcagggtttcttcttgttcctggattcatgtcaacagagtacctaacccgcatttcccgaccacctacttccttcatatatagcaacaaaaccaaagcactcaactttacactcaaccagaagaaagatagacttgttttttggtttcccgggctcttactgttccatcaagagaagcaatggcgattttggcagagtttatagaacccattgtcacgtacccgcttccacggctctctcccgtctgaggatttcgcgatacctgcaacatcatttccaagcaatgcacacctctcactatacttgtcaatcatccatatactcaaaagagtaaccagtacgtttgattcgtcttgatggaactcaaagctaagtattttcaaattacattgtggatgatctttgaattttcaaagctaagttgaaagagtaaaactttgaattttcataaaggcattgtaggatcaatcaaatctggataagaagtaccacctctacagagattacagttccaaaaggctgaaacatgtcaagaagctgagcaatgtcgtagcttctagggatattacacacgtagagctcgcaaggtctcggtttctttactggttctgctttggagacgacactatctttattgggttctgcttctcctttaactacttcttcttctttttcttcatcgagaactgataattctgaagaagagaccttgatttgaagtggttgagctacaaagggacgagaaagagaagagtgatgaaaagaattggaagaagagaattgaagtttcagagattctaagtaagagtaagaagaagaagagattagggttttgtatttgggaattgcattgtgagacgatcgagaagaagaagataagggaattgcgaagcaggaggccgccattatcgaaggaccagaaagtaaattatttgagaagaatgattaaaaaaaaaagaaatgaaatagaaattaatagaacaaatcgggtcgggtcatttaacccgttacaatcctgctcggtattcgctacgtcagatgagacactctctttcgcgtagcaggttttgtttttcatgaaataaacaaaaggcccaaagttataaatcaaaaaataaaaaattattcaaacattttcatttcttcaagtctcttattccctttaccaaacactttaattacaaagaaagtaggagccatgaaattagaaccagtgcaatcttgtctaatggcccattcatcctcaatcttcattctgaccactacatctacaactccttggctctgagggaaggtggtagtgatagaatctgctatgtttgaactccctcagaggtttgaagctatattttgacccaaatgatcgttatgcaaaccacaacactgtcttctttgatcttactatgaagaagtctgcaaatcttgaggtttaaagctatattataagcaagctatgcagagatgaagcaaagaggaaaagagttttctgtgctgtggaagctgtattggcatgtattgttcttatacgagattgtgtgtaattggtggtactggctcctgttgcagagcccatcttgtttagagtgtaatcacccgaggttgcaaaataattatctttaaaaaaaaaaatacaattctctggtaagtggtaaccaatgaaaacccaacgaactacaagaagaaccttgtgatagtttagtaacaccaaacaaaaagcaaaaagtgcaaatgattcaaactgattctctgtagcatttaacttaataagatatatagaaacatcgaagagacagtagacagcttatggttaaacttgtcttctcagacttgagctgtgccttcggtaaacttggggtcctcacatctgtaccgtccatcaggtccaattccaaatccttttggatcagcaaacacattctctagcaactgactgcgaccgggctgtggactagcgtctgcaaactcaaccgcttcctccaccaactcgtctatctttttctctattgactttagctctgcttcctttgcaagcttgttctctatcaaatacttcttcaatgctgcgattgggtctctagccgcgtatttggctttctcagctgcaaaaaaaaattcaaattaaagagaaggttgtttcaacccttagataatcagtacaagcatcaagaagcagaaggaagtcgatatttaccagcatcacggagctcatcgggatcagccaaggagtgtcctctgaatctataagtctcacattcaaccaaggttggaccttctcctcttctagctctagtgacagcttctttagcgacttccctgaccttcaagacatccataccgtcaacatgaacaccaggcatcccaaatgcaggacctttcttccaaatctcggggtcagaagtggctctcaagtgagacatcccaatggcccacaagttattctcgacaacaaagataataggcagtttatagagagcagccatgttgagacactcgaagaactgtccgttgttacaagttccatctccgaaaaaggcgacagtgacatcatcacaatcctgtttcaagacttccctcctgtacttggagctaaaggcagcaccagtggcgacaggaatgccttcaccaataaaagcaaagccaccaagcatgttgtgttctttggagaacatgtgcatggatccaccttggcctctgcagcatccagtaaccttgccgaagagctcgctcataacagcacgagcagagacacctttgctgagggcatggacatggtcacggtaggtactaacgacagagtcagacttggtaaggagcttgataaagccagtagaaacagcctcttggccattgtacaagtgaacaaaaccaaacatcttgcctcggtaatacatttgagcacacatgtcttcgaaagatctacctagtatcatatcttcatacaactccaatccttcctctttggttatcaactatttcaaattacttaaatcaatacaacaaatctcacaacttgtaaaattccaaaagaaggagacgaggagaggaagcgtaccaggctggtattattggtggattgcttctccttgacaacttcctggacagagacgacgggagatcgacgggtggcgttggagtgattgagtctgcgaagggagagggaacgggtggatccgaggaaagaagaaggaggagccaatcggatcgggagcaagagacgattctcatgggatccatgcagaggaaccgtggcagtgagcttagtgggagcgaaagccgtcgccattgctatcaatggaaaccccaatgagattaacggaattcggaaaaaaaaaaaaaaaactttctgggaaaataaaagagagcagagatgggcggagagaacaagagatgagaggcagaggaggcagacgatcccggctctaaatacttatatatatttttatttgtttgttcgaaaaatatttaatcaattttggacccacccttcttcgttaacaccaatgtttttttctttcttttcatttcatctcttaatttcaagatccgatctacaaatataatccttgttaagtatgctcaacataatttattttcttctttaactcgaattggttaatcaatagtggaatcatcaaattaacaaaatgatctgaacaaattcaggtgaataaccataaaattctaaccatttagaaatatggcttttcaattgagttttaagaatagatccgttttctttaagatttgtatataatcccataaatcttttgttatcaggtagagctatagatgcaactacttttgactctaaaagaaagaaaattgaatttaaaacctaattcctaccgttactactaaattattatgaaacatatttaatcctctaaacaacattttttggttttcctatttctcttacgaaaaatcccattacttttttatcgtatttatccttatctcaatttcatcaaatggaatgtatgacaatagacgtacaaatgttatgaagacgctgctgggtaagaagaagaacaaacactaacatgttccgataataaaggcattgggccggcctaacattactgcaaaagccaattttattaaagacctatatttgatgacaattctaaatattgtatgaccggatttaacatttatggtttgacgttttcgaaattaaagacctatatttgatgaacgaagacttggtagaaaataaacaaaatcaattctaacaaaagcccgagccgattggtttgctaggaaacttgagttatacaacatacgcatcataaaccaactaatagtcctttagccagatcaaacaagtaataataactcatacgacaaaatatagtctccaatatccaactacaaagaagaaagacaagtgactgcgtttagtcaaacaaaccgaaacccaaatctccgtcactctcttctgctggctcatcctgcaataccaaaatgagatcaattttatatcacttattagttagaagaatgatttcgtctatcgttgctatttcatttaccttcttcttctcctcagcagcaggagcagctgccgcaccaccgccagcagctggagcagcagctgcaaccggagcaccacctccaccaccagcaccaacgttcatgatgagatcagtcacgttacgtttctcagccatcttggcgaatagcattggccagtatgactcaatactaacaccagcagctttcaccaaggtcgcgattttgtcagcctatcaacgacataaacaaacacaagtaaagatctttacccaattcaaaacacatttagacagatacataaaatacttgttcaattcctgaccaaataatactataccaaatccttatcactccataagaatcattttcactaagtttctaactatcaagtcaaaagaaacggttccaaaaccctactgactaaagcaaagagaccaatcaagatttagaaatagacaagcaggagtcaaaggaaagataccgtgatagcgataccctcgtcctcgaggatcataacagcgtagctgcaagcaagctctccaactgtcgacatttttttatcctgaaacgattcaaaaacagtaacaatagattaattgcttattcacaaaaaaacaaactttaaatccgttttaaaccaaaattagagtaagtcgaacaacccagacgatgatgaaatgccaataacaagtataaacggatcaaatggagaatcatagactacctaagagtaagatcgaaaatgcttttcgcaaggcggcgagagagacaaaatttctagggtttggatgcggagacgggagatgcagagtttataaagcttttatccaattatttgatgggccgcataaatattcgctaggcccattttttaattttacatatatttgttttcagtattgggccttcaaacctaatagccgtgaataaataaaagataagagcccaaattaagagatttgactttgaccagaaattgttggttggtttctagggaacgaccaccgtggtccatcatgcatgtgacagcacgagcttggtcaagcaatacttgatggatgtccttttcgcactagtaacataattcttcatttgacatatttatagtcttcaataaacatatcatatgcgatccaatatattttcattttttcttgtacattcgtcttggtccaaaaatcacgagtttgattagttctttaaccccaaacttcacaaaatcatgtagttgtagacaccaagtttgattatatttgtcaattaataaaaaaaatgatttatacaatttgtttagaatctcgataaatacttgttcatcctactaccattccaaccaactttatataatagtagtaaaaattacgcatgcgctaagccaaatattggcatttagtagaataacagaaaaaaaataaataaaaatgtagattatggagctaaaacaacgtgcaatctctctccttatctagtctacgtatattgtcccgcacggtatataatcaatatggacccaaaaacgaatatattcatgttaatatcgatgccaacaaaataaattaataatactatgtatttggtgaaaagataaaatttattaaagagaaagaaacacagttattggtgtcgtggttgcagtaaaagaggtggtcagactcagagcaacttcttacaaagcaaccaaaggttatctgtactttctgtttctctctcactccttatttctgaaaaaaaaatctacagctaaatacctaaatctcaacttcacggaacaccgatacataaagacaatagagtggtaataatttgttgagaccaaaagtaattaaacacattacacatggggaaaaagaacggctcttcttcttggctcaccgctgtaaagcgagctttccgatctccgacgaagaaagatcatagtaatgacgtcgaagaagatgaagaaaaggtttcttattcttagatcttattatttgcttactatattcaaagtatgattattggttttcatttttctctgtttttttaaaaaaagaagagagagaagagacggtggtttagaaaaccggcgactcaagaatctccggtgaagtcttccggtatctctccaccagcacctcaggaagattcacttaacgtaaactcaaaaccctctccggagacagcaccgagttacgcaactacgacgccgccatccaacgccggtaaacccccgtccgccgtagtccccatcgccacgtcagcatctaagacactcgcaccgaggcggatttattacgcaagagaaaattacgctgctgttgtcatccagacttctttcagaggatatttggtgagcaattattaatgacctatatttttactttcatttttttaaccaacttgacttctagaccactttttagtgacaatgatgtgtgtctatgtctataaaattaacattgcttatacaagatctaccatttaaaagattgggatttcatttagataatttttttttgggtcttgatataagttttgttctttctaatttggtaaggcaagaagagcattaagagcattaaaagggttagtgaagctacaagcattggtgaggggacataatgtgagaaagcaagctaaaatgacattaaggtgtatgcaagctctggttcgagtccagtctcgtgtgcttgaccaacgcaaacgcttgtctcatgacggtagtcgcaaatccgcgttcagtgactctcacgctgtttttgaatctcgctatcttcaagatttgtcagatcgacaatccatggttagtatagcctcctaggccttgcctaaactatagcataatcaattgatatgttttttagttatagacatgttttgctttttagtttattcataaggttaagctgtttttagcatgcctatctagttcaaatggtgcattcacataggtgtgccttgattatttctttactcttaggtatacatattttgtatatttttcaatctttaagcaattctgtttttgttaattgtaaattgcgtttgtaatttcatatggtggctaacgtcttttggaattatggttatttatttgttgtagtcaagagaaggaagcagcgccgcggaagattgggatgaccgaccacacacgatagacgcagtgaaagtgatgctacaacggagacgggacacagcattgagacatgacaagactaatttgtcacaagctttctctcaaaaggtaaaattaattaaaccggcatatagtctgttatatatattgagcttgttgataacatcgtttcgtttcaatggaaagatgtggaggacggttggtaaccaatccacggaaggacaccacgaggtagaacttgaagaggaaaggccaaaatggcttgaccggtggatggctactagaccgtgggataaacgagctagtagtagagcttcggttgaccaaagggtttcagttaaaaccgttgaaatcgacacttctcagccttactcaagaacaggagcaggaagcccgagtcgtggccaaagacctagttccccatcaagaactagccaccattaccaatcccgcaataatttctcagccactccatctccggctaagtctagaccaatacttattcggtcagctagtccacggtgccagagagacccgagggaagaccgtgaccgagcagcttatagttatacatcaaacacaccaagcttgagatccaattatagtttcacagctaggagtggatgtagcattagtaccacaatggttaataatgcatcattgttgcctaattacatggcgagtacagagtcagctaaagcgaggatccggtctcatagtgcaccgaggcaacggccctcaactcccgagagggaccgtgcgggtttggtcaagaaacggctctcgtatccggtaccaccgccagcggagtatgaggacaataatagcttaaggagtccaagctttaagagtgtggctggttcacattttggtggaatgttagagcagcaatcgaattactcttcatgttgcactgagtctaacggtgttgagatctctccagcttctactagtgactttaggaattggcttagatgattggtggtgatgccaaatcaactgtcaagatctttcatcatcctccaggaaaagaacgttttaaaattttatattccagaagaaaacaaacacttttatattgtgtcgttgaggttgagttgtgtttggaagataagtttattgacctattgatctgtaacttcataagattttgaaacgttagaagattcaaaagaatgtttgttttgcattttttttaaaaaatattgcaaaagaatatatagattctattttagataactatcatcaaatagttttaaagaaaaaaacaaaaattctgtttcttgaatgaatgacttttagatcttatttttcgccttttgcaggattgaaaaatactaaaagataaaaagatttgaatcttgcactttagccccagaattaccgtttttgatgattttgatgcaaaagtgagactactaaacttttgagagtgagcttaaaaggtaaaaaagctgcaactttgctactcgaaacacgagcagaggacatcaccctatgtgacatgattccccaacaatacatcacaagtcttgtctcttgacgttcacactcaattccttatcactttcacctctgataaacatctattgttttctatacaaacttttttttttcttttggaataatagcatttgtaaattcaaattatatgatttatatctattagccatgaaaacacaaagtttgagatcctttaagaaaaaaacagaaaatctgctaacaaatcaacaaaacttgagcaaagaaaataaaagaataaaaattaaacgtttctccaataagaaatgaaaagggagaaactccaaaacggcatgtagttagctgggggttgcgcgttctggccattatgaccatttatggcccatatttaaatgggctttcaggaaaacaacgttaatggacctagacagtgaacttatgggatttaaatgtgtgtatggtaagaagagttgaagggtggcgtcatatcatgtgaccccagcacaccgtaatggtcttctcatacggcccagtgggcattaaagagatttaccaaacactgaacagaaaaaaaacacaaggagctggcatggtgaagtactaatcagcctcctggaaaaagtggaaaacgtgttcatttattatgctgaaaggtctagtgcattgaagactactagtaaagatgctaatgatgggttaaaactcactgggtacccaaaacccacataaaattttaagcccataaatctactttttttagaaaaaaatacaggtttaaaatggactgggtacccaaataaataaaacccatatgggtttacctcattgggttatgggtacccacggttttttttttaagtcctttttcaggtgaatcaacattttcttgtcaaaaaagatttcacatttttctccataaaccgcgatttaacagtttaccgccaaaaaagacattcaacattttcctgccaaaaagatttcacattttcctgtcaaaaacgcaatttaacattttcccgccaaaaacgacattcaatattttcccgccaaaaagatttcacattttccactcaaaaacgcaatttaacattttcccgccaaaaatgatattcaacatttttccgccaaaaacacaatttaacattttcccgccaaaaacgacattcaacatttctggccaagaaaaagatttgacatttttcccgccaaaaaacgcaatttaacattttttctccaaaaaaacgcaatttaacattttcccgccaaaaacgcaattcaacctttttcccatcaaatatatatgtaatatagaaaataaatataatttaaaatatatttataaacaaaatatagatacaacatacatataatagtatattaacagttaaaaataaactctaagaaaacgataaaaaccaagttgggtacccacgagtagtctcggaataatcaggttttttcgggttttacccacttattcaaaaacccatctgggttttttaaagttggatttttggtggacgggtttattttgggttcaggtcgggctgagcttttttacccaccacaacatctctaactactacagacactgacaaatctgacttggctttttataaaacttaatgttttttgcatttttggttgttatatgttggcagcatgcagcagccaacgagttatgtgtagatgctggttcaaccaactcgacctatatgggttatagttatacgagttgttgaccgaatttatggttcaagactttcaagaaccaagagaaattgtaatggaattgtttgtatatattcttttattctttaaattgactttttttcatcacagattctctaattgactctcttcgttacttttacaaaggtaccagaagaaaaaaaacattttataatatgaggtcgaaatataacattttataatggtgaaaccttcagaagatgaaaaattcaaaataaaaacctatggaacagtagtggataacgtttggtccaaaaaaaaatcaaattgttgaatgaatgaataaatctacaccacaaattcgcagaaaaataaaaataaaaaggtgtatatcataaattaattggagccagcgtagactatatagtatttgttagtatgcaaggtttgctttatcatttatgggtgtgtcattcattcatgtgtgtgaacgcagacatagtggattagaattttgtttgacttgagttaaattttcaaattctggtttaccaaaagtatgaataatcaactaacgtataccaaacacacatccataaattaattaaattatatgattttcaatcgacaacttacatcaacaattaaaaaataaaatcaagaagaacacaattacatatatgattatccggttcaaccaatcattgcacaactttaaccggatattgatcaatcgaaccagcccaagcattaccggtcatctcctccgtcgaaaccggtcgtaacgctttccaaaccgcactattacacttgaaacccgatccaaacgcaatctgccaaagtcggtcaccagctttaacccgacccttagcttcggtataagccatctcataccaaagcgagctactcgaagtgttaccaaatctgtgcaaagtcattctagaaggttccatgtgccaatctttgagatcaagattcttctgcacttcgtctagaaccgctctacctcctgcgtgaatacagaaatgctcgaaagctagcttgaaatccggaatatacggtttaacttttaacttgaacatcttccttttgaccaaggaaatcaagaacatcaactgctctgacaatggaagaaccatcggtcctaaagtcgtgatgtttgttttcagagcgtctccggcgacagacatgagctctctagctaaagagacaccgattgttcctctctcgtcttccttctggtacacgcaattgtagttcttgtcgtctgatcctttatgtgttcgaacgacgttgaccagcgagtactttgacttcttccggtcttgacggcggttagagaggagaatcgcagctccgcccattcggaagatgcagttgcagaggagcattgaccggtcatttccgaagtaccagtttagggttatgttttccgtgcttaccacgacagcgtaagaattagggtttgctttgaggagattgttagcgagatcgattgagattaatccggcggagcaacccattcctccgaggttgtaacttttgatgtcttctctcatcttgtaatggttcacgatcatcgctgatagagacggcgtcggattgaataagctgcagtttactatcaagattccgacttcggccggtttaattccggttttctcgaagagggaatctaaggctccaaacataacggcttcagcttcggcacgtgcctctgacatatttagcttcgggggcgttgaagttatgccacgtggcagatacgtctcgtctcccaaaccggcccggttcgagattctttgctggaactgaaccgtgtcatcggtgaatgatccattttcctcagtcatcgtcaagaacgaatctactgatattttacgctcgtcttccggtttgtagcaggagaaatccactaggtaaaccggtttagaccggttagccacgtagagggtcaaaacgaaggagaggaaaaccaagcaggtaagtctcgtcgccgtgtcgagttgaaccgcctggttagaccaaagctcagagaacgtatcgaacgttagaccggttagctgaaccagcacggttccggttaaaggaagaataattaagaagaagagaatggtggtcacgttgcaagagttgtgaagtccaagcttcacgtatttgagcttaacggacgttaataaatccggcaaacgtcttcgaattcttataacggccgatgatgaatctcgaaacgccatctccgccgttaatctctctcgatccatctcaatgctgtttgttctctccatcagtatagttttgggtcgaaatatttcaaacgtaaatcaaggaaggattgaagataaaatgtaaaatctttaggcaaatttggagaaatagaaagagagagaaaatgagaatgggaattctaaaattggtgaattaggaggattttggtgaaatgagggcaagtagggatggagagatatatagagtgcaagaaagataaaaatattttaaagattaataatagtaatgacttaacaaaaaaaaaaaaaagatggaataatattcgaatttaatgatgggtggttccgagataatactattagctcaactacttatatgggaccttgatattaaattaagtagtcagattatttttcatgttttgttcacacgaaatgcaagttacaaaagtctaacaaaacctagctgaatctcataagtcatatggtagatcataaatttggtttatcttttttttcacacatatatttgggcatcataacattctattttggtgtaacctaattttttttttttttgaagtttttgataaacaacataacttgttaattataccactacaacacaacaaaatatgacatgtttgttatatatttccttataattaaacttaaacgttttagacatccatgatgtttttattagcaagtgtatgtaggttatccaaaattgagtgagggcaagttataaaattatatatcaattgaatattataagcaggttggctgcacgtagtgcaaatgcactgggtcagcgacgggtaagttgatataatatgttgtaaatagtaaatttaaagggagaacgtgttcgagaaacgtacctctcattcatgagaagcgttcactgtccaaattgcaagaacaagggtagacgaaagcgtgtcccaaatattcaaatttgttatttctttgtataaatgtgtatcccacatgcatacaaactccttaatatgggccatggtaaattgatgataatgaattactatgacttcttaatagcagcacatttcgatttgtttctccattatataccatccctattagctgttccagtattgtagtcattgtcatttataaatttgctgtcttcgttaagacgtttgttatataagggaccctttacataatgaatttatttcatattataaatctgataaagaagtaattagttttggagttgcatatctagttagttttcgagtatttttctagttatttcatattgattgtgccaaggtgtccaaaatagacctcggacgggtagttgtagcttgtagctttgtaggtaaataaaatgttcggatttgaggtcccaaagtggacttattgtccctgttttgttttcattgggataaagttgttggtaaaatgtaatgcttttaatagttaaatcatttctaatatcgtgattactgggaaataatagagaaaaagaaaacaaagacaaaaggcagcgacgtcgtttccataatatcgtgattactgcatgaaacacatgtttcaacagtacgcataccaactctcaaacttcaatattggaaagatccagttcatcagatgctaataattcatatatttaggtttatgtacagcataatgaacaatagagagaattaatcaataaacagatcaaagtattaatttgcaagataaatgaaataatgatgataataaatggtagactagtacccatgtgtagacataaaccaacaattaatgttggtcggcttaataccaactaactagaaaccagtccgtcatcaatgtatgaatgtacacactcacatcttgcaataattttaaaaaggactaacaatttaaatggttgctacataaataaacgatatagccttacataaaactagcgaaaaaggttgatattggctgtataacatgcacagtactaccaggctctaacatgcttcaaaataccgaatgattcattaaattgaaacattagagtaaacattttgtcgtggtcttgtatttgaatttcagtatataactgtatataatacaatattattgattttaatggtttttcaaacaatttttttttttaattactcgaattttttcttaatctcgaataagaaagattaatgctaatatatggaattataaatatttggtcacgattaatccgaatccaactacgaattcgatattgaaaatgtcaatatcatcatatcaccagataaataaattctgtcaattgtttctgttgccaaatcgtagtcatttgttttgaataaatctatggattaacaaatagcaacataatagcgacaaatgatcaagtctttttatccgccacaatttcattgctagttttgtcgtagacatggaccatctatatccatattcttggctatatatccagcattatgtattttgtagtaaaatcactacttgattggcaaattattaaccaatcccatttataacaaaacaaaactttatactcagaatatacttggttcgtagatttatagctaacataacttttttgcttctctctattattctatcattgtgtgtttccaaattgttgtcgatattgtgtcactgtaacgctttgccaaccgtagccataaagtgacaactttgtattcaactatactcaaatatcgaacttcccgagtatttttgactaattgaattgtttgaactttgactcataggtctgactaactcaaagtaagccaacccgagttttgaggatgatcgcatatggctattggctaacatatggatctaaatctgtagcaacttctaggtttggctttttgtaaagaatagttctattttgccaactccagcattttttgctattcattatacattcaactttagttaaaaactttgaattgaacaacttgctatttttttttttttttgcttttgttcttcaacggctgcatcagtattccagactacatcctccaatccagatgtttttgtagaactgcaaaagagatttaacttttaagcatagaaaaccgaattacaacaaataaaattagaggtaactgaaccggttggtaaagattaaaccgaaaatataccttgtgaaactcgagggtatcatcgccggttttcctaagctctaccacgtgcaacgatggtgccacttcaaacacctattataaccgataaccaaaccaaaataatcaggtaccggccgtattcatgaaaatctaaaaccgtactaaaccggaatgttatcattcctatctgtttttgttcataactctgtagctacagagtgctgacctttacgagttacgaccacttttgtctgcgaaatttacttaaacaatgtttaacaaagacacaacaacattaattgacacagagaaatcaagaagaagaagaagaagaagaagaacaaaccttgtagttgtcttgttgaaatcatgaatccttgattaaatttctataagaagaaaagtttcagtgagaagaagatcatagcaaagatgagaagagcaagtcaaagaagatattgggcttgttgtcttgtaataagtaattgggctaattgctatgttagtcccatataagtaaagtgttgtttaagtaagtcaagtctaggttagagtagttgttgttagagttccaatacaagtaggagggttgtgtaagagtgcctagaactaggagaagtagtacatgtatgtgttgtgttgtaagaaatcatcaatatcatgaatgtagtcttttattaaagagtaaaaacgagttcttgtgtttgtctctaaacaaaaacaaaacagagtgaaacaaagacagagatagagagaaagtgtagaaacacaacatgtgtttactgatattgaagccattcatcttctagtaactctgcaatacttatactctgcatttcagaaatactgtattactttattttgcttaaatttagaaataattctaagaagaatggttccgttctcacattgtattttcagataacatttttatcgaggatattaacaaaacacgctatcatataacactagtatggactcaaatttgtagttgtatcataagtcataacaaaaaaaaaacagcttaaacgaaaactaacgtcaatagcttttactgtatccaacaatatctcacactaaacctacaaaattctttttttttttttctctccgaagaatcttactcagagatttaagccgtgagttggccaaaacactagtgacatatattcacgttcaaaagtttatcttgcaaatcttggatttcttagtttcattatcagattaaaacagaatttcaataatgaggaaaaagcatacctactactagtctactactttctgcaacaacaaaacaaaaaaactaaaaccaagaaaagccccaaaagattaccacaaattaaggaaacttaaagcccattgatttcaacatctcaacagagctctgactttgattaaccttgttgtcttgttgaaccttgtcaccggagtttccaaggagagcttcaattatttctttaaaaggaataatctcttctttctctttctctttctctttcttgttcttgttctttcttccgtctactttccatttgccaccaccccattcatacgacggatccatccacggcggcaacaccctcctcgcagccacttctccggatgccgacgctgtttccttgtctgaaaccctagattcgatctctttcggttgattcgatctcgcgtaatcagattctggtgaagtgggaacagaaaccattacgattctttcttccggaggaggtgaatcccaatcacccaaaatctctacactctctgaatctgaacgtttctccattcttaaaaactttggaatgcgaaatttgcgactttatgggctttacgggctgtttgatttgaaagattagacaactcacacaacttattgggcaattaacgttggtctgctcaacaccaactcctcactagaaaccactccgtcatcaatgtgtgactgtacatcaaaataaaactttttttttttggttgcaaacgtagatctatgtagctaagataacctctctttaataattctatcattgtgttttccaaattgttatatatgttgtgtcattgtaacgcgttgccataaagcgacaacatcgttgcaactttcaactatactcaaatagccagcttgcagagtattttttgcctaattgaattgtttgaactttgatttataggtttcaaaccgagtttgaggatgatcacatatgtggctattgactaacctatggtgatctacctctatagaccacttctagttctagtttggctcttttgtcagcaatacttgtatattgccaactccagaatgtttactattcattatacatgttcaacattgattaaaaactttgaattgaacaacttgttatttcttattgcttttgttcttcagcggctgcatcagtattccagactacatcctttaatccagatgagaagtttttgtagaactgcaaaagagattcaaacataaaaccaatttaaacactaaactagagatgttaaccggatcaaaaccgaaccggtttttgatgaagatcaaaccgaatcacataccttgtgaaactcgagggtatcaccaccggttttcctaagctctaccacatgcaatgatggcgccacttcaaacacctattaaaccgattaccaaaccataacaattagataacgatattcatcaaaatccaaaaaccgaactgaaccggagtatttttttctttcttacctctgtagctacggagagctgacctttacgaccacttttgtctcctttcatttttatctgcgaagtttacttaaacaatgtttaacgaagctacaaagacattagttgacacaaacaaaatcaagaagaagaagaagaagaagaacagaccttgtagttgtctttacggacattaaagcctaatggctttgcggtttcttccattttcgacattatttcactcgcagatcgttgagaagtaaaccgcgtttctttcttcacaagttgctgcaaacaacaacaaatcagatttagttagataaaacctatgcatgattttagaaaatcaagacaaactgtaagtagaaaaaagttcttaccgcttgcttctcgaacaagttttcaagactgaactcgcttgagctagagataagttcgaaagcgttcatggatacaggtttctccttcttctcagttacaagacattcctagagtagcagcacaaaaagagtgatattagttggtaacaatacattggtttacttaaaccgaactatgatatacacaaccagatggagaatttggaaatggcggtgtttaccttggagttactaaaagcagcatcaacatcatctatggttatgtcctcgtcatcttggtcaaatgatggcggcttgtaccctttcttgaaccattcatcttcgagcaactctgcaatacttattctctgcatttcagaaataagtacatacttaagctcttgcacaatctatggttggcagcatgtcatgttcacattttcacaactattacttcatgtaagaggcacttacggtaatagggttgggttcgagaatacgcttgatgactctcttggcaccttgcgagaaccatggtgggcagctaaactcagccttgcatatctaaagtatatattaaacaccaaagatgagactagaaaagtactgcagaagatcaagaagcagagggagagataatttacacgtacacgtttgtataatgtcatgagattcggctcatcaaaaggcaagtaaccagccataagcacaaagagaatgacaccacaagaccagacatctgctgctgcaccgtcatagcctttgtccgacaaaacctgccagcaaatccaacacaatgcagtagacaacattaaaggcatatctcttatatacatcataaataaagaagattctgcaaatgaagtctatatatacgtatagcatttgttagatttccttcctttttaaaaacgtattagcagttcttgaattccttaaaatcttattttccaaagaggatctacagaacatttcatattctttgcctttttaagtgctgaaagttagtacataatacctcaggggcaacgtagtttggcgttccacaagctgtatgaagcaaaccatcttcctgcattcaaaagaacaatgcttagaacacttcattcaaattgatatcttggttatatatatcagaaattaattgccaagtgaaaaatataatggcattacccgaacttgtcgtgagaaggcgcttaacccaaaatcagagactttcaaaaccccatttgcgtcaaggatcagattttcaggctgcaacaaggaacagatgataacaaaagaaacttgaataagaactaagaagaatgaatatcgtaatcacaggaaacaagaagagtgcacaaaaacaaaagaaagaccttgagatctctgtggtagacacctcgactgtggcagtaatccacagcattgatgagctgctgaaaatatctccgagcttcatcctccttaagcctcccttgttgcgcctatgtatatgatttaaatccaagaattaacataagagtaagaagagagaaagacagagaacatatgtcaatatttgtgaagagaaaagagaggaagattctctaagttaggttacttacgattttatcaaagagttcacctccattgacaagctcaagaacgatatagatcttcgttttgctcgccataacctaccacagagagatgttttacacgctaagattcaaaacttaatttaaaaaatatctaaggaatgataactaattagtttcgtacctcaatgatttcaaccacatttggatgtttaatcagtttcattgtagatatttctcttttaagctgcacaacaacaaaaaaataaaactttatgatcattatatcttcgagatcttgctcataacttccaatcatacatatatagcatacaaaactaaatcttcaacagattcaaatcgaaccaaatcaaaaacaaagctactcgaacttcaaaaccatatccatatcatagttaatagttatcttgatcaatgcgtactaagatcagcatcgtgtagatatatacagaaacaaaaacattcatacaaaattcgatattttaaaatattattgttaacactttaatcaaacattaaccttaataaccgaacaccaacctaggaggacatgtgggtccctaatcacgaaattaaactgttctttatagtacttaaaaacaaacaaatccataatcattttacgtgatcaaaccaaacacaattaacgaacctgttcgaccattttgtgacggaagaccttttctcggtcgaggattttgatagcggcttgatctccggtgacggtgttcttggcgtatttcaccttagcgaagcttccttctccgagagttcgtcccatctcgtaattccctactcgcgtcctactcgccggcgtcgccttccttctgcttccactcattttctttttccgattaagaaaatcaacggctctagatcggcggcgaatctatcaatgtgattcttctccctcaatatctctccttcttctagtggctgcctggttttaaggctgacgagagaaagtggacgagcgagagatttaataggcgcgactgggagtcacgcgcgtattgtgggtcccgtatgccacgtaatgtcaaaaatcattattttgctctgttccgcgtcagtcccgtgttatttgtacttgtgtacgttcgtaacgttcattcttcattcatataaaaaaattccataattttgttcttgtgtggtaactatatacagaaactcctgtttaagtatatggattttatgaaaattttggggttttaaatttatgtggatatggttttatttgtaagggatgtgatttgatgtccttaatctttatgtgtatatgagtatatctttcagtgattcattccattctactgatgttcaaagttgactgttatcatattatttgatatagttgtattcttttcatgtagaaatattctctaaatataacttttttttttgtctttagttagaagttggaaactacctaagaacaataaatacatatatcaaatgttggtagttaaatgatgattgttatatcttggtcaaattttgtttaaatctatgataatattcgcatatacttacttttgtttaaatttgatgtagctgtttatttttgtttgtaacggttctaaatttgattatttaaagtatatgataataaataaatagataattgaaatagttgatctttccatgtgacgatgtgagtaaagggaacggtatgaatatgaaccccacatatccttcctgataaactcagagatttcacagaatgtgataatgtttttatttttcttctttcctttatttgtttctcttattttctttcatatgataatgccaaaatacgcagaaaaattaaaaaagtgtggcagacagtgtgagttgatgatttattgcatgactagtaataatgatacaataattttttagatatgttagtatattacgaacaaaagaaaatgcaaataatgcacaatgaaccactcgttccaataattgagtccggtacaaaaacatcacgtcaccatcatatgaaagcaattcatttggttatcaatttgaacttcttcattccacattttttttattttcctggttatgagttggaacttattggattatatggattaaaatttaaaacctatataaaccaaactattatttggtttgattttgtatttactttcggtttagcttggtttgtagatagttcgagtagaccgaacatccgagtcctacatatataagaaagattggcccattaaccaaatttaggcttgattgtgaattaacattagggcccaactaaaatacttttttttttttttgccatccaataacattattatcgcatatgttccgcatcatcgtttacacaaatgatcaaattgaccaagttaagtttcttttctctttttctacataatatttgttatttaaagcatttgtataaaattatatactgataagtgatggtatattcaataatttgtgtttgtctttttgtgatacaattaattatcctttatggttccatttttttttcgttgacaacgttgaacaaagatggtcaaggggcctaactgtttctcacacagtttcctttcagggtttagtatttgccgttttagtaacgaagttagagattcatacgtataattataaatagtagagtcgggtcagattgtgtttcttatctaattgttatatatataaaatttgataaagcatataatgtcttgaaagattcaatcgtgaaatatgtgtacaaatatgtaaaatctagttgcaccgcacggcacctttttttccttcctctcccacgtttattctcgcctcgtaacagaaattataacttggagtactattataaaatacctcaataattttagttctaaaaacatgtatatctaaatctaaaccattgtgtattttggagttgtaggagttttttttgtagtaatttagtaatacataacataaaatgtgtcttatgtttagatttgcctttcatacattgaccaacctaaatcggagtcggaccagctggaaactggtctaaatgtttaatcgagttttaggtaccctatctaaaacccaaacacaaactcagttttgctcataaataatctctaaaaaccaaacacatttcgttagaaaaacgactaaaaaccgagtttaattgaaatatactttctaaaccgacctacacgaaccggaacccgactgcatatatacttacttactcatacactctaacaatatagaatctattattgtcatccatcttttctttcacttcacctaactcccagtaaattaattaataaaaaggcgaatcataacttgtttagatcctcttgcaaatgaaccacgaaagcagcatgaacacgaatatgaagaagaggacaaggaaggagaagaagagtacgtcgtcaatggtgttcttgtattcgatgattgtgaatatatgtggaggattgtttctaagttattggctttacaaataccatcccacaaattctaatctttggatggttcctgttggactcatcttcttcatcactcctgcgtttctttccctctccattttgatctccgatctctgcgacgacgatgatgatgtcaatctcgacctcaaccaaatcaagataattctataaaagttttgactacttcaagtgttgtcgtttatttggtattaattattattaacctccgtacaaatggaagacttgtggttttattgttaagtttgtagattttttcacctttgtttccgaaacatttggtacttgtgcgacaagttatctccccatagtcttaaaagattaacctatttttaagttcttcaaaattatatccataattcccatatgattctctttttctcaatcctctgttttgtttaaagaagggtacaaaacaaaagactaacagagtgggacggctactacaaaagacacgttatcttctcttaatatcaacataagggatacaaagcgaacatcatctataaggactactgttaccaaaagatctacacggaggaatccgaaactgcgattacaaggaaggactaacatcaaagtcgtcacactactatactgccaattcaaaaggtcactaggatttgtcttaatgtttttgatatcaaatgcgtcatttaatacttctaaggattttatggtgaaaggaatcacatacgcaccatatttctccatttgtccttaagatcggaggaattacgagttgtgtggaatataccttttcccatctccaaaatcttcttccaaggcatgtttttgttgattgtatcagaaaatttctccactccctcctatccaaaataaacatatactataagtttaagctaaaagtgtatttcaagaaaaaagtgtggtggttttaccctcaacatcttctcttcgttgactgtccatagtaccctttttggctgatcattaacaacagcataagcttctccgcaagatttctccatatcaatgaattgatctgttgactcgtctaactgggaatttcgagccttaaggtgcttgaccagttcttgtaattgatgaaggttctcatgtagttgcattggtagtgaattatcagaaccattctctagttgactgttttctctcgtcatgactatatctccactcctcagctcactacatccatattgaacaagggtcttcgcagctgcaacaccccttgttctcaaagccgtggatctagtagcttgctccttaaaccaacaatagggacagtaaaaggttgcaggatcttcacaatcaagctcaacacacttcctgtgaacagcgagagggcattcattcccagaacaaggtactacaccatcgtctgcaatatcgcatacaatacatgcgtgttcgttcaacggctcaaagcttctgaaagtgtcacttgtcccaaggtagtggcgcttcttaagaggcacattatcataagtgaaaatgtttggagcagagttgacgtcctcatcaccaccatcatcacactgaacaatacaatgagcaatgcgcttttctctcacaaagccaatttcttcaacaatttcacctatctaagatagagaagaagataaatccaagtaagagtgtttacacaaaattgaactaaatcgaccaatttaaggttatctaagaccaattaagacataatttgttctaattacacagtaaaaaatatcaaattgttctctaacgtatcacaagcgacatccgagtaaagactaaaattcgagaaaaaataaattaaaggtttcttctaaaaggggtgcttacataaggactcttgaggagagcgatatcatcttcatcaagcgggagatcactcaccattttttttcagattccgagtgaagatttgagaaattcgaagggtttacgtgagatttcttaacgaataagaaaaagaagctactgtatgttaccgtttggtctctctgtaagtgtgtctgaggtttcgaaatttcgaatttaggcgaagaaggaagaaactgactcaatgtagtactttgcaatgtaactttctcgatggtccatgggccttagaaccgtcttaggcccaaatatgtccttttttcccattggcccaaatatatccaaaactttctaatttggttagaggttgctcgttgctgtattaattaatgttttatgttttcgtttagagttttgtaaagacaaattagagagagagagagagagacagaggcatttttggtcataaaatccacacagaggtggttcgacatccaggtgaatccaagtaataaattgcaggattctctctctataatatatatagatatagcttgcaatcatttcctgcgtttggatcggtctgggttttgtcgagggttttttggggaagacgaaattagggtttagttggggcaaagtaagtagtaaagaagaagaagatgcagcagcagcagtctccgcaaatgtttccgatggttccgtcgattccccctgctaacaacatcactaccgaacagatccaaaaggttccttctttctcaccctatatctctccctctctcttaatttgttcaacactacttaggaggctcttagagcttttttgtactgacaaaatcattggcttctgagtgcaagtaatactcttttgactgtaattggtggcaattagggttttcatttgaatctttctcgttaattccacaacacttgagagtctgttgttggtgatgatgagaagagacagtttctaggactaggaaattagtagatgcttggtgggtcaggaaactttgaatccggttttcaagaatggacattgaagttagatgcttgcttgatgttgttgttttgtactttctcttggcttgatgtcttccatggtaagatgataggctgcatcgtcatttccttgtcattctctttcctttgcttaaacgcagtaccttgatgagaacaagaagctgattatggccatcatggaaaaccagaatctcggtaaacttgctgagtgcgcccagtaagtctcaccttttctatccatcttcttatgtctcttagatagtaatggaagcttagaattactattattaatggtgaggtttatatagttattctatcttttgctctgttatattttcaggtaccaagctcttctccagaagaacttgatgtatcttgctgcaattgctgatgctcaacccccaccacctacgccaggaccttcaccatctacagctgtcgctgcccaggttgtttgtgatgataaaactcaattgcgatctatcacagaaatttaatgttgtttgggggtttgcttactgttgggtatgatttctgttagatggcaacaccgcattctgggatgcaaccacctagctacttcatgcaacacccacaagcatcccctgcagggattttcgctccaaggggtcctttacagtttggtagcccactccagtttcaggatccgcaacagcagcagcagatacatcagcaagctatgcaaggacacatggggattagaccaatgggtatgaccaacaacgggatgcagcatgcgatgcaacaaccagaaaccggtcttggaggaaacggtaactctctttacattattaagacaatactcaatctcataaattgtaacttgtatccattacttctttctttgctaacagtggggcttagaggaggaaagcaagatggagcagatggacaaggaaaagatgatggcaagtgaaaaggatccaaagaagctttgttttgttgatatttaggacttgtgagtctcgtaagggctttttgcaatagcttgtttgagttttttaacagaagatagactgtggagtagttccgcaaaccgtgttgtaatgtattgttatttagtacaagctcggatttagaaaacatcgtcatcgttcatcttattctgaaaatcaaagcattgaacttattattttctcattccggacgagtcttgacgatgaaattctgacggctaatgggattcataacaacgggaggaccagcggttcttggccatgcttggaatttctcatccgttgctgcccaccattctttgttagagacagttcctggagtagtccctgaaattttcacaagaagataaccattaagatcgtccctaacttgaaaacacacacaaaactagataaatcttgagcagaacttgcctccaaagatcttattatcagagataactttgtcgaagatgtatgagattccgaaagaaccgatgagagcaccgattatgtacttggctttacctcctgatgccattttcttctaaagctgaaagtgaaccattattacaacttaacactcaactcacaagaggagaagcaacaaagcttatgtaaggatttagtattaaggccaaaaaaacacagatcaaattcaattattgaagctttacttatcaagttatcatataaccaatgaagacggtaattcaaaagaaaaataaaagggtttgtagaataattgatacgtttacctttgccgattcagagacagtgaagcttaaacagtggactccagttccagaagaattcaacggtggaagacggtcgtccaactctatcgtcttatctctttaaaaactttggataaatctctgtgaaattaccaaaatgggcattgttttctgaaacgttaattactagttttattaagagacaaaactacaatcatcacaagggaagatataatagcaaatctactagtttgctgaatttcatcatacgtctagctcgagtaattgttataaccaaaacctgtaatatgctaatttgctagttgatatgaatttatttatttatcagtaaggaaaggtccaagtgtccaacattgttttcggcgtatgacacatactctattataagatgatctcggcgaatgccacatatattaaacactacactttaattcttgcagaattacgattcaaaactctttttttctttattctttcgaatcagtgctgcatttgacatgttcaaaacatgattctacttattattgactattgaggtcgtgtcgtgttataacatatgatttcgttggaaaactgtaaatacactaaagattagagattcgtagtttcatttattaataggtctaggggagttaaataagtttttgttttatatggtttttctaaactcataaaacccgaaatacagaatgaattaagtcaaggattaaagcaaatgattttgattgtaaatgactacatcacatgtagctttctagacacgtaaagtcaaataaatacaaataaattagatcacgacgtgagcaatttccttatccgactgtatttaaacgtctcaacaaactgacccgccaaaataatcataaataaatttccataattcgaattatataaacttaataacaaaaacaattatccttccttaatcctattttgtttttacttgattcttcattctcagaaatcttgaccatgaaggaggatcgtcgtcttcctcacaaacgcgacgccttccaattcttgaaaaccaaggctgcgtacgttatcgtcatagttctaacctacgcctttggttacttctccgcctaccactatcatcaaccgctgcagcagcagctgccaccgtctacgacagccgtggaaacgacaaaacctcaagtttgttcaatcgacaacttccgagttacgactccatgcggcaatcttgttccgccggaattgattcgccagactgttattgaccggatctttaacggaacttctccgtacatcgatttcccaccaccgcacgccaagaagtttctccggccaaaaagaatcaaaggttggggatcatacggggccgttttcgagaatctaatccgccgagtcaaacctaagacgatcgtcgaagtcgggagttttctcggcgcgtcggcgatacacatggcgaatctcacgcgccgacttgggctcgaggagactcagattctatgcgtcgacgacttccgtggctggcccggttttcgagaccggtttaaggacatggctttggttaacggtgacgttctgcttatgtaccagtttatgcaaaacgtggttatctcggatttttccggttcgatattgccggttcctttctcgaccggttcggctttggagaagctgtgtgagtggggagtgacggcggacctggtggagatagacgcgggtcacgattttaattcggcatgggcggatataaaccgggcggttcggatactccgacccggcggtgttatatttggtcacgattatttcacggcggcggataatagaggagtgaggagagccgtgaatctgttcgcagagattaaccggttaaaggtcaaaaccgatggtcaacattgggttattgattcggtcaaagtaacctgattccctttttcccataaggaatgaaaaaattcgatgtataaataataagaaaatgtgtaatattgcatagtcaattcatattttttttccatcttttgaaaattaatggatttgaggtttttgattgtgtaatgagaaaaaatatttgattgatcaggtgaaacaaaaaaaacatcattttttttgtttttacttcaaattgatgaagtgttccatggaagtgtattttcagaatattatttttttctgtgaaaaaggtaattaataaagggacaagatttgcgatctcaaaaactgttgcgaagattaaagaggatgccaatcaatggttctttgctcaagttcttgagaatcaggatttggtgaatgagcaagctgttcacatttcggttaaggttaagtggtctcctcctccccatgattggttaaaatgcaatattagatcgtcatgggatagatttggtgagattggaggtgctgcgcgggtttttgagagatgaacacggtaaggtcctaattcatgctagaagatcttttgcatctgttcatagcaagcttgatgctacttttctttgttggcaatgggccatggagagtatgaaaagtctcagagttgataaaatcatctttgcctctgaagacaatgatctaattggagctgttacgcgactgccgtcttggccttcgtataaatttcagattcactttttgttgggagaattaagtaattttttggattggaattgtgtggtgaagtaagaagctctaatcttggagctcatcttattgccaagagcgtgacaatggaggatcgccgccaatcgtatgtagcaaccgggtttcctttttggctgaaacatctttttgagaaagaaagaagtattgcttagtgtaatactcattgtggttgatctagaatgattgtccttgatcctaactttttgtatatttggttacagtcttgaatataaaatatatctttcagtgaaaaaaaaaaaaaaaagcacaacctctaagcaaagcagaattacaattaaacataattgggcctaatacgagattgtaagacagatgggccattgaagaagtcacattgcaaagtcagtcttatttagaaacgaacgataacggaagcttctctataatcttggggtactttaggaatttcgtctgccatattgatcccatttcatttatttttgtccccgtttccgttacaaagatttccttttatttgtttccattcaatattgtttgtgtctttgtgatacatagtgagacgtgtttataaccccagagagacctaatcgatcgaaattccctcaatttgaagatcgttagtttgttatctctttctcttctaattctttttttacttagatgatcttgatttccactcttcaaatcaagtaatctagtcgagtgtttgtgtgtgtgttcgatttctgaagaaaaacaacaaaattgaattcgttgtttggggggataacgatgatcagaaagctaaaagggaaggctctctgatttcaaaaggtatctttctttctttatttgtttcagttgtaaattacttccaaaagattccgaatctagtttctctcttccttatgtagtagatttgccatcatatcttctccggcttttcgccgttgtcgtgaacacaattacattccgctctcaccgccacaacaagaataaagcccataacgataattatcttacattccgcatacaacacaattatacaatctattggccacgtcattttctatcctatattttcagttattctttttttaatattttttagctctaaacataaatagattttcaaagttttttatcgtttttattttcaaattcctataatcgtttttgttttatttagatttattttatttttaattatatttttatatactactattaaaacgtattataaggttttttataagtgctaaaatttttaatttttttaaactaatcagatacaatatccaaaatactaaaaagtgtctctatctttttctattcaaaatattgagttgtctttgacaatattttaaactagttgtaaatcacagagataaacaccacataaatcaataaataactgtaatctttaccttgaagattttattcatatgaaatatcttatagaaaatacttcgttagcttgaaaatgcatatttagtttaaatacaaataaacgaaacaaaaagcaaaaagcatagacggatccgtaaatctactcttaagaagccatgcaagaaagattcaaagtcatcacaaaaaccaagcttttgtaatttgcgcaagtaattaacaaaaaaaaatgtaacaataaatggtgatcagaggcaataacatgttgggggggatgaagcctggtccgaggatactctctatgatcacttgaatcattaacatacacatgtatatatctataatatcctcgatccagacaacattcccctcaactgaaatagcttaaccctcatgataatcgatcttagcagattcacaaatttttgttgtagagagtgatagaggagagagagagagaggttggtgaatggtgatgatggtgttatgatgagggaatgatgagtggcggagacgaagatgggcttttaataagacacaacagaaacaggtcgtcattcctaaaccctagctttttcaaaaatatattttatttattataatatcaatgacgcagttactgcttatattttcgaatgaggtgacacgtcatacgtttaacttggcaagaaaaaaattgattttgattatgatttgtaactaatccacgaatcggtaagaaaatctacaaaatcttcattaatttgaaacagcttctggtctaattttctattttatttcagcaacttgtggtctaattagactatgaaaccttcacgcataactttctggtgatccaaaaataaaatcaatttgtattttctatataaattatatacgtcaatacgtgcatatatatatatatgagagagtctagtctattattgaattgcgaaataaagaaggcaatagaagttagtcagaagagtggttgggtaaattgaggatgaccatttaggaaacaaatattttcaatttaattttgcatcgctttttaggtatcctaccaacttcattaattataaacatcttttctctcaaattgtaaatttttgatatttatatgaaaccacaggctgccaaaaacataaatacatatgaaaccacgcatacacatatacattcgagtcttcatctttaattatgtctacggatttgtaattatttcaaattcataaacaaaaattttaaatttaataggatggattgatgacattaacaatcatttcttgttcaggcaagtgatttaaattgatgaccgtcaatttttcttttctgcaaagaaaaactgaaaatatcattttttagtagtattagctagtttagtatatatcatatacggcttaaatatatgtcggagataataagtagagataggtttaagcttagctagttggaagttttcggggagttgtttacaacgtgaagccatgttgttgtttctttctggcgtggggaattttttttcacttaaaagattattgtattctccagtttcattagtttattagtactgattaaaccagagttatctatgtactaaacattatgtgccttaagggatcttgtgaaacagatgatttttttttcttaaactcacattcatcgatatcaaggcatgaaacagatgatttaatcaattttatataatgaagcataaatattgtgattactgacaaacggagaagacgatgctccggatttgaaccatgtttgtttcaatctcaaccatgtttttggttcaaaattttatcattaatggtttaaatacttggtcgcccttacattatatgactatcgacaatatttagtagatttgttgttatttacgttctgagacatattatatgagtatttatttatatgaaggatacaggtctggctactacatctacgtagcattgtaattaggaacgtaataaatacaaaggactgtcaagttcttaggcatgtttgtctcgtagctcttcaccataatggcatccatttttaaatgatactactccatgcattgatgcttgataattttcaacattattattttgatgtataattatcaaaagtgtcaatattcgatatagttttatttatttttgggattgattcttgttctcagttatacaattttgttgatagctcgtcctttttaaatataaaattggtccctcgccaaagaacatttaagcaaaacaaaacttaactactgtagttatcttaatacttaattacatcatgtaggtaataaataactaatttttccttcgaatattacattattttccttctttttattttatgtgaatataatgaataatatcaatagcttactatagaaaactatagcatatatatatagactcaccatgacaccatgtatatttcacatcacgggaaattgtattttgatttgacttttcgatacatcttataaatttgactgaaacagtttgaccaacagatgtattatataaaaaagtttttttttggggtataatttgtggtggtatacaaaggttattactgcctgcttcatgattattgatcgactcaatgacaattatgtgaaaagctaaactgattgagcaagatttaaacataaattcatatacatgaatcgatattattcagccatgaatattttatgtacaatgaaatccccacttaaaactatacgcatcacataaagtaacaagagagtacaaatgagactattgcaaatagttatgcattttttctgtttcatgttaataaggtgtaacatatttcactgttatctatttcattttccagcatgccacgtctaaattcggatttttaaaataaaaaatggttaaaattatgatataatatatttcaaatagtacccctcgtagccttacctcatttaaaagtttcactgctatctcacaatttctttgtcctttatgccatacttgcaagtttgttattatcagttgtctatagcctttgtttttccaaacaaacaaaaaaaaaacttatgctcgtttgaatatcgtccttagctttaagctacgaccgcaatcttagtgtttagttgccaccgttgagtttgcaatgttgaacacactaccgattataagccagaggaagatgtggatgccgtcaagtcagtgtttgtaggttggttgtacctgtactattgttatcttcgtgtgctatatgatatcgctttaggattggttcacacttcacatgtaaataacaaatgggcgtaacccatattcatgctttaatatcatatacagcccaattaatattgattcctttcatattttcaaacccagttacaacttgggctcattaccaccaaaaagtttcatatgcatttccatttttatttttccaatttatcgaatgtatatgtaaagaacacttctacttaaaaatatatttaacgttaccataaaacaagattacaagttagtgacgtcatgttattgaacagtcagaaaccagtcagaaacactaaccaagtcgaacactccacgacgagatcgattaatatactacaattatacaaaaagctttaatcaaatacttcattctattatataaaaccgtgatgtcctttgaccgacttctttatgagaaatttcgtagcaaattaaggatgtccaaacaatttggagaagttatcgtcaacacgcaaaatatagtttaattcattttaggtaagtggaatgattcctaggataatagttaaaatcattttaagacaagtagaccttaagtaatcttatttcgaacattttaggacctttctaaacaatttacatcaattaaatttagtaagatagttttcttaattataaaacttatataacatttcccaaaaatatttgttcttagcctatcagaaattaattaaacattcgtccgaaaccatcatttacacaacatgattgaaccccaagctgaaacaaatgacacgattggttttagtcttttagagccgagtcatcgtacgatcaagcacatcatcgcaagctaataatttacaaagttaaatttaatcataaatatttgcttctatgtttttatcttttttgctatggaaccagttttatttttgtaaaacctaaccatttcacttgtgatgatttttacattttagcaaaaaaaaaacatgaaaactaaattcacgtaacaaacgatatatttatttcacacaagacatacattgatacattgatctcctaatgaataaaaggtgggcgaatctacttcgctaggatacattttttttttttccttttttcttgaaggtttatttaacattttttaattgccaacaatatttaaaacatccatgcactgacagtttacattatcttacgccttgagcttacgttaacgatgagtggacaagccatctcacacgagagcctcaaaacctccgagagatctggagggttagcttcgacgctaggaagccactcaaactcatgcaagagcgttgcaacccaaaacgacaccgttgtaagtcccaaattctttccagggcaaaccctcttacccgacccgaacggtgccaacctcagatccgacccgaaaacagagaactcagcttcaccctctttagccacgaacctctcaggcttaaactctaaaggatcctcccacacgtgtgggtcacgtgctatagcccacatgttgaccatcgcggtggtcccagccggcacgtgatatccatctacggaagtgtctgttatagacagtcgtgcccaagaaagcagtggacctggtggatgcagcctcaacacttctttgatcatagccgttagatacgtgagtgatggaaggtctgactcatccacggttcttgatctgccaacgactcggtcaagctcatcgtggaccgttaattgaactttgggatgcatcacaatcctcgctagcacccactcgaccaaaaccgcaacagtgtccgttcccctaaatatcatttcctaaacggaccaaaaaagttaatatcgtaagagaaatttttcttaatcatttccatgatttgatataaaaccaaacaattgttaatctattgtatacttaatacacttacttaattagtaaattttatggattcttcttagatgttatctagttgactaatgttgatattcatgatatacggattgaatagtgattaaaagacaaaacttacccaaagaacagcaaccatgtcggattctgataatttttctgaaccttgaagagaaagtaacatgtcaagaaagttacccgtggcagcacgttgttcatgtatgatacggctcaataacagatttactttcggtacgagctgcgagcacctaaaccggatttgttggaaatctaaaccggctaaccaaggaagatggtcggtccaatttaacgtacctagaagatcgtacccttcttcaaccaaaccctttaagcattcagattccaagttgttatttgactccaattcatactctctcccgaaaaccaaacccatcatgttacacaacgacgctgttttgagcaaatcacgcactgcacacgcggatttagggttacgtgcaaacgcattcaccatctgagtcgctatcacccgtctctgatcctccgattgtttgatttgcttcgggttaaaaagatggttcgagcctaaccgacgcagcgtacgccaataagtaccattgggagcaaatcccatggctcggttaaacatcaaaccgtaagcggtttcgtcaaccggtcggtcagcaaaaaccgaactgtttagtatctcctttgccacggcaggatgacacgtcaccaccaccttagtatcaccgaggctaaacgccatgagccgcttggcgttactcatctcagccacagacgctatgcgctgatgagccacgtggcttgacctaaggctcatgcttcccacaagtggaaaccctctaggaccgggaatgagattcttgtattttcggttgtaatcgagagaaataaaccggcgagtgaagaagtattttccccaagccggtccacccggagtagaccaaaatacgatggttatggtaaaccaagtgatagcaatggcgacgagaagggaagcaaaatgttgttgcatgtaaatattgaattttgatgcaagagcaaatacccacaaactttctatttcggttctcatgttcaaagagaacattatggataggataaatgttcttcttcttctttttttgtttgtgattttgtttttccgtttataggttgtgatttatgtttgggtctttgtgaggctttaaataggcgtacgaactatgaaggtcttagccaattgcaaaacagagaatacttgaaattataaatactttatttcaaagtcatctgttggtgctcatgggtatatgctaataagttatgacatgtttggtacactcaaattactatatcccctacatagaattttaatctaaataaacacaagtattgaagattatacttgcatatgtccgatatatacgtcagttctgaataattgtctgctatcgtcccctttttaatttattttaactatttcttatacattcatgagtattctatttctacaagtttttttctaaggaaacgcatacgtatacaatttacgtataaaatagtacggtttataaatcatgatttttttattatcataatgtgaagtaaaagtgagtatatatgcatcttaataaagtaatttgcgtatctaaacgtagtgcttaattaacaaaaacaatataaaataacatgtatacgtaattactattattttcaaagatgccaattttctgatgagtctcattgcaagttgggaacagtgaacgtacgactattctcctgcttgcttaccatttgactttttctattgttagtcaacgacctttccttttaatcatctacttttttatatactttccaacttacatatgtatgcgctttttcattccaaacaatataaatagattaattagaagaaaatttataacatgtaaatttcgttgtaaataacagatagctactaatctgtaactatcaaggctaaatataatttttatagctatctcctgcaaaaattgtcacctctttagtaaaatatatagatcgtcgaagtgtttaagacaccagcaaaatttatcataacattgtggccctgaatccaaatttcttcttatagtatttgtttaattcagttaatacatatacttatcttaactcgatcctatcgtttattgaaaatatataaaagttcaaaggagtaatttacattgttcttatataagaatctttcttttgctaatatacataaactaattagtaactttacacataatacagaggtatcagcatagaaaactaagtagtcacaaagcacttggtggccgattaatcatatgtgcttagatacaatgtaaatattaatgtgtgatgttttatatatctgattatataatatactctcctttttaggtcataagaggaaaagcgagtttgtgattggagcacttcaaatgattcggttgcatgcaaaaataaatagaatcatatcttccattagatttggattatattccagattctaacgtgacactcacaattgatgtcacgaaatatctacttaatgaacttattgtggttctgatcatttcactatcctaatctttgaaaacaaatctccatcatttcactaccatatagtttagactttttttttaaaaaattccttgctagaaatattgataaaactctagtttttacttaacattttgattgaatagaagaaactccttggaacttgacagaataaaagaattgttttttctttacatatacaagaatgtcaaagagattacgagtgacacatgaatagctttttgattttactataagcaccacctctaattctctaaacatgaaaaacccaaacaaagatccgagtcatatatgggcttaaagaaaggcccaataattggcttttgattttatggcctatcactcaaaatttcaacacgagcacg

SEQ ID NO: 2 - DNA, 106973 bp, Arabidopsis thaliana
aagcttgctgctgcaatttgggactgtatctcaaaatataaagccattcccaacttcccccagaccgaaacatgtgagctgctcattgtggatagatcagtggatcaggttttaaggctcatctactacatttactcctcaagtccatattgatagtttatttctctaaacgattgaggtgtaactgtagatcgctcctatcatacacgaatggacctatgatgctatgtgccatgatttgcttgacatggaggggaataaacatgtcattgaggtaattctatttttctttcttatccttcaacttttttccgtttctgaaaggccccgatccggactgcctaaagtccggtcgagagaagtcctagccaacgatcctattgaggatcgcgggcgttacagtttctctcttcctaatctctctaccatatgctaggttcccagtaaaactggtgggcctccggagaaaaaggagatagtgcttgaagatcatgatccagtgtggcttgagcttcgacacacacatatagcagatgtataacacaattatatacatcatcttttcactgaatagctcaccatgttgacaccatcatttttggtttataaataggctagcgagcgtttgcatgagaaaatgaccaactttgcttcaaaaaacaaagccgcacaaatgagatcaaggtcagcgctaagaacttatctttctgtcttcataaccgagtgcttagacaatggaacagttgcctaagtttgatatctggaagactttaagtttcttgttatcctcgatatggattcgtgatccctcacagacttttttgatatgtattgctaacatctttggctaatgtgacgcagggacggtagcgagttgtctacacgagatctacagaaaatagttcaggctttgccgcaatatggagaacaagttgacaaactctccactcatgtagaggtttgtctcaccattaaattatctcaaaattcaatgttagatgtggttgctgacagttttttttttttactttataatcaaattcagctagctggaaaaattaatagaataatcagagacacaggacttcgggatcttgggcagctggaacaagatcttgtttttggagatgcaggtgccaaggacgttatcaactttctgaggacgaatcaggtgaataagtttgaaacatgacaaaaaaaacttgatagccgcattgatttagtgtttgaaatgacacatcatgtatttaaaatgcaggacacaaacccggaaaacaaattacggcttttgatgatttatgcaacagtgtaccccgagaagtttgaaggtgacaagggtgtgaagctaatgcaggtagcttttcgtgtgatagagaccccttgtaatgcatggaacaacttgctaaacaaatactgcatttatgttatcagcttgctagattatcacctgtggatatgaaggttataagcaacatgcaattgatagctggatccccagaaaacaaagctaagtccggtagtttctccctcaaatttgacgctggaaaggtaacagattcagtttaattatgaaaaatcaacactagttaccgagaataagaagaagaatctgacggatatgtatactcttttgctatagacaaaacaagcaaacaggaaagatcgatctggtgaagaagaaacatggcaactgttccggttttatcccatgatcgaggtagatgaacaccccggcttataagctacatatccactatgtaaacatgaagtggctgagatacatctttgttatgttgcaggagctgcttgagaaactcgtgaaaggcgatctatctaaaagcgactatctatgtatgaaccaatcaagtcataaggaggagagtgaagcaagaacaggatctgtcaggaagagttctgctcctacagcggttccagagagaaaagccacccctcattctatgagatcaagacgaactgcaacttgggcgcgtcctcattcttctgacgatggatattccaggcattctattttacataatgatttcttattttttggtccatttgagaggagcttggattttttctaagagtagttcatatctttcttcacacccagtgactcagtgttgaaaagtgcttctacggagttcaagaagctggggcaacgcatctttgtattcataattggtggggcaactcgatccgaggtatacattcaaacaaatccgaccttaaatgaatgctatatatgtttctttttgtcaaagcttgtgtcaacattggcataactttttgacagctccgagtttgccacaagttgacaagcagtttgaggagagaagtggtactaggctccactagtttcgatgatcccccacagtacatcacggtaacacaacatatcccttttaagagttgctgattgctaaatacaaaaaaaaataccatggaacctcaaagactggtgactgatttaaattcttaatccaactgtgttttaaatgttgtcgcagaagctgaaattgctgtcggaaaaagacatacaaggggctcctgctcagcccttcaaaccacaatactggtgaatttgacacagcttgagtctcaaaaatgtatttaggagaagtaaaaaaaaaggctaataattttgcaattgaaagaagagtggataagtaaaccttgtccagagacaagacttgggatcaggttagtagaaacgttatggtgaagacttattttttgttcttgcttctccttgaccccaaaccgtcgcctttcccttattttttttcttcatatgggtcatttggttcatactctatatacttttgtgtcacaatttaactctatatattagtctctacgtcgacttaatggaaaaagtgaagatgatagcttctaatttgctttatttatttataaacttttggctattattgattcttctgatgtaagttaattttaagtttcgagttatatagcaatcgttaagttggcaaaagattttaaccctcgagactttttggacaacaaaacgcaaatatgatagagcggaagctcattaaaaaatcgttttagagcaatgtcaccaaacaaagaaaatccatttcccaataaaaaaacaacgaatataaaattcgattatatatttaccatcaaccacttaacagaccacaaaatgaaggctgtttacggattcaacacagattaacgggtatgtatgtatgatctaggcaacggtggtggtgggaccaggataagcaggaagagtcatgatccgcttgtctacaactggacctcccacagtgaaatggtacagactctgaaagctagagtcattaatccccagaacctcgtgcactggatcatcgaaatagcacccaatcccggttgctgagatccccattgcgtgtgcttccaggtacaaaacttgtccaacaacacccgtctcccagaacagtcgagggtacatccatgagcccttctcccgcagtgctggttcaaaccgagctatcatgcctaagctgaagcatccatcccctgcaatgtcctgcatccatcaaccacaatgattcagtaaccaagtgaaatatattgttaattacaactctatccgactctgtacctgatgacatgatagcccttttgccagcctctggcaatcaccctcggcgagcttgtacagaggaagattgtccggacatccatctggtttagtccactcaaattcaggcctcgtagctgtcttgagatcactgagatgatcctcgtttctgactaggagatacagtcccttaggcaaacccgaaactctgtgaacaaacaaggcaagatgaacctcagcagtatcccaaggaagagctcgaaacggcagcgcaagttgctctttttgggactcgcctgtggaaggaagacagtgcatcagcatctggtaaaacgaagacatgtctatacaagtaacagcgtccatatcaacagcacttcttctcgtccttacaacttgcctcaccgttaacttattatatgaactgtggctaaacagagcacgactgcttgtgaaggaagcaacatcaattgaagaagaagaggtggagtagatcaatggaggcttttctacagccttggctgtcctgtagatgatatcccaacacaaatgctctttgctcagagtattggggtttccagtccattctaggcttgggaagtctctaagggcagagctaattgcgaggtagtctaagttgagatgttctctactagttccgttggggaaaacaaggagtaagcagtcaggatgctcgaattcaatctcagggagctcagctttacctttaccttcaggtaactgaaattcggggagacccataagcctcttgagatcatcagctccgaaagcgtcgagaagcttcaagtcccagcctaggtctgcggctgcaatggagagagcggcaatggcgtggccgacgtcgtggttacagtaacgaaacgctcgttctccgtacttccaagcttcacgccagaaaattgaagaaattccgatgagaaaagaattctccgggaagaagttggggaaaaaggaagaggggatgtgagctctaacctccaaagaatgctctttgggagcatagtgggagacgaaagcggattgggagagggaagggatgggaggagcaatgagataggcctcggtgggatgcaagttaccgctgctggggttgacgcggaggggccacgtggaggatccggtggtcttccaggcggagagagcgagagaatggtagaaaaggtgagagattgtaggaagagagatgggtttgggcggaggaagcgagtcgaatagagtagagtagagaggagagtcggagtcgtcgtcgatgtcgtgattggggtgttggagaggaagaagaggagcagagaggtaccggcggaagggattaggctgattggcccagtcgagaccacgaggacctctcgcgtaaccgttcaaggagtgcttcgtctggttgtggtacttgaggaccaattcaagcgaagaggaggaatcgtccttgttagggttttccacagaagaagaagaagaagaagaagaagaagaagaagagaaggtcatggcgaagataaaggcactttttggtgttcgaggaatggagagaagagaggtcgaagacgcgaacctccacgaaatcgtcggattcatcattgcttctcctttcctctgtctgggattcgacatctcaaaaccagaaaccaacggatctttgtaccgggacggttcagatatggatggaccggttaagggataaccaaaattgcctgtgatttctctctgtgacttggggaacaactccactgcaattacacctttgttttctttcctttttttaaagaagaagaagaaagtgcaatctaaaggcgtgactcgttagagcttttttgttgtccaaaagttacggtggtctctctgtctcttagtcggcaaaattccctctttaagagtatataagtaattttgggtattctttttttatttcattggcataacgaaacacacgacttgagcaacaacaaaccacgtcactcgatcacgctttcatgctttaccattttcccacacaaatcgactactatcacatgatttccctcattacctaactcacttgtgttctttgaccacatcaaaatttgtcctcaatacgtacacttggagaattttactacattacttggaatcaaaggtggtaattactatagtttgaccaatctgatcaagcattaaaaaaccgacgaggccatctcttcctcctccgatggcgctgggagatttagatctatcaagctaattattattcctgatcttctcgtgaattcattattagcggaagcgtgagatcttttgtgacctccgagagcttgaccagatgtgaagactttggcacagattggacattcatggtgactactagtactcttcttcttcttcttcttcaactcatctgagcctaattgatctgtttctgctatcttcttcttgtggcttgctctgtgtccccctaacgcctgatacgacttaaacactttctcgcaagtctcgcactcgaaccacttattcctcttcttcttccatctctcttcatcactttcctcttcctccttctcccacttgtctctcgacagcaacatgagactcaaggccacgtcttcttccgttgttgcagcgtccgacaccgaactcatcggttcctgctccgtacacgactcactgagttcttgaaccccgatcttgatatctgctgctcttgcggtttcacttttcccttcttcgttggattgttgatgacgtaatgatgagatggatctccggttaagtctggatcgtttgcgggagggcttcttggacgactcggtttcactctctctgtcctgaagaacaaaccctggatcagccatggaagacgaatatgactcgggctgactggggagagggtgaatgagcatgtgagacctcatgtgacctcccaaagcccttccattagcgaagctcttccaacataacttgcacttatgcctctcttccatttcctcaatttaccaaaacagagcagaaatagaagaaaaaggagagagagagagagggagaatataagaagaagaagaagaagaagtcggagtaggttacaagcactcttccaccaacacttaagctaatatacgaagtcccaacaacaagttaatgttttctttttaaggaaaagaattaatgggatacttaagaatatcaacgaaagcagtttactttcttttttaatatcagaaacggctaaataaaagacctgtctgttgtgtaaacataaatacaaataagcctctaaatatatataattatcagttatgtttttcttattttattgacagattgagccaaaaaaaaagaaaaaaaaaagagtattgaatgatgaagtgaagagccgttgatcaaacatgtaacatgcgatctcacacctttattcctccacgctgactttttttctcctctaatttttcaaatacactcttctactagcccaaaaatactagtatgtaaatagtaaatactagtatgtaactgaaaatttcaatactttgttgattagaaaagagtttgtggatgagggtattcattttggtaaagttgcaaacaaaaaccgttgaggttttgttgtaacgactaaacaacactagcactggcccctctatttctaactttaccaaattttaatgattctgtgacaaatacaccaactctccttaaatcataggttgacacgtgtgactaaactgctgacttcccgcatcgtatagttagtgctatctttgactctcatactcacacgcccttttggtgttgactcacctcttgtcatttatttggatgaaatttcaatataagaatctaaatttcattactctacaaatttctactaacaaaaatattttcccaagcatgtctaaataattttaaccttatctcgttgagacgttattacctcatactagaccaaaatttccttgtatcaatagcgtgcaactcttgtacgtgtctatatgtgtcaattgttgttaaagtacatgtcctcaagttaattgattaaagatcttttgagtggcccaaagagtcatatactttgcttgagcttttctcaaagagaaattggaggatatcagttgacattaatcaaattccccccgctaatcctagttttcagctgatggttggtgggcttcctaaagtcaaaagttcataacttgtaatggcaaccactcattaataacatatatgcgagataaaaatgactcttttcttgtaatcgtattgagagaaatgaccctttccttgcaatcggtgcttaattaagaaccaccaaaattatcaattccgttgaggcgttgactcatgttcatgtgttttcagtgtagtaagagccttttgattattaacatgattaaaatatatatgggcatatcacgagagttatttgatacgtgatattcgtttatttatttgatatttttcttctttgtgatttcttaatttcgaatttacaatttcttttctggaaaacttcaaaattatatctccttcttgatggcttaacaagtaaattatatcactctgtaagattacaaacatgaaattaaaacatttgcgcttatatgagcaaggagcccttggttatcttactttattctcaacgtatataataataaaaaatgatacaattatctatcttgtatattaactagttgtgaaacttaatttcttacttatatctttgtatatattggactagaactccttatggctctctaaatctgcagaagacgccaagtgtaattcatataaatccataaactctatatataaactcatgcacttaattgtatatatgtaaagaatataaacgaatgaaagttaaaagaatataattagcaacttaattaaattagtcagtcgtcaagaccaatcaccacttgcgagttttaaccacgaagatgaagtagcgttgtgattattgccaccaccatctctctcgatcatccctacgctcatggccgttggatcgacggaatattcttggcaagctaagttgagatcgagagatggttgatctaacggctgcggtctgccgacggaatgatgatgatcgtggagcgacgtcatacgaagataattggaaggtgttagccaatggcatcgcttgtggcctcctaaggcctgtcccgaagagaagacgcgatggcagatggtgcattcgtgagcgttggatctctttcttgcgatatgagccgttgatttgtcttcctcatcctcctcctcatcttcgtcctcgtcgttgtcgtcgtcgtcttctttgtattcctcttcctcttcctcttctttatcttgagaggcaaaacaacccttcactttcttgtggcttgccctgtgtccacccaatgcctgatgcgacgtgaacaccttcttgcaagctttgcattggaaaacctgggcggttttttgctttttgacggttttgcccttaccatgtccatgttgtttatgctgatcaccaccatgcgcatcccctgaattggacaacaagacaagacagttggcaagctcttcgtcttcgtttggagacaagttaagatgatgatgctgagtggacatcgatctctccctcttccacggaggacgacgtgacatgttgtcctcatcgtgttgtccacgactgaacattacgaaatcaatgcatggtgagttcatggctccatgcatgtgtgtgttcaaagtgttttggtgtgaattaaaaagaagaaagcccttgtttttagtggaagtaacgggtttggtgtcttcttgttcatgtggttccaagtagctaagcacttgctttaacgacacgtggtgcaacttttgactttttccaacattcctagtcacatgcatctattctatatagatgttgtttaacaaataatactctcatttcatgcttacaatatgtttataacccaaatgtaaattataacaattaggaagaggtgaggctgcggatgagaaggccttcgaaggtgattccaggtccgaaagctaagccaagtccccactcttgtgctgcgtcacctttcttcttcagctcatctctcatatactccatcacatacagtatcgtgttgctgctcacgttcccgtaatccaccaacgcccttctgctgctctccagcttctctttctccagcttcagttttgtctccagacggttcagaatcgcaggtcctcctggatgaacagcccagaacatgtcattgaactccatcgactcatcgccagcctttcccatcagcttcttgcagaactcttctatgttctcctctatcttctgcgggaggtctcgtccaagcttgaagtttatgccttcctcagtcaacctcccctcgatcacgttctgtgtccccggcaagaactgctgaaccgcatagtgcagctccatgaaaggagcttcacactctctcgggtcagctccgatgatcacagcagctgcaccatctccaaacagagcagctccaactaggtcgtacggacgcgctttgtttggtggccgaaatccgagaatggtggtttcagaggttgtgagcagaacacggcttccggggttgttctcagcaatgtctttggccacacggaggccagtcacacctccgtagcatcccagaaaatacagcatcactctgttcacgtcattcctcaggcctagctttgctgagaggtaaaggtcaccaccgggtaaacggatctcgcttgaggaaacgtagacaatgtgagtgatgtcttccactggccttccccattccttgatgcaacctaaactggcttccaatgccatttccacaaccgcctcgtttgcaatttcaagtctttgcttgattgttggtgaaccctctgttgttagctcagggtatttagccagtatctctcgcgtcaacacagtgtatcgcgtcttcacggttgtcgttttgcctaaacaacagcacaaaacattagaaagctttcagcatttcacaagagagcatagctgtctgaaaaaaatataaagagactgaggcttacacaagtgttccagcttttctttgataaacgcgtcatcacatttggtgtctcgtagaaatccttccactagattctcctgaggaacgacttggcttgggaaggctttgccaagagcaagcagtgttgcctttccggcatttgcgacacgccttgtggatttgctgcttagcttctcaacaccattcatcctagaattcgacatttcttttcaagcgcagaaggaaaaaactcaattagatattgggaagaaagatggtggatgcagaatatcagcaaatggcaaaggattataaaggaagggttgagggttttcttggggagagtttggtgctgaagagtgaagatcatgtaaagagagaaacggttattttattagggtttggtgattctttggcctgtgttggttagaaatgcaaaaaacaccatgaaacctattttcccgggataagtaatataagcctaatctacttaggaaataggtaccatgaaggtgaaagttaggaacagagagttgcaacgtccatagagacctgtaacagacacgatgaatacaaacttgcttaattgctgagggccaaaaattttacaattgccaatggataattttagacacagaattgaaaacggaacaaagagagaggatcctgtttaccagaaaccagatgcacggtctatccttcattctaatacagagcaatcatctgattctctcaatgtagccatcctctttgacacaaactgaagttcttcccactttccagcagcctctaaggcattcctcaaaaccacgtggcagctaagctgttggtggtttcctagttctactaattcattgtacaaactaaacgcttcagagtgtctcttatgcttacagagtccttctatgaccgtgttgcatgtgtcgatatctaccatttgacttttttccagacaaaacagaacaagtgtatgtgcatcaagtagttttctattctcgcagaggtaaccaagtaattcctccatcttaaccaaatacccgttatcataaagcaacctaacaatcagaaatgccttctctttctgtgcactactaaaaagcaatctgacaacctgcgttgaaagatcaatgttctgtcttattcgtttttccaacattagcgttaccaagcagaaagactcgttagcaaatttccttttcgcaagttctgcaagtacagaatggaaagtggttgcaacaggaagataagagctccttagcatcctttgtagggtatcgtgagcaagaagagcttcacctatcttcaacagtccatcaatcaataactcgtaagtttcaagatcaggtacaaattcccgcctgagcattagaaccaacagctcataagcaggcttgaatttaccttctctgcagtgacccgttatcaaagtcttgtaagagggcggatcttgcactcctcttttcatcagctgcctgaaaactttctccgcttgttttgttttcccattggcacataagtattcaaacattgggttataagctgcagcgagaggcttgcattcatccttacctaacaatacttccttctcaaataactcattgaacaatgtctcagctctatcaaattcgtttctcatgcacagagtacgaatcaaaacactataagaagctgaatcaggatgcaacttcatattcagcatttcttggaacaccttcatcgctgcatccaaatgaccagcatcgcagtgggctttgatcaaaatattaaaagtgcaggcatctggagcgaaagtggtaaatgcgtcgttccctccaatcaagatatctttgatctcatcatatctgtgagcctcagagagccccttgatcagagtattgtaagtaacagcattgggtttcagccctctactcagcatgtcatgaaacacaagcactgcttcatcaatttcctgcttcatacaatagcctcgcaccagagtagtgtaactaacaacgttgggatgcacatcggttgctttcttcaacattccactcaaaacattatgtgcaatcttgaccttgccggctctgcataacccatcgatgatcgtgttatatgtaacaacgtcaggattgcaatgatacagctccatatccttaaaaatcctaaaggcttcatcgaccatggagttcttacaaaacccatttatcaatgtattgaaagtataggagtctggggtaaccccgtaggtacgacgcatttcgtcgaacaagtcatgggccattccagttctgccacgcttgagcaaaatggagagaagactgttgaaggtaagaacggaaggggagatgcccatctgcttcatggtctggaacagcttcactgactcctggaagagcccagcgttcccgtagctcctaatcaagctgttgaagtagcgatcctggagcttgacgcagccattagaccttctctcgatggagaacaagaaattgcgagccacattgagattgcgagctcgaccgaggaactctaacatgaggaagaaagactgctctttgtgagaaaaccccttgttggaaacccagtcaaagaaccggagaccatccgcagggaccttgatgagacgcagggtttggagaacggtggttctggagatggtttgggacggatgaagagatgatagtgaagactcgagttcgtccgaccacgggttagagttcacggcacgggccaaggacctggcgagttttgatttggtggacctttcttcattggtaactttggcggctcggagaactggttgagacttggagacaaacaaagcatggagtttaggtacagaagataccattgcagaagaaagttgccgcgaaatatggcggcacacgtccgccgctcctccaccccttccggcggaccaagagaacaaaccctttcttcttcattctataactctctaaggcccaatctaaatgggctcctctttgttctagataactttactttaggcccaattatagaggtggccccgacacaatattttgttttgttttaaactttaaaaaaaaaaggagaagaagcaacagcatataattaagtcctagctattaatcatcatccatagcatatcagtaagtttttgaagatagattgtttgattgcatacagattttaaaataatgttaaaccctgaagtaaacttgtaactgcaccaacacaagacgtggtgtatggatgatctactacattccgtttccctttcattgggaatcaatttgcggactagtttaaaacaatcgcatatgcataatacttgcgcagtaattagggaagaaaggaggtgggggtaatgagtgagaaagtgcaataagtgggtatctctcaaattaagagagagatgttgacaaggcaacaagtttggtgtaacattatcctcctccttttattttgcctttttctctatttttatatatatgcacagtcttttttactcttaataaaatacactgttaattcctcggataccaacggaatcggttgaataaattatggatgttacagtatacacactatgtagggacttcttaatttattttggtatagttagaaagatagcttatcgttagagcgattgagagcttttcattataattaggagttagtttactttaattgtgataactgccttagtagatacataagtacactatcaattgactactttgagtgaattaaaaaagcctcctaacagcgtactatatgtacatcagaataagttgtagtaggagcagcattcctattttcaatattgtacactgtattaaaacaaaaacaaaaaagtagaagacaggattatgcatataaatatatatcccagaaccaaatatgaaaatagaaaatttggttttcgggtttataatttgttttagaaaaaaaaaaaagagagagagagaggggcaaggataatagagacaggagtccgtacggtttcgggggtcaacgtcgatggcagcctttgagcacctaaaaataggggacccacgccattaccaattacaaaacctcactctctcgtctatgctcagctaaccctactctcttccctgtgctgccacgtgatcaccatccgattaatcgggaccgttcgattaagtagagatagcagcgcgtgaggtagagaaagaagagagagagagagttggcgaataatagtaatttgttgtttgggggtgagtgggtgtacgttagcaagatacgatcggtcattctgtcttccctaaaacgatcaacctccaacttgctacctatttacacttttgccatcctgtctttcgaaaccccaacaccgtttttgcctcttatctctctctcttttttggccttttcctccttttttttttgtggttaattgaaatagatattttatttctctctattcttaaaaaaaaccacgtataaacttgtaactgactacgatgatttatctcattctcatatcttatttatcgctagtaaaaaagaaaacaaatgtaagagagaggcccagcaggggaacagaagcgggtcccgacataattaaataagtgtagaacaaacgcgttttttactcttctttttccttaaccacacgatcaccaccaatactagctagacccttttctttctttttttttaaagtcctgcgggggctatatatgtatcatccatatatacaatacgctgttaaaaaataacatagtaagagtctgtctatacatacttgtgtgtttaatttgtttgtcaaacaaaagttcaattagaggctccatcaacagttgctaagtagtgagttacgttttttcgatattcaaattaatcctacgtaggtactactaagattacaaattagaaagctttgaaaaatactagtagtaaaaaggggcagatgattggtaaataataatttaaattgtttttagtaaaaaagggcacagacactcacacacacactgctttcacgacccatgtgagttttctttcttctccatcttcacttttttaagtagctagatgacaagacagacagctatctctcttttttttttacgaagaagaagatcaaaaaaaaaatgaattttaaaaagggacctttaagagagatggtgggagagagagcaatagagagagaaggaaatccacccccacaaatagaaagttagggtttattggaaaaaaagaaagagagtgtgtctctgtgtgtgattctaatagaggtgtagtacgtcgctttgctttcagtccattaaaaccattccataacctattccgcaccgacatgtctcctccccctttcctttattagcctctctctctctttttcactactccgtcttgattttataaacaaaagaaagaaagagagagagatcttcctcgggattgcaacatgttggactacgaatgggataatccttcctccatcgttctctccggagatgaaagaaacccggactctgacccgacccggtcatccttctcctttttcgaccccatctcccattacaacaacgaccaccgtcacatcaccatttctcctcccctcctctcttccttctctaaccaacaacaacagcatcacctcaccctctacggtcagaccaacagcaacaaccagtttcttcatcatcaccatcaccaccactccttgtacgggtccaccaccaccaccactccttacggcgcctccgatcccatctaccatccccactcttccgctccgccagcctccttgttctcctacgaccagacaggaccgggctcgggatccggatcttcctacaacttcctcatccccaagacagaagtggatttcacgtccaacaggatcgggctgaacctgggaggccgtacgtacttctcagcggcggacgacgacttcgtgagcaggctatacaggaggtctcgaccaggtgagtcagggatggcgaactcgctgagcacgccgcggtgccaagcagagggatgcaacgcggatctgagccacgcgaaacactaccacagaaggcacaaagtgtgcgaattccactcaaaagcatcgacggttgtagccgccggactaagccaaaggttttgccagcaatgcagcaggtttgtgccccctaaagttgccacctttgaccttttttaaataaataaaaaaatactatagctgtggggtttcggctatcttctcttctcttcgtccgtacatccttaatcttgttctatcttagtttttagatcttctttggatctccttttttttcattagttagttagcttccctttttgtttattaattaatttacaatcactgctaaaggatcgacacaatcattgagagggttcgtactgtgtggtgtgggggatcccgatatggctttctctcgtcctttccaaccaaatcattttagccctaactaaccaaccaaactcttatcactaattctccatctcatcatcatcatctgatttatacatatatatatcgaaataatcaatacaggttccatttgctgtcggaattcgacaacgggaaacggagctgccgtaagcgacttgctgaccataaccgccgccgccgtaaatgtcaccaatcagcctccgccacccaagacaccggcaccggcaagactactccaagtacgtacttaattctcttatcatatatatatatatatatatatcctctttcaaattaagataatctctagatatatgtgtgcatttaattaataaatgggaatatgtgatgatgatgatgaccagagtcaccgaacgattcgggtgttaaagcgtcatcgtcaccgtcgtccaacgcgccgcctacgatatcactggagtgcttccggcaaaggcagttccaaacgacagcgtcttcatccacgtcagcgtcttcgtcttcaaattcaatgtttttctccagcggatagttataagctttactcatatgatatattatgcttaaaatgagaaatcaaaggactcttcaatatcactagttaatgctagctgtctatcatctgaattagtcggtaatgtgtaacgttttatttcatgtctctcgtttcgtttgtcgttttcatattgtttttgacttagtagaggtttatttaattaaccaacaacatatcagatttctgattctattatcaatatctccttacaaaaataacaattttcaaaagatgtcttcaaaagaaaaaaagaaagaaattgaaagtgtgattgatatattattgctggtaaaagcaaagaccggggagagtactcgtgcatggtggttcgttcatcgtttattcatttcggggaactgaattattgactctctctctctctctctgtctgctgtctgatgctgagctgctggaattttcctataaaactacaagaaaccaatattttagaaagtgaccgatcaatgtacgtccacgtggttttaccgtcttttaaaaacaaaataatataaagaaatacagtagtattaggttgttgttgtcccccattttgaagctaaaaatcatacaatttttttgtcaaattaaatcagtatccccaccgagattaataatttgcactttgatcggttgtgatattagtaaatgcttgtctaccccacaacggatggatgatataggagacgttgacaaaattaagcgattttccaagctagtaccaagtagtagtatatatgctccgcgttacttgatttttgttacttgccaaaattcatgataaaacaattgctatgatgaaataaaaagagccgatctgagtattgtttgttgcatatgtatattcattcctccccttgctattgttatgccgtaagaactcaacgaggactttgccattggttcccctgattccagctgggtgggtccatcgttttgcacacgtgtcatatttgggttggattttttggcaaagtggttgggtctgcgagctaattttcatcagagcgctgcacccacacgtgatcattttctggcactaacctcccggtacggtgtggtggggatgcatcaaaataaaggcccaaatgcatggcccaaccatttataacactacacacactcgtatactatctatttattatcccttccttttcactaattaggccacggatcaaattgatgaatgatattccgaagactagggctctctgattatggaccgccccactcgcatctcctatgtagtttacgtattagtagatttatgtcaattatatgtgtatgcatatgtcgctgttacataaagtcctatgttttattatacaacctaagttatctaactctttgccgtgacagggatcggactgtccacattcatgtaatttattcatgtcccgccctatttatttttgttaattgaattgaaccaactcatttttatttctatatatccactaaataaataaaatgaacagacaagaaagaaaaagcgttgtggtgctgaaaagtcaatgattacagacaaatgtggaggagacttgtatcattttatttatcatccaaggactttgggaagagagtatccaaagtcttagcattatacaactgcttcaatcattacgtcaccacgtgtacgactatatattatcactttctcatttcatctcatgtgtatatctcaatcttattataagaatcacgacacaaaataaaaagtttagcaatagcctatatatacaagtaaaaaatgttctaacaaatgcaaagcatagtgttatgtagaaaagatgatcaaatcaatagtttgatgtgtccctcgaggacttgacttcagtaaaatatatgaattttattcagtctaatttttgtggatgttcgataacatttacatgcatttttaaaggaacgcctaaaaaaagattgttacaaaataaatgtgcaagcttttaagttgttacacctagtatttgcgagcattaaatccgtagtttcattataaaactatacatcaaataaccatagtatataacaatataatggtgatggatgatatactactttcttacattttaaaaattgattactatattatgctgagttggtggaataaacttttcaaaagataatattacataaggtgtatttaattttatgggacaatataagttacgttgatgcaaaaaaagttcttctaaacttgctgtgattatatgggccagtatcagtgttgaggaacccaaacaagttaattttcgagcccactatgatttaaatcccattgtttcttccctactaacttactacgaaatatatttttctgttggcatatcacatatgtatgtgaatggcctaatgggattatataactctttttgatgcccgttatggattccatttttcaagatcaaaaaaaaaaaaaaaaacggctgtgtcatttaattactggacaaggagctggctatttgtctgtattcataaacagtgtttgtatcattatttaacgaatattgtttccataagtacacacgaatatattcttatacatacgggatatttagacaggattggtacgattcgtagtcgatacaccatactaatttagaccgacccttattattattacatgtactaagtgcttctagtactagctagctattacccccacttcttcttttcattctagtatatgtttttccccaccgttcgtatttatatacaaaaaatatatatatataatattcctttggtccacatattaattcccgtatcaaattgtaaatcacgtacttgttgattttgtgaatgtacacgcgtacgcctccctaacatttgttgacaattagggtttgcggatatgtatcttgatttatacgattttacacgaatcacgatgacttccgattgtactcgcattattaatggtatttaacgacgaaacctaaaggaacccagacctatatttatatatacgtggatgttaagtttaataaagatctttacgaaaggttttaaagaaaaaggagtcttttacgcaaattgcagttattaatagcttatatggtgattaagaaaacacaagctcacgccaaacacacattcatttcatatatataaacacaaagtaaaaaggaaaaaaggatgaaaacaaacaacgacgttttcttttttaatttgctctctccgtagtctaattatacataatttaatcacacagtctcgaaagagtagtatgattatagtaagtcttctaatacctctcgtttaggtggaactaacacatgacatctttgagaagcttgtaccttcgtgtggccgtcttaggcgacgtaactccgcctccatctccagcaacgcccttggctacttgatcgtgacggttattgttatgcttgatccggtggccgggcgaatattccgatctgtttgagaagtcattttcatatttaaccgaagaagaaggcttctttgaagaagaaccgccatgtctagcaacgttgctcagcttccggtcgtcgctgcggcaccagtcgcaaatctcggtaggctccgcaaactggccgtagtagttgctacaataactatatatatatatacacacatatatgatcaattaagaaacccattaatagccgtgaatggtcactctgatatacatatgcatgaatgatgaaggaggactacttacgagtgttggaagcggcagcggcagtgaccgcagctgaagagcttgtcggagaaaccgacatcaccgcacatgcaacacactctctccatgatatatcttcacaatctttattatttatatatatcgacccttgtatatatatgttaggccgtgatgtttaaagtaattatacaactatgcgtgttagtaaaaatgtacaggtagactagagagtttgcttgccgtcgttttcacttttcggttttagagagaaagccaaccttaaaatggggagtttttcggaaatgactgttttctccttccttttgtgtttttcccctgtcttgtcattttctagttttttcactcttcgtgcacatatggtggatggatccttctccatgcctacggaaagcgcaatgcagtgacttgtggtcttttctttctttcaaattataggctttcaaataaaataaatgttgtatatcacgtatcatcaaattcattagaactcgatcgaccatcagtttttttaactttataacgatgttgacgtgacgaaacgcatgctgctgtgcgagtgagagagtgttaagcgatgtgaacaacagaacaaacagtttgcgacaataattaacaacaccaattttttcatccaacttagtagtagtgctgctttttctcccttttcacataaagcggaaaaaatatattgggattatctcttggtggtgatgtatagatcgcacactaacatgtaagttagtgggagttcaggcttgaagatctagttctttagcgagtcttcgttggtccggcggcttattatcaacgtacgtgtacatgatgagctctagctatagtagggtccaacttgtcgccaagactgattaattcgtcatatactagttaattactctaaacgtatagctaaagaagaacattatatatagaatattttgttaactatgatttgtttatggtgttagacatataagtttgtttaatgtaacttcaaattatgttgatggatagagatggatttaatgaggagggttaggttatatacaatttggtacccatttattgtttgctttcccaatatttattgcggtttgcatgttttataaaaactggttaatatatttttcgggagattaaatataaggaaactttgatgcgactcgacgactttgagtgtaaaattgattaaacgcaccagtcacatgatatggaggcaatcggaggggaaacaaaaccgacggcgatgtgaagttcccggtggtttcgctaacttggaacctaaacggtcggagagggatccacgtggcagaattcaggagatatttttggagtttggttggccatgttaagcacatgccctgtcttcttctccctatctctcatcctttgcgttgcttcctcttttcactgatactatattttttatttccacctatcagtcatttaccatgtacattagtacgcaacgcacaattcggtgccaaattagagtttcagggtctcacctctctctaatctgtttgtataaactttgaatggagggagacttagaccatgtacatgggtgatatttttagagtatcatcagtttaaaaattatttttatattaaccaaacaattagaatgagcttgattagtatcattccaatgatttttttgatattactatcatttacgtggcatctcctgattggtcgcatttgtcaaaaataagaaaaaaatatttatctattaaacaaatattataaataatactaaaattttttaatgatagtttgttagtatcacctataaccatgctcttaataattaggatataaaacatgtgaatgagagaagtggaccctagtgatctttgtttgtagtggcctcaagattttactttagtcccaaattcggaggaaattatttttgttaattaatcatttattctttcttttgttctacctcattccaacttacaaattcagtatccaattcataagttgaaccaaaaggaaagacatcattcaacccaagattagaccaactgtctttcgtgacacacttgcaattaatatgattcttaaaaaatgttaatgattttgtttggaaccaaaagacaataagttagcagtcaaaaaagcagtaaatgtaattagaaagaagagacatggtaatataatagatattatggatggtgtgacgaataattgatctaataatcatttcagacaagtggacaaccctacctcctgagatgatctttttagcattctatgtatgtactggttaaaaaaaggtttcagaatcaaaatgatgatgatcgtatatttgaaaagaagccaatgatctctactttgaaagaagagaagatgaaaagaagccaattatgaagatgaagaaagggcataacagaagattgagtgttatcctttgttgaggagtgcccaacacaaattaaagaatgcttcttttcctttgttggatataatgtattcaaagacaattgaaaatccagacgagacgagtccacgaataatgtgggccttaaaaagagtcaggtaagggaaggcccaataacgaaaataatgggcttattattagcagcggcggtgagttattatatgtgtggaaagaagggccaaaatcacaactcacaacccccaaaacgcaaaaaacgcaaaatcgcagaaagaaactttgcaatcaaatctctctctcggatctctgagagagcgttctcgtaaatccctaactatagctactctcgtggatccaccgaaaaccctagaaggaagagcccctctcccgtcgtccctggcatttcggatctcggatttccttacctcatgactccctccaaggtcgccggtcatacccggttcttgctccacagctttcatgattccgatgtcgactccatcgccctccagctttctcaggtacttcgttttctgtctctcacttgccgtctagttcggagatcagcatacgaagaaatttggttgggtttctgattttttttaaaaaaaaatcaatttgggcagtttgttgattttggagtcgagactagtattccagttctcaagacctgcctggattgcttcaccgcccggagaagccatcctaattcgttgcagcttgagaaagttgtatccttgctctttaaacatgtgctcaagttgtcaaaccttgccaccctgcttcctcacgccctcaatgattttgagctcactcaagaatccgtggatgatttgactactactttgaatttttcaatctctgagaatattggctttgctctcgccctgaccgattttgaaagattagatgcaaagaccactggtaagactgtctcttactagttctctcatctctctttcgctttatctaccatttgatgacattttgctctttccttttctaggacggaacttactgttggctcagattgagcaactctgtgccaatactggccagattctttcatctgagctaatccattctgttctttcgtttctccgcaaatctgaggatctttccatgcatttggattccttcttacagtttttgtcttctgctcaacctagagatgacttctcttttgctctaacacctatgcttgctcaacaagttcatgaagctcctgttttcaggtgctgcttatgagttgctttcttctcttatcccttatgttccgaatgcgtttctcaacaaaattttcctcttctcctgcaggagcatggattttcacactgattctgctgataacgaccttgatgctatcttagctgaaatcgataaggaagtcagcgttggagatctcatgggagaattaggttgtggattcactgctgatgcccaacaatgcaaagaaatcttgtctagttttgctccactaggagaggctactatctcaagaattgttggcaatgtttctcggacctgtgctgatcttgaagataatcaaaccaccttttcaacgtttactgtagcccttggttcctgcattccaactgaacttcccacgccaaggtcgtggaatgttgatattctagttgacacaatcaagcagcttgtaagtcatctgaaactcttattactttgtctaatcaatatcgttgatagtttcaaaacttcagttagcctttttttgtgtgtatgtgtgtctcactagcatgcatgattatgtttcttttaccaatggagctgtgaagacgcatctagcttattgttaagtgttatgtggttcatgctcttaagattttatgctaaagcaggctcctggcataagctggaggaaagtaattgagaatctcgatcatgacggatttgacatccctaatatggagtctttctcattttttatgcggatctataaagctgcttgcaaggtgtgttctcatactctctaatttgactgtttaaaaatatgtttacttcattttgttgtttgagggtgttaatctgattcttgcaggagccatttcctcttgatgctgtatgtggttctgtctggaaaaatatggatggtcaattatcctttcttaagcacgcaatatctgctccaccagaagtattcacctttatgcattctccaaggaagctggtgagataccacacatctgtgcttagagctgttcttccttgtcccagtcactattctgaccagttgtatttcaggtatatattgataacatgcacagccaagagcaacagttaggactatccaatcatgcatggctgtcgctcgatctcttggatgtactgtgccaattggccgagagaggtcatgctgttttagttagttcgttactccagtatccactcacacagtgtcctagaaccttgcttcttggaatgacacacatcaaagtatttctcctcgactggtctttggtgatatatgcttgtaatcttgcttctttttgtttggctaagtatgtcaatcctcttattgcagactgcctataacctcatacagcgtgaagtggtttctgctattctgccagtgataataacgagtccccaggatagtggttttatccataatctctggcatcaaaatgcagaactcgttctgtgggggattatagatgcccaacatctcaaagcagacagcatgctccgaataattgaaatctgccatgagctaaaggtgaatagaaaaatgcgtggcagtggctcaaattatctcattatactgtttttctctttcttacagcagcctctctgtgtctatgtactaatcatggcttatttatttcagattctctctgttgtcttagaatcagttccagtctcatccagtatcagattggcagtccttgcctcattgagaggtcttttggacattgagaactggttgcctaactgcttgtatatgtataaggatctctttgctgaggtaacatatcgtttcacaatcatagttctatttctaattttctagagttgagaagatgctaatctaacatttttttttctttttctttttcatatttcaggagtgcctcaaatttgtcaaaaatgtgcattttagcgaatcagacgatttcagggccaaaatttttcatccttctgatccattatcagatcttcatttggaagcaacaacttcccttttaaaagttagttagtttccctttttggtttggttttcggctcgtccttaacttcatatctactgaattattttgtttgataatgtattaaaggttttgaaagctcatgataatgcgattacttcatctcaactggtcgaggagattgaaaaagtcaatgcagctattttggattgtaatcctaagctgcagaatggtgaggctaaagattcatcagctcccaatgcatatggagatgatgttgaggcagaggcaaacgcatattttcatcaaatgttttctagtcatttgagtgttgacgcaatggttcaaatgctttcccgatacaaggaatctttggttccaaggtttgatattgacaaactatacatatttgagaattttaatttttctcgtcatgtttgtcatgctcctcatgcataatgaaaataacgagattgttttttttttgggcagggaaaaattaatttttgaatgcatgattgctaatctgtttgaagaatatcggtttttccccaagtatcctgagagacagctgaaaatagcctccatactctttggtgagtaggatattttactttgatatagcgggtggtttttgttggggagggggagaccatcatatcttctatgctattgtgtagcccccaacatttcttactgtactatttgagcgtctcttcagatttgtattgttgtcgtgacattctcttgaatctactgcgacttatacaaatttcaggttctgttataaaacaccagcttataagttcgctcactctggggatggccctgcgtctagtgttggattctttgcgtaaacctgcagattcaaaagtatggattcttttgtaatttatttctgtctcccggcttttcctgtgagagatctgtcatcttctttctttcctgattcgtgcagatgtttctgtttggaagcaaagctctggaacagtttgtgaatcgtctggttgaattgcctcaatactgtaaccatattttgcaaatatctcatctgcgtagtactcacccggagttagtcactgttattgaacaagcactttcaaggatatcatctggtaatttagaatcagatgcctctgtttcacaccctggtccctcacaatctttccctggaaatggcgaggtaggatttggtttattagttttcttttgattgaatgttctaattgtctcaattttgatcaacaatctgtttcaaacatgagatcatatagctagagttatctattgaaaagggaaagaaaattgattgatcatttctgtttctagtgtcatgcctttcatttttagccctttagccataatggggaattactgtaagctgtaaatcggttttttggatttttatggtgagatgaaattaaaactctttttgtttccgttgacagttgagtggttctggaattggccaacctgcattacagctttcttctcccctacagcttcaacagaaaaatgaagtgccaagtgtgccatctaacgaggcaaagccacttctgccatcgttatcaactacttccgttgatgtttctgtcaatcctaaggtgatgaatttctcttgtttttcttttatagacgtgtgtggatggaagggttttcatttcatcttgctagttattcctgcagaatcctggcattccaacttcttcatcaacctcaactggttttgttcgtccagctcgtgcaaccacttcaacaagtaatctccagtcaacttagttttataactgttttttgaaatataatagggactatagttctttcctatcaagagaagaaatgttattaaaattcgattttcacagggtttggctcggctttgaacatagaaaccttggttgcagcagcagaaagaagggaaaacgcaatcgaggtactttactattttactactgtctatgcacattcagaattatttgcttttggttttacattgcataaggaattgtcagtatgccaaatgtctactttttagtataagtgacaataataatgtattttttttttccaggctccaccttcagatgttcaggacaaagtttcgttcataatcaataatatctctacaacaaacattgaatctaaagggaaagagtttgctgaaattttgccccaacagtattatccttggtttgcacagtacatggttatgaaaaggtactgatagttgtattcttcatgcaaggtttctttcttattttttccctccaagtgtgtaatacctgatagagcgatgtgtttaatacctgatagagcgagcatcgagccgaattttcatgatctgtacctgaagttcttggacaaagttgattccaagctgctgtttaaggagatacttcaaaatacttacgaaaattgcaaggttatttttcttcacacaagtgatttgcggtgataagtgtactttttttcagcaaatttttctcttcttaatttcttttgttttgcaggttcttttgggctcagagctcataaagtcgagttctgaagagcgttctcttcttaaaaatttaggcagttggcttggaaggttgaccattggaaggaattatgttttaagggcgcgagaaatagatccaaaatccttgattgtggaggtaattgctgctatttcctttaaattgatctcgttcatttgtaatacacagtcaaattgtagatatgaactttgttttcgcatcctttgacaggcctatgaaaaagggttgatgatagcagtcattccgttcacttcaaaggttggtgatggttgattggcgttcatagctgttctagggttgatttcctgagttctaatttactgtttattcaggttctggagccatgccaaaacagtattgcttatcaacctcccaatccttggacgatggctatactagggttgcttgctgagatctattcaatgccaaacctaaaaatgaatctgaagtttgacatagaggtatctgatagttcctattgagcatcacgagttattttacatcacttttatttgtgtattttatgtgttgttctcatttcgtctttctcttcaggttttattcaagaaccttggtgttgaaatgaaggaagtagtgccaacttcccttctaaaggatcggaagagagaaatagatggcaatcctgattttagtaacaaagatcctggagtaacacagatatctcagccacagatgattccagagcctaaaacaatttctcctcttaaacaaattgacctacctcttgatgttgcaaattcgcctaatacagatgttccctcgaagttattatcacaggttattttatgtgtagtcttttttttctctttctttaagctataatgtctgttttacttatcaatgataattatccccttggttttccttttcagtatgtagccccacaacgtgtttatactaatactttgatggatgaggagaaagtagcaactcttggcttgccagaacagctcccgtcacctcaaggactgttccagtcaactccatcgccattgttttctattagtcaggtacgattttcataggaatgtagattaaagttattatatagatgattgctcaaatcctttctacttttaatgtgatggccagcagctgtcagcagcacttcccaatattggaaatcatgttgttatcaatcagaaattaagcgcatttggtatgcactttccatttcaaaggtttgtgactaatggtctcctactggtgaaatcattatgattgtagagcattgaagctatattctattacacactaaactattatccattgtcagagtggtaccacttgccatggacagagctatcaaggagattgtgtctggtattgttcagcgaagtgtttgtattgcatgccaaacaacaaaggagcttgtgctaaaggttggccaatctaaacctttctgctttttttttttgttcttttcctttattacttttacgtaacttgttttttagtttcgtgcctcaaaattttccttaacccccattcgatttccattgcttttgactccacaactaaatttttttatttccatttatcacaaacatcttcagggttttgatcttatttatttatcgttaattgttgtttcttttttgactccaggattacgccctggaacccgatgagtcacgtatttataatgcagctcacttgatggttgcgagtttagctgggagtttggctcatgtgacttgcaaggtttttccttcttataaggccttggattctgaagattctttagctttttgtttacacatttacaataatgctattatatctcggccctgttaccctaaaccaacaagatctattttttctctggtttttaatgctcttgtatttttaggaacccctgcgcacttcaatatccggtcatctacggaattcgcttcagggtctgaatatttcaaatgatgctcttgaacaaattgtgcaacttgtcaccaatgacaacctggatttgggttgtgctgctattgaacaggctgctacagaaaaggtttgtgtcagatattagatctcggactttatttctgtttcagctgattgaatcaaataaccgaagtaggtttccctggagtgtaggcacttccgtttaccagagggttaatttcttctagttactaatttttatgtccgtgtcactacaggcaatacaaacaattgatgcggacattgctcaacaattgttgttacggagaaagcatagagatggtgctggatcctcctttttcgatccaaacattctatcacagaattccgtcagttttatacccgaatccctccgtccaaaacctggacacctctccctgtctcagcagagagtttatgaggtactgtttttaacaggtagcctctggtatgttctgtgtttgtatgactaaacaagatgtgtgcattttcaggactttgttcaacatccttggcaaaagcagtcgacccaaacttcacacggtttatctgctgcatcaagctcatctggtgatgttgcgcttggtagtggttatggtccagtatcaggaaaagttgcttctgaatttttgtctaatgctggaaacgctcggatggacatggtctcccggccatcagatatttctgtggatggttttgaatcttctccagtctcacttttgaggtgcttagttgtaaagcagatcgataaaactgctctcatttctattcgtatatttcacagctgaatgttgacatatcattttacctgtcttaaagctcacaagtcgatccagctggtgactcatccagtcttcaatttactaagtcactaccaacctctgaattgaatctggctgaatcctctgacgctgctacgaaagtgagatatactgtgttttcaaatgattactcgcttaggtttataatgaattactaagctgtgcttatttatatacaaggaaactggaacatcactgcagacattgacttcagctgctaccatggaacgacttggtgctagtaatattacacagccttcactgtccacgagagatgcactggataaatgtcaaattgttactcagaaggttactaaagtggttatcctgtgttttccttgctgcattttttttttgctgctttatatgtgagaaacttcttgaaactgtttcagatggaggaattagtggctaataatgcaggagatgatgaaatccaggtatttgatttcctagtgcctaggtggttatagtgcagaattgttatccatttacgtgcacctagaataaatgaaattagaagttaattttgaaaaccttctctaacttttggaaatggtttctgtgttttccaattgatgcctattttcttctatccagtatgaattcaataactaatgcagatctcattgatttttcaggccgtaatttctgaagttcctgaaatcatcctcagatgtataagcagagatgaagccgcttttgctgtcgctcaaaaagctttcaaggctctttacgagaatgcatcaagtaaccttcacgtcagtgctaacctagcaatacttgttgctatccgtgatgtttgcaagcgtgttgttaaagagctcactagttgggtatgtttacaaccttttcaagatttcacttcgctgatgtgctttgttcagttacttctccattaatttgtcactatttctgtcagaacacataggataacacatatcatataagtgctaggtcgagtctgtttcctgtagttggagcctatcctcaactggttatagatactagatttgtttctttggtatttttagttataattaattatctttcttcaaacttttgacacaggtgatttattcagaggaggatcggaagctcaacaaagatattactattggtcttatccagcgtgagttgcttagcctagcggagtacaatgtccacatggcgaagcatcttgatggagggagaaacagtatgctgaattgcttaacctttgttgatgtccttgtgtggtaacattctttttttgttttggctagtgaacttgttttaacaagttgtttgttacgcagagaccgcaactgactttgctatttctctactccaatccttggtcactgaggagtcgagtgtcatttcagagctccacagtcttgttgatgcgctggcaaaggttgcaattttaacattcttctgcgtttgttgttgcagtcgcatattcttgttctattatataaaaaaacagttaataggtgtgaaaacatacaactagggaagggataggttcaattttttttttttgtggttaaatctactgcataacactgtttatcatataatgccaactgacaagtattgtggttaggttcaaatattatgaaatttggcattgttatatttggtgacgctgcaatttgtattcttgttttggttgtagcttgcctcaaaatccggatcttctgagtcattgcaacagctaattgacatcatacgaaatccagttactaacacagctggcctctctgatagttcaaccggaaatgataacaacgataggcaaaaggatgagaaggtgtcagatgtcttcattaccgaatgttgcctgtaatcagactgtaaatgtatatttgacatgttagctttttcttaggttgcgtgcaacaccactaacacagaagagagtaccagcttggattatgtggaatcagatcctgcgggtttccagaatcgggtaattgtctgcatgttattagcgtttatgaacttctatattgatttagagctctaccttttcttttttaaaagttgattgggaattgcatatatctaaatttttcacttgcaaaagagtaaatcaaaagctaaaatgtttgtatcagcacaatgaatttgcaagctacaaaaaggatttcaaaacaaacgtttctatgaagctattttcgttcagtatgcatgtttttttccttatttttgtcttgtagatggattttaaattttcactttaattcgatgtatttagatacatgtgtttgtagtttgttatctcttcagttttatgtttgaacatacatctctcgtacttcttgtttatatcttgtttttgtcttcctctgtatggtttggcaggtgtccacgctatttaaaaactggtatcaaatctgcgaacttcctggtgcaaatgaaaccgcatgttcacaatatgtcctgcatttgcaccagactggattacttaagggagatgatacaacagagagttttttccgaattcttctggtgattttaccttttaagaatgttttagcatcagcactttcaaatcttgagaggcatcattattgattttggctttcctttctgtaggaactttctgttgctcattgtatatcttctgaagatattaattccggtgctgtgcaatctcctcagcaacctcagagtccatcattccttatcattgatatgtatgcaaagcttgttttttcaatattgaaggtagagtgctcatttttttttttgcattcttcgtggataattatacccaaaatacattgccggctaagctttttttgttttgtttgtttcttatgacaatctgttcagtatttccctgagcaggagtctagcagtaggttatttcttctttcagaggtaaggggacacatactcttattggaaataaatctaacttctactataatggatggaaaaggtgagtggtattgattacctgtttcagatcatggctgacacagtgagatttattcaaaaggacgcagaagataaaaagacatcactcaattctaaaccatatttccgattgttcatcaactggctactggacttgtgttccctggatcctgggacggatggtgcaaactttcaggtgcattttgttgtccttgaagtagctgctattaattgttatcactttaattaatcttttgttgcaggttctcacagcttttgccaacgccttccacgcattgcagcctcttaagattcctgctttcaggttaggacacaaacctatttctcaccgtgcttctattaaaacttaaaaatttgaatctctcaggaaatttgagggcagtcaaatacctatgttgtcaaacatttcatgttgttgacatatgtatcttcttttctttgatctgtgatccgtgttttatacattttttttcttctccactgaggtttttataaatttttccagttttgcatggctagaacttgtcagccacagaagcttcatgcccaaactacttacagtaaatggccagaagggttggccatatgttcagcgcctgctggtggacttgcttcagtttcttgagccatttttaagaaatgctgaactcggaggaccggtttgtgcctttttctcttctgtaattgttttgcattggacactaaaggatatagtcgatggtaacttaaagtggtctcttttttggtgtgtttattaattgcgtaggttcatttcctatacaaagggacattgagagtattactggttctgcttcatgatttcccagagttcctatgtgattatcattttactttctgtgatgtgattccttcaagttgcatacaaatgcggaatattatcctcagttcttttccacggaacatgaggcttcctgatccttctaccccaaatttaaaggtacgagatgatagtggagattccagcatgttcaacatattttaaagaaaatatattccttgtaggctgaattatcgtgttcattgcagattgatttgttacctgagatagtagaagctccctgtatcctttctgaggttgatgctgcgctaaaggcaaagcaaatgaagaatgacgtggatgagtatcttacggtaatgggaacacctgattcttcaatttacttatattcactttggtattcttgagattatatcaagagatactcatataatttttctgcagtcgaggcagcaaaattcaactttcctaagtgagttgaagacaaagttacttctatcgtccagcgaggctagttcagctggaacccgttacagtgtaccattgatcaactcgcttgtgctatatactggaatgcaggtatgggtctaatttctatacagccttttcttttgatttctagtttattatatatatatatatgcaaataaccgacattgcgataacaggctattcagcagcttcaggccggtgagacacaggctcaaaatgttgtggccttgcagatgttcaagtatttaagtatggaacttgatacggaagggcggtatctgttccttaatgcaatcgccaatcagcttcgataccccaacaaccacactcattacttttctttcatcatgctctatctattcttcgaatctgatcaggtgagtttgctttgcttgtcaagagttgtgtggaaaaattagtgagcatggaaatctgattttttttttctttttcttgggatgaatgaaacaggagatcatacaggagcaaataactagagtgctgttggaacggctaattgtgaacaggccacatccatggggacttctaatcacattcattgagctaataaagaacccaagatatagcttctggaaacaagccttcatcagatgtgcgcctgagattgagaagctgtttgaatcggtagccagatcctgtggtggcctgaagcctgtcgacgagggaatggtttcgggaggttgggtctcagacaattctcactagctctttagctttcaacttgtatatatgtatgcgtattttgatattatgttgtaacaattatacatacagtaggagagattttaggagtcttagtttatttatttaacttcaagattcacaaacatgttttctaattacaaaaaaaaaaaacactattattcctttatccttgctcttaagggtctgtttgagaattagttaggtgaaaacatgtttgagaaatcggcggggattgtgttttcatggtcataaaacatgaccataaacactgaaagagattatgattatgctgagggagtgtgagaaatcggcagggattgtcatcatatagtactagactactagtactttgtataacgttctcaggaacatgtttcggtcagaattccgatggtgggatctagtcgatgacgtaataaacaacactttcatgcccgcctaagaggcagctgtcgcagactaagcaggtttcaacatgtgaggggccaaggcgctggctagtggtcaaaagacggaacactgagaatatctgtatcattccatatgatccaagcgcctagctttgctcaagtgtcaagactattgattactgaatactaaattcaaagccatttttcttttaatgggcagagagacaccaaatttgctaatgagggaaatcaaacataacaaggggttattgtgagagagaacagaggatcttatacaagttgaaaatccgcaaccaaataatcataatctactctcggtaaatggaatgtcaatccgcactgaccatttgctctctcttgctcctctaccttgttacaggatgcctcctcctgcgttccaaagttgaatgtgtgtatgttatatcatctcctttgtacttatcatctcactcatatctaatattcgttacctctttggtcggatcccatcttcttcgtagtccatcactccacttggttccccaaacatctccttattccctctgatgtcaacatccccctgcccacaacgtaagtaagactatatcgaccaccacccttcccaatcatatttcagacacaaaaaaccaaacgaaccttgtttcatttcatttaacaatcagacaataaccaagtactaccattccaaacaattcatgtcctctaatgactttaacacttcactaacagccgttgtgattgcgttccttgtttgtttttaattaaagaaaacttcataatatatgtttacatccaacatgtaagatttcttgttccacgaaagaacggttaaaaaagcccgccacagttggctgatcgattcgtttgttattaagaaacataactttttaatctatgataggactggacttggaaagctcaaagacctagaaagatttttttatcaagtctctcccatccccgcttacatagacctaagctattaataagaagaaacccactacaattctctgaagaaatataagacagaatagctgactggactctaactcatggtcacaagacagtaaccaagaaagaatgtaaccaatattagttacataatatacttagtagggaaaagtgaagccaataggactccaagcgcgactgaccttcatggacagagacttcttcacttcttccaccccttcttctgcttccttacgatgttttttgtccatctcactcatattgtccgcccatttgatcttgtcttgaattgaaatgagcagattctctgacgtgttcaacctagacatcaatttgggccaacacataaaagagtaggacgtcattagccatgtattctaacatcacgtacaagttcttataattagatatagaaggcaaaaaatcctggatctaagggaagaagaaaactaccagttggacaatgtgtgtaacatattccctagttgacctggccttagatccctaccagctgcaaacggaacctgcatggttgcaagagatatatgatgtttagaagggggggctcgtacgtttagaaacaaagcacaatggttaaaataggaaaaggaggcccaaaccaaaacacacctcaaaacatctttttaactgatccagttttcccctaactataccctgcaaagtgtaaaagaaaaaaaatgagcaccatgcgttgtcacagttagttgtcaaatagagattagaagactgctaaagagtactcaccgcatacatgcattcattgataagaaagtcctcgagttcgcgaacattggaaacatctaactcgaccattagtgtatcatagggcaatacctataacaagcagagtgagagagacattcagttaggcaaacagcaggggaaaaagataatggaacagagtagatagcaggagcaaatcatgaacctaagacaaatataccttgttagactcagcaagggtgaggacagtgagctgcttaagcttaagaatttggtcaggggacaagtgcggaagacgggtggcattgcctagtgtttcgatgaaagcaagtcaagaggagagaatatgacaaaagggaaaacgaattgaaatagcatatgacaaaggggtcatacatttgtagtctccccaggtgccatgggcaaacaagcgtagtagatccaggtacacagaatctgtggttccttcaagctgcacaattacgattaatcagctactagtatctatcaagttgttatgatcagcgaagaacaaaagcatgtaaaaccctagatcgtgaaaagcataaagtagtagtacctgggcaacattgggtagagccaaaatctcggagaaggcgaagagagaaggatgcgatgtggcttcgatgatgagcgggcccagagcctcggatttgcaagtagaagctcgcttcacgagctgatcaatgatctcggcttgcttctgctcgatatccatcttccaaacaaatcgatttccggtggtttagggttttctttcttaccacactaataacgaataaaatcccaaacttcttctctctgctccttccttcttccgtttttatattactgttttttttatgtgaccgaccgaattcttctagaatcttgtttaataattgggctcaaatttcgtagtttctgggccaaggcctactaagagaaatattagaaaccgcgtctggtgagcccaaacaatcccggggaagagagagactattgaatattcttcttccttcattttggctgagagagcgacgacgatggcggaatctcgcagcaacagagcggcggttcaggctactaacgacgatgcatccgccagtaaattgtacgcctacctctttctctcttctttaattagggctcttcttttttttttgttgttgttgtggatctttgagcctagataatatttttaaaggtcttgtgtcaaaaagggatatatgaaagacgactatgttcatctctttgtgaaaagacctgttcgaagatctcccatcattaatcgaggttacttttcccgttgggctgccttccgaaagcttatgtctcagtttcttctaagcgggacaagttctaagaaacagatactgtctctcggagctggctttgatactacctattttcagttgctggtgcgtcttctttttcttctcctttttgttagcttttaccaaattcaccattcttcggcttattccagggatctctcgcttcttctcttctcattttgtaggatgaggggaatgggcccaatctctatgtggaacttgattttaaggaggtactactggatgagcgtgctgacaaaagtatccatcatgtgttttgagtctaatgcctaaatggatttgcttcttacgttaggtgactagcaagaaggctgctgttatacaaaactccagccaactcagggacaaactaggagccaatgcatctatttctattggtaagagccttttttccccccatgtattattatgtagaatgatccttttcattatgatgcatttcagcttgtgcactcatatttttcttcattccgcttctactagctactaactcaaccacccccttttactttgtaccgttagcgtctagtttcagttgcttactcttaactcgttgggctgtttatctctacagacgaaggacaagttctcagtgatcattacaagttacttccagttgacctgcgcgatataccaaaattaagagatgttatatcctttgcagatatggatctaaggtatccatgaataatttttatttattttacacactgttatcttgaaccttcaaccctcttcttctacccgggtttaagatatatggtaacagatacttactggtgatagacctacttgatccctaatatcattatcagtctgccgacgtttattattgcagaatgtgttttgatttatctggaccccgattcaagccgtgccatcgtcaattggtcgtcaaaaacgttttcaactgcagtatttttcttatatgagcaggttagctcaactgtgattttccttgtctgcataatattgcagatacgaatcttattgcttatgtgtctaacccgttgggtttctgtttgcagatccatccagatgatgcatttgggcatcaaatgattagaaatttggaggtaagaacgtgtactctactactctagttacagcgacatcttcattagtaaagcttttttgagatttttgtcaaaatatggatactagtatgacactaaaatattctagtattgccacatgggttcatgttgtactgatcaattaccttcatttaaacttgttctgaaagcttaacggtgtttctgttcttcagagtcggggatgtgcactcttaagcattgatgcatcaccaactttacttgcaaaggagagattgtttcttgataatggatggcaggttcgttttgcagttagaatattatgattaaagcagggctaactttcatgtataatttctgatataaggactctcatttctttaccctcttctttattctggtgtttcagagagctgttgcctgggacatgctaaaagtgtatggtagttttgttgatactcaagaaaaacgcaggtcagtactgtacgttttgttaaaactgtgtaagggcgttatgttattcatacctagtatctggctgaactctgtcaagaaatatctaaaaaatgctgttgcccgtgacttttgagctttccaatgttttttagatgaacctcttacagtcttactatatatatcctgttttttgttttttcttctctctcactctctctctcactatcctgttttggctctcttgtttcttcaattcatgagctttcattagaaagcctacttctcttggaatatatcttaaatgagaatgtcgtgtttctaggatcgagcgattggagttgtttgacgaatttgaagagtggcacatgatgcaggcaagtctgtctatacctcattaactagatgttgcacctctatgtatgtatgggaaagcataaaaagaccaaaagatgattggtgttgaatatcaacggtatccattatatatttttgatgatgcatgcgtcagatcttgttctagtgtgtaggtagttgagcattatttaaccgtttatattcaacaggaacattactgtgtcacatatgctgtcaatgatgcaatggtacgtacatgagtctctacaagtcattgtactttttagattctggaatgtttttttgattaaaaaaatgcagggaatatttggtgatttcggtttcacaagagaagggggcggtgaaagaatgagctcatcagcgtcatcaccttgaaaaggaggagggtttgtattgcattgaatccccggaacttgcaactggtacgttagttaatacagttggaggaaaacccctggtggtgggtagaatctgatagtgcttggtttacctaatttgtaaggaatgatgattgattgcacaaagttagaaaggcctttctctgggtgctgagcagaaaacgaaggaaacacgaacttgtctgcgttatctgtgcttttgatttagtttaggctcatggtcgagatatgtgggccgggcctccccttgttttatttttggttgtattttctaataattgtgcaaaacaaagaaacctcacctcggtcaagaaacgctctgaaatctgaactctgaaggttgtttttcttcttctttcggtggtgaaaaaattatctttatgaaaagacaaaaaagtttttgaaaaaaggaaatttttttcaaaaaaacagactgagagagagagagagagagtgtgttgttggccatgggatgcacggcctccaagctcgacagtgaggatgctgtccgtcgctgcaaggagcggcgccgtcttatgaaggacgccgtctacgctcgtcaccatctcgccgccgctcactctgactactgccgctcccttcgtctcactggctctgccctctcctccttcgccgccggcgagcccctctccgtctccgagaatactcccgctgtttttctccgcccttcctccagtcaggacgcgccacgtgtcccttcttcccattccccagaaccccctcctccgcccatccgcagcaagcctaagcctactaggcctaggaggcttccacacattctctccgactcctctccttcttcctctcctgccaccagtttctatcccactgctcaccagaactctacttactctcgctctccatctcaagcttcctctgtctggaactgggagaatttctaccctccctctccccccgactccgagtacttcgaacgcaaagctcgccagaaccacaagcaccgtcctccttccgactacgacgccgaaactgaaagatccgaccacgattactgccactcacggagagatgccgccgaggaagttcactgcagcgagtggggcgacgaccacgaccgtttcactgccacctcttcgtccgacggagatggggaggtcgaaactcacgtttccagatccggtattgaagaagagcctgtgaaacaaccacatcaagacccaaatggcaaagagcactctgaccatgttaccacttcttccgactgctacaagaccaaattggtggtaaggcacaagaatttgaaggagatccttgacgccgttcaagactacttcgacaaggctgcctccgctggggaccaggtctccgccatgcttgagatcggccgggctgagctcgaccgcagcttcagcaagctgaggagtaagtctcacactctactaactagatgtagatgatgatgcattgaaacccatctcattctcttactctctctatatttgttgtctgcagagacggtgtatcattcaagcagtgtgttcagcaacttgagcgcaagctggacctcaaaacccccattggcagtcaaatacaagctcgatgcatctaccctgaatgatgaacaaggcggcctcaagagcctctgctccactctagaccgactcctcgcttgggaaaagaagctttatgaggatgtcaaggtacattccctgtttttgttttcggttttcggcttaccaacggttacgaaataaacttgtgaattcgaatttaggcaagagaaggagttaagattgagcacgagaagaagctgtctgcgctgcagagtcaggagtataagggaggtgatgaatccaagctagacaagactaaaacttccataaccagactgcaatcactcatcattgtttcttcagaagctgttttaaccacgtctaatgccattctccgcctccgggacactgaccttgtccctcagcttgttgaactctgccacgggtcagtcttttttttgtagttgtgtttgtgtttcattgttccttgagggctgctggttcggtctaggcttgtttatatgcttctgcaaactcatgtgaacccgaattaggcatatgtaataccaaacccattgctgttctgccagtgggggattttataggtaagttcgaaataaaagtagggaggatttgtatgtgtctctaaccaccttgaaatgcagattaatgtacatgtggaagtcaatgcacgagtatcacgaaatccagaacaacatcgtgcaacaagtccgtggcctgatcaaccaaacagagagaggtgagtcaacatcagaggtacaccggcaggtgacgcgggacctagagtcagctgtgtccttgtggcattcgagcttctgtcgcatcattaaattccagagggagttcatatgctctctccacgcatggttcaagctgagcctggttcccctgagcaacggagacccaaagaaacagcggccagactcatttgccttgtgcgaggagtggaagcagagcctggaacgggtgcctgacacagtggcgtcagaagccataaagagctttgtaaacgtggtacatgtgatatcaataaagcaggcggaagaggtgaagatgaagaaacgcacggagagtgcaggaaaggagctggagaagaaagcatcctcactgaggagcatagagaggaagtactaccaggcatactcgacggttgggataggccctggaccggaggtgttggactcacgggacccgctatctgagaagaaatgtgagctggcggcatgtcagaggcaggtggaggatgaggtaatgaggcacgtgaaggctgtggaggtgacacgagctatgactctcaacaatctacaaaccggcctgcccaatgtattccaggccttgaccagcttctcatctctcttcactgaatctctccagactgtctgttctcgttcctactccatcaactgattatgtccaagtttctcatttatttttaagctctcattacgttggtatcatgtaaatttgaggattgattaaattgagtcttgtggttttgtgaggactcacaatctttctcatttaatacatgagcagacacggcacctaactaatggcccaaaggtggcccgccaaattgaatacaagggtaagaaatgggccaagaaagtgagagcccaaaagaggccgatcgttcgtttttgactcaatggccgttgacgttgacatcgtacgccgcacccaacgaccgccaaacagcaaacaacaacactttcccctttctctctctaaacatggcgatgctttctactgcttccgtttcggggagcgtcgaccttcctcgaggaaccatgaaggttgactcgtctgcgtctccggaggtcgtatccgatctcccaccatcttccccaaagggctcacctgatcgccatgacccttccacttcttctccgagccccagtcgtggtggtgacaatcaggtatctgatgaattctctctgcttcgatctattcgtttccttggtttatgacctggatttcttcttacttattctcctctagtctgaagtcatatccaagagtgaagagtatcggcaattgtttcggcttccagctgacgaagtaagtattgcctctctcgtcttgaaattccatcaatgagagaagtactgactccaccattgcttccgaattgtgtagatccttgttcaagattttaactgtgcttgtcaggagagtattcttatgcaggttaggtacttttatctttctctctttgcgaatacttaccttatcttttaatcatctttactttttgttgcagggtcatatgtacctcttcatccattatatctgcttttactccaacatctttggttatgagaccaaggtgccgccattgttgctctcctccactcacttttgtttcttccctttttcctcttcaatattgatcggaactctctttgcagaaaattatcccatttgctgaaatatcttgtgttaaacgagccaagactgctggtatttttcctaatgccattgagattttagctggagggaagaaggtaccactagttccctctttactcgatattggttggtgcgtctgtcctgatctttgaaccgcattctctcccagtacttttttgcatcgtttctttcccgcgatgaagctttcaagcttatccatgatggatggttggaatatggtagtgctgtcaaatcagaaggcgagattctggtgaccgaaccgcaggtgggtgcaacacacactcttattttactgcttaatccttgtttccttatctgagtccaaaatccaggtaagcgatggagttgttaaaagggcacgcagttccatggatttggccaatgaactagatattccagtaaggtgcgtttatctcttccatatggtgttccatctttctgtttcttactgctttatcgctcactatacttccttctcagggatgaaactcttcatctttccagcagttccagtcttcctgtcattagtcagaatggcgttccaccttcatccgttcagcggcacgctgaaccagatgtagatgttgtggcggccaatactttcaactggaagcctgaagatacagatgcacctaaatgtagttaaactccttcctcgcttttaccttagttctttttggttggtttgggtagtgtggtagattatctttttcaagtcaactgtttaaggatgtgaatgctagtgttttcagtaaattcaacgggtttttttttttttgctggggtcaggtcaacctgttggtaaagagtattaaaaatgcagacgcttgggtttctcctaactcctttaaagttcctttaaagtggacaatcagttaacttcttactgtttctaggtatatgtcattatgtgtctatcttttagcttgttttctttgcaatataaattgtttgaaatttaaatggtcaatgggaaacggtctcttaatggttttgctaaataaggcctatcaggatggggtagcttagctttatgatcttgtcttttggtgctacttcacaagttgcactagttctcagtttgtcccaacgagcttgcactcagtatggagatcctatattactgaaccggttatttcgtttttgcatacatgatctctcatctatttcttttggttatcgtgatctcttttcttgttctcatttgtattcaccacacaaatttgtgttccttgcacgcagtgtcatctgactttacaaaggtagcagaggcaaagttttcggtaatgtctcgttctttgtcttatcagctagaggaaattatggaaccattctcattcaaatttatgagaatataagcattgactggatgcagaagtttcatatacctaaatagactttagtttatatttgcagattccagtagaagagttctttagattgtttttttcagatggtgctgtcagttttgttgaatctttccataaaaattgtggagacaaaggtaaagctataagtgatggaatcattttgctcctgtgtttagctgttttctctctctttctcggtgttcttttaaccagaagagatatttgtacttgcagagtttaggtgtacctcttggcaacctcatgaaaagcttggacacacccgcaatgtctcatttcaacatccgataaaaatttattttggtaatattttttctttcctatagataaacagtactagattacggtttatatcaaatatatatttttttggtgtaattatataaaatagattacggtttatatcaaatatatgtatgcatgactctggctttcgtttaaaggtgcaaagtttggtggctgccaggagtcacagaaatttcggatgtacagaaataggtacagaaattttgtaatgttttttggttttattctatatcgtcaaagcaaagctagtctgaactcatgcatgcttatcctctgttagctaatattgtaatttcctatgctagccatctggttattgaaacatcacaggagatcagcgatgtgccttatgcagattattttacggtagaggtaggggaaatttacatcaaatgctatcaatattttgttgtttgatgtgtgttacatgtgaaaaattttacctttggctgatcccagggagtctgggacttgaaaagagattgcagagactcggtagaaggttgtatattggatgtttatgtcaatgtggccttctctaaaagaacagtgtggaaaggtttgttaagcctaatttactcttctttatccttgatttttttcactcttgcctcctatcaatgaagaaatttcaattaatagttcaagagtgtttgctgcggattctcgttcttatagatttggaaatctttcagctttgttgaatttgatggttcttgaatctggcttgacgtctatgaatttttacagggaaaatagtgcagtctactttagaagaatgtagagaagcttatgcacattggataagaatggtacttgatcaggggccattgggtcaacatttttttttttttagtttctgcaggaatttaaacaagtttatatatatttttcttcattattatctttggaggcacatgaactgttgaagcagaagaagctggagaaccaagaaggttagtgttgtagactgatgattaacagaagcttttccccgaagaaagctggctgacaccatattctacagggaataagttgattgaggatggtgaaccgctagcagcaagggaagaaagagtatctgaatgtgacgaggaggggaaggtggaaatggtgggcgaaggggtagttaaaaaaagcttaaaggaagcatgggtgaatctgacttcatttgtgaagaggcaaagcgggacaaggcaggttatagtattagcgtttgcagtaatcttactgatgcaggtatgtgtattttggataaattggtagtgaaagagagagagagggagatagagaaaaaaaaaagctaacaataggtggaagtgtggacaggtgacgatagtggtgctactgaaaaaaggaggaggggggcaagtggagtatcatgagaggtacgacgagtacagtgtaaacggggagactttggggtggttagagaagagaatgcatttcctgagggaagagatgatgatggttgaggatcgtttgcagaggatgcgacaagaccatgccgccttgaaggctcagttccaccatttggaacgcctcctccgccgcaacaaacagtaaatttgctacaccctactctctgtttgtgcagaatgcggatggatatatgcatgtatgtatgtaatgtattatcggacgttactttgcaaagttgttgttatacctacctactcatatgaatatgagcagagactctgttaaacgaaatgatgtaatcaattgtattcgtgttgcacctgtatcaaagattaaattcacactggtgactccactttctcgctattggattctctcaatgtctcaatcaaacaaacaaaagttgattctaatttaaattcccgagacgattatctttgttttcaatgatgatcacgtttgatataggaaaaaacaatttgtgggttttaaatcgagtcgtagaacattgttatgcaaagaaacccatagaaaaccactaaaggcagaaatgaaaaacaagaatgttggaaagatgaggacctcatcatgaggtaaagcaaataggaaacgtgaaaaacagaataataaccaaccaaaggagcttaattacagacaagacagatttggggggatgttgtgtaaaaaccaagtagtagtgaattggagcctagtcaaaagaaggaacacgtgttctaagattggaaaggatattgctaggctggtcacgtcaatcaagttgagcagcagccgttcttctgtgccacaggctgtcctctgatctgcacggtcggtggtcttgcattattcccagctggttggctagccattctgcatccaaaccacagagatcaatttctctcatatatcacacgaacgcacactctctgcaaattgattaagtacaactacttgaattttcaatttgaacactgcaaggtcaacatcagtcatttatttatttcactccaaggtcacttacacagtgacactttctgagatctatataaacacttacaaaaatgagattatggcttcgcaaaagttccatcaggtatgatgagtatattaaccgcagttacttaaaaagaacgatgtaagataaatacctctctttgatggatgcagacattgccatgaaagcctgttctacgtttgtagcatcttttgcactagtctccataaaaggaatcccgatttcatcggcaaaagcctatgaatgtttcgaagtaatcaggaaagtaataatagccttagagtttgatgattttcaaaacttgagaagaaagaattggttcaagtggcatatatataccttggcagtttcataaggaatggctctgttttcagtaagatcagacttgtttccaacaaggagtttgttgacattgtcactagcataacgatcaatttcactcaaccattgcttgacattattgaagctttcttcatctgtgacatcgtagacaatctaccaggtgcaagaactaaattaggacataaacttaaaggagtcaacagaaagaacctagataagatgttgcttacaataattccatgtgccccacggtagtaactgctagtaatagtcctgaaccgttcttgaccagcagtgtcccactgaaaataagtgaagagggaaaaatatgaattaagggaaagagacgtagagctattaacttgacaagtgtgaaaatagttacatacaatttggagcttaattgttttgccatcttgttccacagtcctaattttctgaacaagagatatataagaaaaaaaaaaaggtcagatcaaagcatcgtcatcagtagcaagaagaaaaaaaagaaaacatcaacttacaaaatcgactccaatagtgctaatgtaactttctacataagaatcatcctgcagcagaacaacaaacatgaacaaatgtagaaagctacagtgtttgatctctgagaaagaaaaagacaaaaaaaaaaacttacagagaatctcaaaagaagacaagacttgcctacgccagaatccccgataagcaggagcttgaaaagatagtcgctgcaaatcccaaaacgctaattaaaccctaggaaccacccggagaatcaaatatataacagaggtaatttcgacccaagtatgtgtcgatggagaaaggaacttactactcaggattcatggttttcgatctgtgggaggaagagcagcgagcgatacagagccagagatctctctctctcttttctgattttctctcgcgatttacaagaggaggagattcagtgtttgggccttgaataataatatgagcgaaggcccaataatgcaaaagattaaaattcattcttctttcacaagtttagggttcctacgatccactcagcaacgaaaatggatcaagcccgacagagtccagaggagcggaggcccaataacgccaagattaaaattcattcttctttcacaagtttagggttgtaaattggcccttcctacgatccactcagcaattggagattgttttgtggttcccagatgttggatctatactagtcttcttgattcatttttccaattgttgcttgctttttgattgacatctatattttaagttgggagatatactctaactctttctggaggaggaggttaaaacaaggtaaggcttggactcgggtcccatcttccagtagaagctctctctccagttgatgccttgtcgatttcagcaccgtctgccaaacaaacacaaatttacttacactcagtctctgaagactgagttgatctcttaaagtcaaagctatatggaggagaaaggctacgttaaaatccatgtaaaaaaaaaaaaaaaaaaatccatgtaggaatcccgcattgtgagccacttatcatccatcaccttgaacgcaatgcaatatcgaatatcaaatgcggactcgttttctaacaataaattatacaccatccaattgtcaatatatatggcttcgcgtttatctctcttaacccaaagctgctgtaactaactaactaaccagctactaatgtttccccgaccatcttaaaaggtaactaactaactagctgatgctagttggtgcctgagcaggggtgagatcaaaggaataacgagagtggtgatcccttttctgtgcacaaacacaagccagtccccgccctaaccatgcacctgatcctgccacaagatgaaatatgcatgtgactctctgcaacacactacaacaaggtaaaggagactagtgcgtgcttaacctgaggatgaatggcaggtgcgtcctctgtctaggctgtgagtaatccgcctgacactgacaaatgaatcctccattgttcttcccgattcataaaaagctactcttgatatcttcaatgcaaaaccagatttacgggttttggaggagcagtttgaatggtccgagggcgtttttttagaatggaaacaatcctaattatcgactaatccagctagtttttgatactttgtattttagatagatcacattccttagtttaaattggcttgagggaaaagaaacatgcatcatatgtagatgtacattagggagagtgaatgatttgtgataagaaaacagcaagtatatggtttttagaagataggttgtggttcatgaaaggttcttcacatgggatgttgacacaaaaaaggaccaaaagttgaggtagaacatcttacatacccactttcacccaaatccaacaaaaaaaaaaaacagagaaccagagacataaaaacaaccaaacttcagtcacaaagtcctcatgttcccaacaaattcatcgcgtcttgacatgtcacaaactgattttcttctctagataggcttgattttgaagtgcagagagatgagcgaaaaaacaagacatttcaagtcctgcaaccatgaaagtttcaaaaggaatatgttagagcacaaataaatacagaaactaaaaaaaaaaaaactacagaaccatgtaagggatgagtgttaacagccaaaccctaaatgttaaagtttgagacagtgaatacgttaaaaggcagagtcctaaatatataatcgagtccaatagagttaagggattaggtaaaagaaaagatggtaaggcaaggggtggaagaaaaagagaggagacctgaacaagatagtagaagatgcgaagtccttcaggatcattactgctctggcaatcaacaagagatccaatcttagatgtagcgaatgagatatgctcattacccaagacgatctcgagctcttgctttccaacacggtcaggttccggccaattgttatcgtcttctttcagaatctacccgcagacaaataatcacatgtcaggttgtacaaaatcatccattattcctagataatagcattaacaacgaagagggttctaaacctacaacactagtcaggaaagatgccctagatcgacaaaaatcgaagcaaaatcactaaaaccctaattggctattatagcgtcgattgaccaaaacgcggacaattaacaagagagaagcaaatcggaagagagagagaaaaaggacctcgctctcggagacgatacgcttgcattccttgagcacggcgggggtgagaaatacctccttgcggataatagtatcgttcttgtagttagagttattggcgtaacggagcttaccgtcctctctaaactcgaactccaggaactcgtgtccaaatttccctttgtgaccgacatagtatctcaggtagaactccgtcgcttcttccgcggccatgccttctctttttttctttctttctcgagatcgagattacctctccgtgtcctttgcccttctttaagtccgtccccgcaaaagaaaaaaggtaatgggcttacatattgggccagaacccatttgtaacccgaaaagttaaggcccagttttagtttttctgtttccatcgaaattgtgtgtgtatccgggctgcctgatttccgattccccgatacagagacgatgccgacggattcgaaaatggccaagtttcttcaatcctatggtaatttcttcgtttcgtcttcttaggcggccagatgatctctttttctttttttatataactgaaactttcgattggtgggagcaggatatgatttgattctgggatctgtagctgcaatctatgtggtcatggcaccatatactaaggtggaagagagcttcaacgttcaggtaggttttcaaagtatttagagtcacactctttctccgttttactgaaaccgtttcactcgtctcaagtcaatgcacgacattctttaccatcgccatcatttggactctgtgagtgacctctctttttacttcttctctgaagctttactctttttttttttatctctagagtgatgtcaatttttaccgacttctgtctttttatttttttcctatcagtatgatcatttggagttccccggtgttgtccctcgaacttttattggtaaggagggctgttgaatttcgctctctgtttttgcatcacctgttgatggttttttttttatcattatacattagtggatggttttttttttattccactctgatttgttcttgcaggagccttcatagtctctgtttttgcatcacctgttgtatcaattatcagctgccttggcttccccaaggtttatagccttgttgcaggtttctcttctgtttctccctccctatataattccttaatgaatcgctaactattttcccctaaacacagacaaaaccaattcacatcatagttttatcattttgtcttgcagctcgtttggtgttgggctgcatcatattgtccacactaagatttttccggattcaggtatgaagttcctttagtgcttctttccataccacacttctgactcccctatctgattctttgtcccttcccatgtccttggaattgggatctcttacatgcatcttgttggctgtttttctcctatatactgccactgaccaaaatctactggtttgtcagataaaaaaaaagtttggaaatcaagtggaaactttctttgtacttttcaccagtcttcagtttcattttcttttctactgcactcgtcctcttcctaatattctagctttgggattaggtaattacttctattcatcttactctactagtagtggtccttcagatgtcctagcaatctttcccatgacccatctagcgtaggccttactaggttctgcttatgtttttaaattttgattttgcagtcaatctggcatatggtaattggttaaagggaaatttttatccagctttgagtttcctggtatgtattatctttgtggtgacatattttctcgattatagatttagaaaatcggtcatgctatccagaactatggggtttgctgacatctctgttatccgataatcagatttttgccactgtaatcttcagatgcgatacgatgttactgcttgggcctattggtcttgaacttttattggtgagctggtgacgaatattaaatagtttgggttctcaacttctgtatatgtataattggccgtatactttaccgttccatctgatgcgggtgctttatgtttgtcaatgacagaccaaatcgatctccttctggaaagcacttaagtattgtgttggaaccgctctgttggccgtaggttggttaaaattcctcttctttctgtgatctattttgctttttcccttcagacactaattcccgagtctattttctgtggtcatggaataatccttagcacaggtcttaccattttcgttgactctatcatgtggaagaagtttgtctggccagaatttgaagttttctggtttaactccattctaaaccggagttctgattggggtgtatccttcaaaaaaattgtttcctcaattgatttatttttcatatgatgcataatgttctagcatttttctactgcctgattaaaggattgcgttctgtacaatgataaccgtttggaatttccaattcaaagtttaatattgtggcacttgcatttgtatgaaatgatgtgttgtccttgaaaattagttgctaaactagacacattccatacattggtacttcacctcagcactcccacggtctttacttgtagcttatccactttcattggtaaataccagacttcctaacatctgtgatagtgtttgtcttgttcctttctagttaggatcgctaattgtatctctacaaattttcttatttggtttctttttatgcagcttggtactttagttgacagaagggttccattctttatagttccagttttatcgttcgttatactatactctaaacttccacacaaggtattcagatggattacttatctcagtagccatcaacgtttcttaaccattttctgacatcggcttacctatctttcttgatttatgaaggaactccgatttatcattagttcagtgccaatgttcaacttgtctgctgcagttgctgctagcagaatgtatgagttctatcagatgtttgctagctaagctttcaatcatagctaggacgttctttgattctgtatcttaagagctctttggagtttggatacacataatttctgtatgccactttaaattactaccaatgcgggccgacctcttaatataatccgattttgttgtacagctacaataataggaagaaaacgatttggaaactggtgaatatggttatgctagcgttttttgcaatcaggtagaaatagtaaacaattatctttgctatgtaagagaaggaaagagatttgctagtctactaaacctggttctatagtgcagggtgcacggttgtaacattcatggcatcttactacaattatcctagcggctatgctttaaagcgcttgcatcagattggtgagtgacttattctgttattggggtttgttattaatgcagcagcattgacttggctatcaaacaagaaacatctgctggtcagcgtttgttttgtggtgtctatctacctctggttgataatttgcctacaatatgattaattgacttggtgccttccatggttctcaggccatcctgcaaatgtagctggggaagagtgggttcacatagacacttttggtgcgatgaatggaatatctcgcttttgtgaagatgattttccgtggaggtatgttagctgtactacctcgttttagggttggtaaaagtaaaggaaatatcaatgtacatggaaaaaagttgccactcggaagcacccatttgtgcgagatgaggcatctgtttgtttttcatgttcattttcttggatacgaatatcactttgttggaaaagggatcattctacattgcctttgaatacatagaagaggtatctgtttatctatttaggaggatataaaattttgttgtgcaatgcagatattccaaagaagaagagatagtagtggaggagttgcgaaaccgaaatttcacgtacctggtgaagtgagtatttcatcatatagtagaaagcaattcatagtaaataaaaaaagataccactggtggtcaacatgtaacactgttgtcatgcttggtgcagcgagcattcctctgtagatggatacaagtgcttattttatgaagaaggctttgagagacttgagctgcggcgaggtttccctcccattgtcttggtaaatcggtgggcgtggggctagtatttcatcaaaataggtgcatggaatgtaatgtaatgtaatgttgaattgcaggtaaaaaaagccaaagtatacttgcaccgggagatgaagaaggaagatccttttcataagaaatggcctggatgttaggtaatcctacaaatagagacaatgttttgggtcgatgtaatgtagcattcctcagagaggacatgatgtaatgtaacaacggagatgcttgttactgacttactgtaatggattcaacaaattcatccagaagcatcatcggcctttgggctttgagttacgcgtcacaattgaatcaattggtccttttaattagttttaccaatatacccctccgtcttttcccccttctcgtttaggaaaaaaaatcattagcttcgacttatccgaaacctaacgagtaacgacgagagatgcttcttcaggcggcggtgcagaaccgcaatgttccactggcttcttccgcctcctactctcgtctccttcgctgcagatctcctgtcgtctccgtagctgctctctcgaagaagacggcagcaatcgtgtgctccatctcccaggtttatggctacggcacggtggactacgagagaaggccgattgtccagtggaatgccatctacaagaagatttcgctgatggagaagccagagcttggcgctgcttccgtcttgaatcagtgggagaaagccggccgcaagcttaccaagtgggagctctgtcgggtcgtcaaggagcttcgcaagtacaagcgtgccaaccaagctctcgaggtccgtgtcctccttgtatttgccctcgctttattttgtatctttaacactacttacttgatcgcgtatcgttttcataggtgtacgactggatgaacaacagaggcgaaaggtttcggttgtctgcaagtgatgctgcaatccagctcgacttaatcggcaaagtgcgtggcattccagacgccgaagagttcttcctccagctccctgagaattttaaggaccggagagtttatggttccctcctcaatgcctatgtgagggccaagtcgagagaaaaggctgaagccctgctcaacaccatgagggacaaaggttacgccctgcacccgcttcccttcaacgtcatgatgactctctacatgaacctcagggagtatgacaaagtcgacgctatggtcttcgagatgaagcagaaagatatacgtctcgacatttactcctacaacatctggctctcctcttgcggctccttaggatcagttgagaaaatggaactagtgtatcagcagatgaaatcggatgtttccatttatcccaactggaccacgtttagcacaatggccacaatgtacataaagatgggtgaaactgagaaagccgaagatgcactgaggaaggttgaagcaaggattactggtcgtaatcgcattccgtatcactacctcttgagtttgtatggcagccttggtaacaagaaagagctgtaccgagtctggcacgtctacaaatctgttgtcccgagcattcccaatttgggttaccatgccttggtctcgtcgctggtgaggatgggagacattgaaggggccgagaaggtatatgaggaatggcttccagtcaagtcttcttatgaccccaggataccaaatcttctgatgaatgcgtatgtcaaaaacgaccaactagagacagctgaggggttgttcgaccacatggttgaaatgggaggaaaaccaagttcaagtacgtgggagattctagctgttggtcataccagaaagaggtgtatttcagaggctttgacttgtcttagaaatgctttttcggctgaagggtccagcaattggaggcccaaggtgttgatgctgtctggtttcttcaagctctgtgaagaggaatcggatgttaccagtaaagaggccgttttggaattgttaaggcagtcgggggatcttgaagacaaatcttacctagctcttattgatgtggacgaaaacagaacagtaaacaacagtgaaatcgatgcccatgagaccgatgcgcttctaacacagctacaagatgatttgtaatctgatagtcctagatctttgctttaaaaaacgaatcttgtaaccggagtcaactgaggaaatgcgaaatatgtataatgtacacaagagactgcctagtgaaacatgaatgtaagagctgtgtccctttttgtgacagctatttggaattagtgttgcttagggaactggattagcctttgttctcttgtttgattgttgttacttgttaagactaatattggagaggttaggttgtgctcttttattttgggccggacggataaaaggcccgatattgaatatataagtctgagagtctcaaaggcccatctccattaagatatcttcgcggaatcggttgtgagagagagagacggtgatcgggaaatgtcgacgaaaggcgcggcggcggcgtaccctagcgcggctcggatatctgattctccatgttatcttcagtactctgcttctctcaaatgtgagtcatgctcctgatctcaccctttgtgattgtttcttcgaggataggatttgacatgttatcttcagtactgtcaagttccataacgaattagcattgattagatctcatctatttcattatgcttcctcaaggtgattagattagtgggttgaatcccatgtcagtgattcgatttaggtcccatcaattgataacgtcgggtttgattcctgattgtttatgtgtttccgttttcattagttatgcctcttagcttgaccccttgatttcttatcaggtcttgaagaatttggatcagacaagagtaaatgccaggatcattttgatgtgtacaaggaatgcaagaagaaagaggttgttgttgtgaatgaatatttaggcttttggcgtttccaacttctttgctgctttacctatgtgttattttgtttctcagagggaagctcgactggaacgcaataagacacggtcgttgttctcgtgaatgcagatcctcgaataccaatgatgtctcagaacatcacctagctagtagtatcctgttgtttcatttgcaatggctgtgtttgtatgatctatctaagtaaacaagtggaaagtgtttgttaatgttactttttactccccattggtgaatcatggtgtatacctgttaaactttgagagcaagtggttatttatttagttagagagttagagcttctccaccaccatattgaataagaagatctttctctcattcttttactttactctggcgtctgaaacagatccagggattccagtagtgaattgggcttaaaaactgttatatgggctttcgaaagtaaaaggttcggtgagctgccaaagaaaagtcagatgcctttaatcgcatttgacgacgattctttacgtgcgccattgactgcatcgtcgtcttcctcacgcgatttggtaatccgattcgtcttcatctgattccctcccttccgagaataataatgtacccgccacctccctcaagcatctacgctcctccgatgctggtgaattgctccggttgccggacgcctctccagctcccatccggcgcccgatctattcgctgcgctctctgccaggctgttactcatatcgccgaccctcgcaccgcccctcctccgcaaccttcctccgccccttctccgcctccccaaatccacgcgcctcccggtcagctgcctcacccccatggcaggaagagggccgtgatctgtggcatctcgtatcgtttctctcgccacgagctcaaaggctgcatcaacgacgccaagtgcatgcgtcaccttctcatcaacaaattcaaattctccccagattcaattctcatgcttaccggtacagagtatttctatcttttcaaatgcctatgtttgctactatactactattccttggattttgaatacaattttccttggcctcttcaatctgataaacacacattccaagttaccatttcgaaccactttgataaaaatgtgttgcattccatagctgactaactaattgttcatcatggatggttttcattctcagaggaagaaactgatccatatcgtatcccgaccaagcaaaacatgaggatggcattgtattggctcgtacagggatgcacagcaggcgactcacttgtcttccactactctggtcatggttcgcgtcaaagaaactacaacggtgatgaagttgatggctatgatgaaacactctgtcctctggattttgaaactcaggggatgattgtagacgatgagatcaacgcaaccattgtacgccctcttccacatggtgtcaagctccattcaattatcgatgcttgccatagtggtaccgttctggatttacccttcctatgcagaatgaacaggttattagtccctcaaccgcttctaaaagggatgttgcttacctctctcgttatatttaacatacatccatttttttttttaattgaaacagagctgggcagtatgtgtgggaggatcatcggcctaggtcaggtttgtggaaaggaactgctggtggagaagccatttcaattagtggatgtgatgatgatcagacttcggccgacacatcagtaagtagaacgactctaatcatacgtcttgctgttgtagttggttcctcctctcatgattaaaacacatacacaggcgctgtcgaagatcacgtctacgggtgctatgactttctgttttattcaagcaattgaacgcagcgcacaaggcacaacctatggaagccttctgaattctatgcgcaccacaataaggaatacagggaatgatggtggtggtagtggtggagttgtgacgactgtgctgagcatgcttctgacagggggaagtgcgattgggggattaagacaggtaaaattctttcttgctctcttgtgttgatacagatcgataaatgttttcttaaatctgttttttgacaggagcctcaactgactgcttgccaaacattcgatgtctatgcaaagcctttcactctctagtaaaggacaagtcactttttatgtatagcgagtgtgatttgagaatccgtccatataaccaccttttgtttcttatttttatttttctttcaaaagaataaaggaaaacattgatttggtgattcgataacaaaatgtgccatctattctttagtctttacaaacaagcagcaaatggtttgcctttcagaatcaaaatttaaggtgtttctcgaatagacagaaggaagagaagagaagtcccagaaagctgttcagaaggcgcatacaaatcatgtgtgcgttgctgctgcaaggaaaagcacttccgctgtagcagcctgttctttgtttgataccccggccgttatcttccagtacaaaggaggagtttttcacaccatcgctaaagagaagacaccaaaagaaggtacctttatgcaacctagccattcccactccaacctcggtatgcgacctgtttctgagcaccgacaacgcactgctatctctaaagagaatgtctgagaaagcgacttctggtgctgcatacttagagctgcagccgaggatatggccagttatggtaccaaaagtggggagttctacaccacagtttggggcaaacacctgagtgaagtcgtcttcagggtgttcacagctgagagtgttgttgacattgcaattcccctcgcagagctcaacatactggagggccatgcagccaagaccgggactctcatttagtttgcctagtttccgagctgttctgttctggttcaagatgctcaccatttcatgagctgagtttcctgcaaccattctaactaacacttagtccgcctaaaacgaatcaacataatataaactgtcgaatctggttctgactaaagaaagcgaactcgagattaaatcagagggagtggctgtaaattcaaaataaagcctggccaaatgctgaacgagaaatccaagtctatattcgcatatgttatgaggggataaagcaaggagttaccgtgcaatttggagctagctagcactgatgagagtgacagaaacagtaaaatcaactccaaaatgctgatttcgttcttcatatcgtgttttatcctctgaattcccagcgtaatagctcgagctggcggattttcgaaaaatcgagaaaaacaaaaaacagaaaaggagaaagtttttgaaaggagatgagcttgatggagatgttgactggtccctgaataaatgaaaaatgtgttgcattatttctattattgagaagaaaaaaaccaggcattttggttattgggctttgatttgatgttgggctctcaaccattgaaattgaatgaagaaagaaggaaagtacgtgacttgaatttcatttacttcattaaatgggcggcgttggggccggtggaggtgggccaatgacattgatgtgtaaacagaggtaaagccgaattttggctaaggcgaatcaatgcccattggctcctctccttacatatttgaagtttgaggtttccttccttttcttaaattaaatgttgctgtaacatttctactattgtaaaccggggctccaccaccatgtgcttcttcaacactgtatcatcagagcccacatggtcatgcctctatataatactttgtattattattattcttatgtcacattataaacaagtacctccaaattgcacttccttcaaacttattcgacagtagactagctcaagtacctttggatggcgtcgaggcccggagctcttacggagtggccatggagtccccttggtagcttcaagtacctcttggtggccccgttggtgatggcgagcatgcactcgtacgtgacggctgtggatgaggagaaagacctcagcagacttatgatagtcgtgttgatgctgtggagaatagttcacagccagatatggatcagcgtgtctcgccagaggacggctaagggaacgaacaagatcgtggacaagcccattgagtttgagcaagtggaccgagagcgcacttgggacgaccaagtcatcttcaacactctcctcatgtatctcgcaaacatcaagctcccaggcgcctcccaccttcccccatggaggctagacggggccatcctcatggctctacttcacgctggtcccgtcgagtttctctactactggtttcacagagctctccaccaccatttcctctactctcgctaccattctcaccaccactcctccattgtcaccgagcccatcacgtgtacgtacctttatccaccatttgcttctattctatatacattcattcatatctttaatcaaacttggcagctgtggtgcaccccttcgccgagcacatcgcctacacactactctttgccatacctatggtaacggcgtccctgtgtgggatcctctccatcgtttccatcatgggatacattacttacattgacttcatgaacaacatgggacattgcaacttcgagcttttccctaagcgtctcttccacctcttccctcccctcaagttcctctgttacaccccctcgtacgtcgtttgtaaaaacactactatttatttggatttgaatatatgcatgcatttataacatggcatcaaatatgttgaaggtttcactcgctccaccacacgcagttccggaccaactactctctgttcatgccaatatacgacttcatctacgggacgactgataatttgaccgactcactatacgagaggtcgttggagatagaggaagaatcacccgacgtcatccacctcactcacctcaccacacacaactccatctaccaaatgcgccttggtttcccgtccctctcctcttgccccttgtggtctcgacccccatggtacctcacatgcttcatgtggcccttcactctcctctgctcatttgccctcacttcagctatccctttgcgcacctttgtctttgagcgaaaccgtctccgtgacctcaccgttcactctcacctccttcccaagttttcctttcacgtaagcattttacacgcatgcatatgcactttccctctctctcgctctcttgacacaaacgggtttacttattatgttgtacttcacaccactattttccaaactttcacacacaaaaaaaacattgattctcacttaacttgtacgtactacgtaggaaggacataaccttttatacaaaaagaaaattaaaacaacctaaaaatgaacaatgaacattttcttgtgggtataccttttgtaagttgcatctaaagtttattaataattttgcctcataaacatgcggcggtagtataaatcacagcgccaccatgagtccatcaacactatcatagaggaagctatccttgaagcagatgaaaagggtgtgaaagtaatgagtcttggcctgatgaacaatgtaagtttatttacttcaaatccccctaaatatatatgaatcactattggataagtactgtaactaattacacacgctggcaaaagaaaaaagtaactaatcaacacacaattaattaatgagagggaggaactaaacgggtctggagaaatgtacgtgcaaaagtatccgaagttgaagataagactagtggacgggagcagcatggcagctacggtggttatcaacaatattccaaaggaagccacggaaattgtctttagaggaaatctcacaaaggtggcttcggctgttgtctttgctctgtgccaaaagggcgtcaaggtttgtgaatatatgagggaattggaatatatatactcagcttctcatatcaaacaaaaaataatgtagtaatgtgtatatataggtggtcgtgttacgcgaggaggaacacagcaaactcatcaaatctggggttgacaagaatctggtactgtctacaagcaatagttattactccccaaaggtgtggttggtgggggatggaatagagaacgaagagcagatgaaagcaaaagaaggaaccctctttgttcccttttctcactttccgcccaacaaactccgcaaggactgtttctaccagtccactccagctatgcgtgttcccaagtctgcccaaaacatcgactcctgtgaggtacatctttgaattcttatagatatatctgtaacttttatattatataagctgatagatgtgttcatctataatgaatgaatggttgttatatatatatagaactggctggggaggagggtgatgagtgcatggaaaataggaggtatagtgcatgcacttgagggttgggaggagcatgactgcggcaacacttgcaacgtcctccgtctccacgccatatgggaagctgctcttcgccatgatttccaacctctcccaccatctcctctatgagcttttttcatattcatacatctatgtcccctttcttgattatatctacttcccttccatcattgtttgctgtttactatgtttttctatcgacaatatataagtacccttgttacccttggtgccacgtgcttcatatatgttagaaagggcaaaaaaattcgtcgtatgatatgcttagttaaattttataaaactcaataaaaatcttcagaaacagtgctatgatcattacatcttaactaagtgatatatatctgcgtgcctatttaacaaaataaacaaaaaaacaaaacaaaatatatttgggtgcatcatcaaatcaaagtagttgcaaaaactggacgaggtttttacttaaatggtccttaccccgcatggtccacttgctacctaattaaggattggtagggtgcgtatacgtatataaattgtggcggtgggagatggagttactaaaaacgaaacgtacaagtattattcatagctctcgtataaggggttagtccttagatctagatattttcacttttctttcatttatgtcggagcaacagacactagctggcgcttcaacgtgcatgatcttgattggctagtaaattccaagcatcaatacctaacacatgcccaacttggttcattagtattctttcattggtaaaatacccttacctttcaataatatccagaaataaatatatgaagccatccatcaaccggtgcatttcctcaaggcatggatatgatatcagaacatcgatgaaggtgggagggggtaattagctgagtgtcataaatgaggatccatgtggagatcatcgaatggtagtagtacatgtttggtcttagctggccccaccacaaggaattggactggtgggaagataggggtggttacgtcattccacatatctaccaattaaggagtttaatataaaccttgctatataatgtaccttggctcacaagagttgaagagacacagtgacgacacaaacatattacattcgacggtataatggccacaaaaccaggagtcctcaccgattggccttggacacccctcggaagtttcaaggtgcactctgttttcttgtcctttaaatttaaaaaaacgcgtgcttatgatcgaatcccgttacgttactgatatatatgtttttcttgacattgaaacaatacaaaagtacatcgtaatagcaccatgggctgtccatagcacatacaggtttgtgacagatgatccagagaagagggatctcgggtacttccttgtgttcccattcttgctcttcagaattctgcacaaccaggtttggatctctctgtcccgttactatacgtcctcgggaaagagacgcatcgtcgacaagggaatcgacttcaatcaggtcgacagggagaccaactggtgcgcttttctaaatttttaactacctgcgtgcctcgtgagtatatgtaatcaacgtaactaatgaaatcctgatatatgcgcagggatgaccaaatattgttcaacggagtgctgttctatataggcatcaacctattgccggaggccaaacaacttccctggtggagaactgacggagtgttgatggcagcgcttattcacaccggaccggtggagttcctctattattggctccacaaagctctccaccatcactttctttattcccgctaccattcccaccaccactcctctatcgtcactgagcccatcacttgtaactattgtttcttaccttgatttttacgctgcctatatttccgtttttctttttataattattatacgtaaaatatacatcgttcacgtcctaactagtagcttttatctgtatataatgggatttgatcaaatgtatgcagcggtgatacatccgtttgcggagcacatagcatacttcatcctcttcgcgataccactacttaccacgttgctaacaaaaacggcgtcaataatttcgttcgccggatacataatctacatagacttcatgaacaacatgggacactgcaacttcgagctaatccctaagcgccttttccacctctttcctcccctcaagttcctctgttacaccccctcgtaagtccttaattaacaactcctcttctgtttcatacactaccaatttggcgtagtaaaagcatttacaagaaaccattcttgatgatctgatacaaatacctagttagatcatattaattaatcctcttatggtcatcataaaatctaagcaaatgataaatcatactaatacaggggatatatgctattataatagaattccatacacgtactccattcctgtataaaataaaggtgacgtgatacagttgtatgcttaatatgatcgtcaactactgaatccctggaccacaacagaaaaaaaaacaattatttaatatatcttacatggttcaacttatcggcacataatccaatttcccacaactttacgcattgatagcatctttaaccaaacatcctttgagaactattttaaatatcaaattcattagtcgatatgtagcaggtggtccctctaaacgctcaagttatattaaaccttctggattcatatttacttttaaatatttgtgactttttttccttcggtattaatttagcgcaatgtgaaagcaaaatttaatagttaaaatacattaaagtttggataataaatggagcatgagaattgcagataccactcgctgcaccacacgcagttccggaccaactactccctcttcatgcccttgtatgactacatctacggcacaatggatgaaagcacggatacgttgtacgagaaaactctagaaagaggagatgatatagtggacgtggtgcacttaactcacctgacgacgccagaatccatataccatttgcgcattggcttggcctcatttgcctcctaccccttcgcttatagatggttcatgcgccttttgtggcctttcacctctctctccatgatattcacgctcttctacgcccgcctctttgtcgctgagagaaactccttcaacaagctcaacttgcagtcttgggtgatacctagatataatctacaggtcctcatcatcatcatcatcatcatcatatatataggctggttaacttgctgatgcatatatattaatggtgatatatatatgatgcatgcagtacttgttaaaatggaggaaagaagcgatcaataacatgattgagaaagcgatactggaggcagataagaaaggagtgaaggtgcttagtctgggtctcatgaaccaagtaaagaaactatctctgactgttttggttttatattgggtagatgccgtacgtactacgtagtgtatgttaaagctttaatttgatgaactgaaacagggggaggagcttaacaggaacggagaggtgtatatccacaaccatccagatatgaaagtgagactggtcgacggcagtagattagcagcagctgttgtgatcaacagtgtacccaaagcaactacaagcgtcgtgatgacaggcaatctcactaaggttgcctacaccatcgcctctgctctctgccagagaggcgttcaggtcctttgttttccttttgctcctatgttgtgatatcaaattgatgatctctaggagaaaaataaaatccaagctttatctacatgtatttatgctcatgactcgtaacattttcatgtgaatgtcatccgcaggtctccactctgcgcctagacgagtatgagaaaataagatcatgcgttccacaagaatgcagagaccatttggtctatttaacctctgaagcactctcatcaaacaaggtaattcagtatacaaaagaagcacaattaatcaaagaatcagaaggaaaatattcaaagagcttatataaagaaaactaatgaagggattttgggtgaaggtatggctggtgggagaaggaacaacaagagaagagcaggaaaaagccacaaaagggacattgtttataccattctcacagttccccctcaagcagttacgtagagattgtatctatcataccacaccagcattgatagttccaaaatctctggtgaatgtccactcctgtgaggtaagcattcaaagctacccaatccaactaatttattagaagaggtccttattataaaaaaaacatctgcagaactggttaccgagaaaggcgatgagtgcaactagagtggccggcatattgcacgccttagaaggatgggaaatgcatgagtgtggcacatcccttcttctctcggatttggaccaagtatgggaagcctgtctcagccacggcttccagcctctcctccttccacatcattaaaactccaaccttggaagattttaggagaatgagagcgacacgctctgtgcttcttttccttatgatccagctcttccacgcacaaatgaactatgaaacatatataaagcgcacacatatatttatgcatatcaagcttttggtgattatggtattgatagagtcaaattaagctcggtgactatggtattaataagagtactatttccttttctctttgtgaactaagaaacatatatatataaagcaaacatgttccagaatatctaagtttttcttctcccactcctagactttatagttctacaaaatttaagtagcatagaacatagcatttggatcgcttgatgctattactaggacaattcaaatggtctctcatcacttataggagaaacacctatcttattcaaatcatttggtggtcaataaccgttttgaatacattgattggtgttagttagtagttagttctcatacacagtggctagagccgggcaaaacggataccaccaccgttttttaaattatttattggttttcttaaataaactaacaaataattaaattagtgataatgtactatttaaaaaataattatgtaaataaaaatatgaagttacgaataaattcatgaaatttaaaaatttaacacttatcaaaaacaaaacctaatagaaatataaaaatataattttaaaaacaataaaaacaagtgttaaaattaaaaaaatgtgtaaaccgtattgaacctaagacacctttttggggtttggatgttatgtccaattaagttacacaaaatttaaaaaattaacatttatcaaaaacgaaactttataatttttaatagtaatataaaaatagaattttaaaaacattttttaataaataaaaacaagtgttaaaaatttaaattatgagtattgaacctaggacaactctttgtgaaatcgttaatgaccacggttaaatggcaggatcaaaaatccgattagatttcacaacgtcatattcatttagtatttataaaaccttctaaaaaaaaattaagaaaagagttgaaaaacttttaagaaaaaataaaataaaaataaatgctaaatatacataaagatgtgaaaaacatgttggacttgtgaaatcgctaatggccacggttaaatggcgggatccaaaatccggtgagatttcacaacgtcatattaatttagtgtttgtaaatactttttaaaaaataaaaaataaagagttgaaaaccttttaagaaaataaaataaaaattaaattataaatatacatgaagatgagaaaatattttggatttgtggaatcgctaatgaccacggttaaatggcgggatccaaaatccggttagatttcacaacatcatattaatttaacatttataaaaccttttaaaataaaataaaataaaaaagttggaaaccttttaagaaaataaatgctacatatacatgaagatatgaaaaacatgttggacttgtggaatcgctaatgaccacagttaaatggcgggatccaaaatccggttagatttcacaacgtcatattaatttagtatttataaaaccttttaaaaataaaaaataaaaagataacaaaaatcgaaagagttgaataccttttaagaaaataaaataaaaaataaatgctaaatatatatgaaaatgtgaaaaaacatgttggatttgtggaatcgctaatgaccacggctgaatggcgggatccaaaatccgattagatttcacaacgtcatattaatttaatatttataaaaccttttttaaaaaaaaaaaattgaaagagttgaaaaccttttaagaaaaaaaataaaaaaaataaatgctaaatatatatgaagatgtgaaaaacatgttggatttatggaatcgctaatgaccacggttcaatggcgggatccaaaatccggttagatttcacaacgtcatattaatttagtatttgtaaaaccttttgaaaataaaataaaaaaaaaaagacaaaaaaaataaagaattaaaaaccttttaagaaaataaaataaaaaataaatgctaaatatacatgaagatgtgaaaaacatgttggatttgtggaattgctaatgaccatggttaaatggcgggatccaaaatccgattagattttataacgtcatattaatttagtatttataaaaaccttaaaaattatttatttaaatgttttagtgaaagttttaaactaattagttttagttttggttaaaacaattttttaaagaaaggaagaaaaaaaagtagaatgaagaaagtaaataccttattggatttggttgtaaagaaggcctcatacagcaaagcccattccaaaatcctagtgtagctctgtcgtgacatcatccaccacttttaggtcaattttgtaagtaaattactcatacaaataaattaaaaaaggaaattgatcacatcaatattaaaaagtgaccgttacaaataaattaaaaaaggaactacatagaaacagtatcccgataattgctttcatcataacagattctcacacctttgcaattgtggctttaagagattccaaattgttgatttgagtttgaaatataattttaaaatatcaataaagaagtaaagaaagtattatacctgattggacctcgtttgggccgtcacaggaaaagcccattaccaaattcttcgtcactgctctgttctgtagttgatgacatcgatgaaactcaaactatcgcactcgtcgtcattaccaagtccactgaacatgatctgttccatcgccaagttattcttcgctgccactgaactggtcgtcgtcttcactaatctcatgagaacggtgaaattagggtagacccgattgacagaaaacagaggatggtgatcaatcacgaaacgagatgaaatcgtttcataaatcatcggcatactctgaatgggtcatctctttcacgctctggattcttttgttttccttttgaagaagaagatgaatggagaattatgatttcacaagggagaaagagtatttataaaacaaacgttttcaatagaaaaatgaaattttggattgtttcctttttttacaacggtgttaagaaaaaaggaaatttcagttatactgcaaaaaataatgaaaatttgctcacaacggtcatatttgttattgtgcataatattatttgagttttaatgggtaacaatttatcaagaaaattatttgggttttagttcgtaacggtcatatttgttatttgtgcaaaaaaattatcttagttcacaacaattaatctagataaatcatttgagttttcttatttgttaaaacagagaatgcgccgttgagatagagaggagcaaagtcgggatcgtgtgtagttacttatctttggttactttgtaaaaacacaattacaaactcaaaactgttacaaaaaacaacaacttttcactcattaaagaacactaacaatcatcatccatgatacaaaacagaacagagcattctttaatcatcatcccggaagctttagatctgtgtctcgcttcagaccatacccttcaccacccccaggttatttaatttacttacaaaaagttcatactttaactttgtaaaccaaaaatgttttatttatacattttcagtcttaattattttcttggaaaaattatctattcatttatttatttttaaaacaataattttggttaattttgtttggtctttattacaagttgttcagataaaactgaattactgtatttccaatttggtttgagtttcaagatcactttatttttaagtttcatgtgattttaagttgagaagtttataaccaaatttgaaatatatttgactatttttagatgctgaaggagaacaagaacatggtcgaagattaaggtggagattattgcaatggcttagacgagcttctcccaatagttcactctcagtattctcatcaattcgattattttcattggggttgtttcaccgatctaacgcatgtacgcatataaaataatattatgttttaaaagaaaataataatctggttatcaaaacgactttttcaaatatataatttattcacatatataagttcatatcataatagttatggtacaagtttcctaaaactaaaaaataaaaacaaattttggcttcacagtcattggaacaaggtgaatccagcggtctccttctcggagaaaatggccacgcggacggacgatacaccacagaaaagtccaacgtgagttaactctaaagaaaacattttatttgccaaatataacgaataattatttattattttcagaaaatattattatagttgtgattctctgtttcgcaagagttgggagtagggaatgtgaagtagtagtggtggcccaagttatgtttccaaacgccagtaacgaccaaatctaggcatgtagatttcattgggtcacgtggatgcatcaaatttaacgcgccgcatttacttttcaacgaatggcacagtttcaactacctcgagaaaaatccaaaaccaaaaaagctatttggaatctttaaaatctttttacaaatttcttctattatagtattgctttgttgtactatatttcacgacctttcatgaatattttaaatataaatagaagtggtaggcgcatatctttttatattcaaaagattcatatccaatgacacaactaatcaatgttcaaccgaccttagtagccaagttccgttatggtcaatacgagaggttgaagagtgattaagctcaattataccagatttaccacaacgactaatatccttccttatcttcacttttgaactctactttgcagacaatatatgctctctgtcgtcaaagcccataagatatctcactaaaacgttcaaactcactctacgtataagatcatataccacacgtagacaaaaattgaacctactcaggctgatctttgtttcaagttttatttttaacaaatttataaagaaaatatacgacatgtatcttagtaaccattgtgtagagatatatcagattgtgatttgaagaggtggtcctgatgtttgaaacacaacactctcagctttaggcaatagtttaactaagatggatggtaatttttacaaataacatgcacgtacgatttgtttaactatttctcgacaacctaaaccaaataggatataatatatgatcgtgttaattaagtaagataatatatatatatatatatatatatatatatatatatgtaccaaataacctaaaatttgattgttttagggctaatcggcagattctctcataacatcgttgagaaaaaaggacacggtgattaaacatcataaattcggaatattacctgattaggaggcaaaaacgttggttgatacacgtgcattacccaatcggatttggatccattgatgttttcatacgattggaaaaccaaaacttgtttctcaccaattttaacaccattactagttatccacttgccaatgattggtgtgttggatacagtttctttccaataacccgaattcgttttcaatatttcttcgttatattcatcacaactaaagaagaaccataccatagtatcagcccactcgctctttgatttggctataataattattaaaaaaaaaaacctaaatcagaaatcagcctataatcaatgattgaatcagaaaatcatgatctagcattaattgaccaaaactttcatggcacatgccaaggatcgtaactagagattttaacggtggtaatgaaatgatgatattgccttccttgatgccgagatgttttagcaggaggtaatattcgatgataacgtcatctgtcggccggaatctgaaatccgccggatatttcattcttatcgaataaacccataaagttaaaaacaatagagagcgatgaaaaatgcaaaatagggtttacaatttttatatgtaggtaatttagaaaaacaaaattctttttttttgggcaacataaaaaaattccttaattctgaagaagatataacgaataaggtacgtaatttgatgtataataaacgaaagcaaagtctttgaacgccgaaacagaggaattaacaagaaacagaatgaaagtgatgtagaagaaaaagaaagattactaaaattacatgatataggataatgtaaacaaataaacaatagtctaatgggttttggatttagccatcaacatgacaacatgcacgtgtacatatatgatgtagacttgaaagtccaaaaaaagactcttgacattactgaaatgaagcatcttaatttgaaatttattcttgttttctttcgttgaatggaatttgtttatggggttaggtaggactagaatagtacttcgaggttgattgatacttgatagggtacgtcaaataaaatttgagcatttggttagctgtatgagcagaaattatacaactttgtcttcacaatggagcatacatacaagatgagaaagtaacaaaacaagatagacattattatgtcaatggatacaaatttgtcttcacaaatttaccagttttatacatatcacacatacagtatggtaaagttacaaaccaagatagacatcatagcatacacttgtactgttgtaaataatttggaaagtagaaaaggtgttattgatcacttttattgttatcaagttcttgagatggaagaacataggtgaattttcttgacgaatttttgtatcatcctgtgaaagaaaccagctcttttcttcttgatcgtctcttgacccaatttatgctcaccaatctcagtcccttgtgcatcatcataaggattcttcttcttctcggcggtatcaatactggttattagagcttggctcaccttgaatcataacaaagaaacaaagtcgttgtaatgagtgttggcacaaagtagcatcattgattgtttgtgttgttagtagtgatggcacaaagtagcattaaggattgtttgcctcagtgaaagatagagagataagaaagctcacctcttgagttagtgacactaagttgattgttgaggtaggagattcttgcaggtctttgatctggtctatgcgatgatttgagctaccaaaactatcacaagtgctcgaagtttgaatagagttctgtcaaatgaatgaaacaaaaacttgagctttgtaaggtgaaatacgaaaacagaggattataaaggtacaaaagtagaaatttgcttactgtttttggagttagcaaatcagaatcattatcatcactgctaacatcatcactgaagacaccagttaatgagtttggaggtctgtaatcacttcgattatcatgcataaacatgatactcttctccttagcatcatcaatatcattcaaccatgtttcccattcctcaatcggtatagcatcctcgatttgagcatcatcctcatcattcatcagccattttaccaattcctcggtcagtttagcatcctcgattggagcttcttgcagcacatcaccaaactgacttggatcttctctgtgaagtgaggatccctgaaaaagggggagaacgcaaaagaagtcgttgtcagatttaaaacagaaaagaagttttgagatgaacccacctcagaattgttgacaagctgagggattaaagagtcacgacgactctgctcaattccactaacaccagaagaagaaggagaagaggaagacttctctctcatgccaccattaaacataactttacagagtgtgtatgtcatcatcatctgcaaaaattcgataaaaaaactcagaatcgcagcaatagtaagtaacacaaaaaaaaaacagagagtacctggttatgagagaaaccgtggtactcgtgtataacccaatcggatttggattccttactcgtgtaaaacatcaaaatctttttctcaccgatctgttggcgattacgcatgataggctttggtctgccagtactcttccaaaacccagatttcgtttttctcatctgctgatcacctctgccatatttgttctccttaggtctgaagaaacaccaagccacatctttcagtttgatccttgactggcctaccataccaaaacgagaaaacgctaaaatcagaaagtagcggatgattcgattgaacagtgagaaggacgacactcggtgatatgaatgacttacaaggtaactcccaaggatcgagtctacagacagggactgtgttaatgaatcgatcgacatggctcgtgtctctatcggaatttttcggccaaaggtaatcgacgacgatctcctcgtcggtcggacagaatcttaaacccacaggagtttccatttctctgcagcgatcaaaaaagaagggaaaaggaaaagatcaaaaaaatatgcattggagagctttcgccatggttgatgttcttctgcaacttaaaatgatggagaagaaagacgtatagggttttgtatttatgcggaaattctcaaattcaaaaaaataaaaaaaataatacaacaataaaagagtaaaaatattaaatagtcatgacggtatacttgtcgaattcgattacgctaagacaggacattcaaagggttaagtttcggaatggtaaatacgtggtgcgtttgtttatcacttgtcttataaattttgtaattattttttccatacgaccataccaatcttcaatccatgaaattgaaaatattccccataaattctcttacattgtgtgacttgttaaaaaaatatcaatcagaaaaggagggtggaaaaagaggatttgcaagctgcaagtttgcataaatttaatcagatagtgacatatcttttcatcatgggacggtagtttcgcccaacacgtaacgacgaaattacatttctttcttgaacttgtttgatgtttctctttattatattttgttggcccatttggaaattatataatgattaacgttgcccacaaaaaaaataaatataatgattaacgttaacgtcgatcgtccgttatctatgtagaaacagaaacatagatacgatgacaaaaagtatctctatatgctattatgctaataggtagagctgtcaattagacaggcggctcatgaacttgcccagtccaaatgcatatggacgaactatattctggaccataaaacaaatggtccaattgggcatataaccagttttgtccacgaataatatgagtttgaccatatggacaatgggctgcccatgggcatgaattgagggaaaaatacaatttctccgattttacgattttgacggaaaaacgtaattctgcaaatttcctctaaaacgcgattttattattttggcgagaacacaattttacagtttcgacgggaaaacgcaattctccgattttacggttttggcgggaaaacgcaatttttctaccaaaatcgtgattttattatattggcgaaaaacacaattttacagttttggtgagaaaacacaattctacgttttggcgagaaaaaacaattttacgattctaccgttttggcgaaaaaaaacaatttcataatttttccgccaaaatcgtgattttattgtattggtaagaaaaacacaattttaccgttttgtcggaaaaatgcaaaatgcaaaaacataattctttaaaatcatgatttttgatttatcaataataaaatgggctatacatgggcttgcccatatggacatggtctttattgggcatggacatttttcggaccattgtccattatggaccgtccaacttgacccataaaaagaattgtccctacggacacgcccaatggtccctggacggatcatttgacagttatactaataggaagcttcgtagaagccgtaagccgaaataatctaaagcccttttaagatttggggataaatatttatatataaggctagacatggggaaaaaaaattaaatatttatagacatgcatgctatataccagattaccaggtccagaaataatctaaagagagcatacaaagtgaatattaaattgcaaaaatgggggaaaataaaaacaagaatagacatgcatgctatatacgcatatgcagagtgagcgatcacttgatgagaattttttgtaaaacgattatcgcaatttgagcatctttattgatgaaatacttatagaaagtttctcaaataaaatactactaatatatttatttattttttgttttgagagttttacatatatagggttctcatatatagattctcaattatgaaccttttgtactaaaaactctactattctagaaacttaccttttttttaaaaaaaatgtgtgaatactatggatggaaatgtctttagttgctatgaaaactaatttgtgttatttatacggttatacctaacgtttctagttatcacaaaaattaatggtgtattaatgtatttaataaagtaagttaagttgttgcacagaaaagaaagtgtaagttgggtaaattgtgtgagccaaaaaagattgtaaattgtgagtttgtgacgctgaagagtgaagacaattcaaaaggttatatcttatatgcgacggcgtaggtcagttttggaatggtaaacacgcggcaagtttggttatcatcatttgtcacaatcatatatatttactcatataacatacatacattgctttatcgtcatctttggttcatgaataagaaaaatgttctcccacaaaatatctttaccctttggtttatattttagttttttttttttttttttttttgtcaaccgatataaattaaacctcaaaagagccaatcccgagggatattgtttacatacgtgacatgatgcggtacggtacgaatctttcgtgccaacttatccgcttttacatttgcactacgagaaattaaagataaagagaaatttgtgaattcttccctatcactttgcaactcctccaaatacactgaaaacgccggccattcggttggagaagacaccatcttcaccaagtctgaacagtctgtaaagaaagctacgttctgattatctgctccaatcatgcacttcatcgcccaaagaagagcttccatttcggtatgtagaggagatagacttctacgaacgttggcggctcccatggttggcgactctccaagagatgatagacagaaccatcctgttcctgagaactggtcacttgctttccaagatccatcaataaaacaccgaaagccagaaaaagttgtatcttgtgatacatccctcacccgaattcgactatctatagacaaggaaccatgtttttcactatggagctcgacttgagcttcctgccacgattgagcctcttttaccgataagagcaatatttccattggatctttatccacattttcaaaaactttttcatttcttgctttccatatataccaaattatccatgggtaagaagccgaatcgacgcctgaaggaattctccaaaacaaatgatccaaattcgtaaaaattgaattcgaaggaaaaatccttggggccgtaggaatttgtgatagtgcccaaatctgccttgcaggatggcatagaaaaggtttatattttagttttaatataaaaaagaggggaaaagagtatttgcaagttgcaagtttttaaaatatacattaatcaaaagactgacatataattattgcacttatcatgtgacagttacgctgttaatcccacatttttttttctatttttgctctgttaaattcgatagttcattatttatgtcgaagcaaacgatgtaaaaatgtaaaccacatataatgattttgtatataggaaacttcgtaggaggcgtagataaaagaactagacagctccaaccaaatactcctcctcctacttagtaattttttttgctaaatacagcttattagttcgttataagagttaccaaggagtagtaaagctaaagtattagcaagttgcaatttaggattttcattaattaattgaacagtgaagtagtggtgggccaggacatgttaccaaacaccaacaacgaccaaatctaaaatatgtgagctaattgggccacgtggaagcattttaattacacgcgccgtgcatacttttcaaccaaggcacagtttcaactttcaactaaggccataatattttctggccataaaatattctttcagatttagagaaaatgtttttttttttgttttttttttaaattttagagaaatgtttggtaacagtttgctgaaatgattttgatttggattggttgtatttagccaaagaatcttgttcattatttgttaataaaataaaaaatctcaaaatgaggaagaaaacaaaaagttagcatcagtcaaatggggtttggactcaaagataaaagtgacaatatgctgcacgtaagatgtagactaaaagtcttatagaaaactcttgacattattaaaatcgaagcatcttgatttgatattatccttgtttccttttgttgagaacctgacatcttttgtggggattaggtaggactatagcctcaaggttgattgtgatcattttcatcttttgtcaaagaaagtgaccattttattagttgtatcgtgtatgaattgaaaattatccaactttctcttctcggacttctcatcacaaatttaccgtttttatatattggaccaacataaaatagggaaattttacacaaaaaaggatagacataacattttggtagttgtattaattgaattcatacaactttatcttctctaacaacttcgtatcacaaatccaccctttttatatagagagagtacatacatgaagtcacacaatctgatcaaagtttacaaaacaagatagacataacttatatttctacaaatttggaaaagtactaaaaggtgttcttggtctcatctattgttatcatgttcttgagatagaataacattggtgaattttcttgactaatctgtgtatcatcctgtaaacgaaactagctcttttcttcttgacagactcttcacccaatttatgctctcgaatcacagtcacttgacccggaccttggctcacctgcaaaatatattaaagaaccaaccatttaaataatttctctaatctggtctcaatgttgtgagtggtgaaattaacaaagtaacatgattagcatttagagttaaatgagataataaatctcacctcttgagttaatgacactagctggactgttgagtcaggagaatgttgagtttggtctatctgatgatttgagctagcaaaactagcacaagtgctcgaagttccaatagaattctgtcatatgaaacaaaaactttagctttctgatgtcaaatctgaaaacagaggattatcaagatgcagagtaaaattttgcttactgttttaggagatatcaaatcagaatcattatcatcactgctatcatcactgaagacaccagttaacgactttagaggtgtgtaatcgctgcgatgatcttgcataaacatgatattcctctgctcatcaccatcattattcaaccatgttttccattcctcctcaatcggtgtagttgcatcatcgatttgagattctccctgcacattagcaaagacaccagactgacttgaattctgtaattcttggctgtgaaacgacgaaccctgaaaaaggggaggaacactaatgtcagatatttcaaagtttctaaagacaaaacagagaaagtttgagattctcccacctcagatcctccagaactgttcacaagagggattaaagagtgaatctgttcaatttcactaccagtagaagaagaagagatctctgtctcttcacccttaaactcaactttgcagactgtatacgtcatcatctgtacaaataatcaaatcaaaacacgatcaccaccacaaaacaccagaattaggtcaattaacaagagagatagaaaaaaccctaggaatctggaattaggtcaatcaacaacaaaaaaccctaaaagtttggaattgaaaaattacctgattaggaaacaaggacgtagcgtgatactcgtgcataacccagtcggtctttgaaccatctcgattcttaaaaaccaaaacccttttctcaccgatcttctcacgatttcctcttttgcgcatgacagtcattgtttttccagttttcttccaaaacccagagtttgttcttcttctctgttgatcacctctgttatacttcatctccttaacactaaagaaataccaaaccccatctctcgatttgatcatcgacttggctgtgaaaaaagagggagaggaaatcagagcaaatgatttcgaattcgatacaacagtttgggaaaaaataactcgacttacaaggtaaatcccaaggctcgaagctacagatatcgactgtgctaatgacttcatcgacatggctagtgtcactatcgagattttttggccggaggtaatggtcgacgatctcctcgtcgtttggacggaatctgaaacccaccggattcatcattgtccgagagcgactaaagtttcagataaaagacaaaattggtgagaaaaagtcaaaatatgtagcagagaggtttcgccattaacgatgctctgcaagttatgtgtgagtttttttgtttttaggaggaagacgaagtgtgtgtttataattttttataaaaaggctgtgacgggagtaagtgacgtcaactatgaccagatgatgggacccactaagtggatgacgtcatgtatgatgaaagcaggacacatcacaccaagttcacatggcggcggctggcacttatcctaatgaccccaccatgatttttccaatccccacacacttgttttatttgtttacactttctgacaaattctctaaatactctttttcattccgttttattttaccggattaatgacattttcacattccgatttagtataatttttaacacgttttatagtaaatacatagtaaaatcactttttttaaaagtcggtaacgtggaaaataataaaacaactggtaaagaaagataaaatttatcaaattgaatgatgacgaccgttaagacgttcaaataaaataaaagttatgattagtctaatggcgggttttgggcttaaacatctaacatgacaagatattcgcgtggcacacatctataaaagtccaaaagagactcgtgacattgctagaattaagattaaagcatctttgatttgatgatactgttattttattttgttgaacgaaatcttttgtggggttaagtaggactagctgactagatgagtagaggttgattgctacgaaaaattgtctattttgttaggttgattgctacagcttttgatatccatattgtatctctagttttcttccattaaaaaggagggaaaatccgaatatttttcggggattctaaaataaaacaaaacaatacataattatgggagttattatgtcacgttactaccaaaaaaaaaaaaaagatgtggtttgaccattttgttagttgaatcaaatgaagtgatacatctttctttcctctaaccacatcttatcacaaattcaccattatattttaatatatctcagggcacacatacaatgtgtaaaagttacaaaaccagatagacacatattacatactactacagattttggaaagtacaaaattgatatcatgttcttaggtgaattttcttgacgaatttttgtatcatcctgtgaaagaaaccagctcttttgttcttgatcgtctcttgacccaatttatgctcaccaatctcagtcccttgtgcatcattatcaataccggttcccggtgttttgctcaccttaaatcacatcatagaacccaaaatgctgtgagtactggcacaaagtagcttggttaattagcagtttagaatggttggtctttaagaaaaggagatgataaagctcacctcttgagctaatgacactaacttgattgagttaggagattcctgcaagtcagtgatttggtatagaggatttgagctaccaaaactaggacaagtgcttaaagtttgaatggaaatctgtcgtattaaacaaaactatagctttgtgagaaaaaactgaaaacagaggagatagtaaaggtaaaataggaaaattttgcttacagttgttgcagaaatcggatcagaatcactaccatcggtgctatgatcactgaagacaccggtcaatggcttttgaggtgtgtggttgttgcgatcatcttgcatagaaacaatcttactctgctcatcgtcatcattaaagaagcctttgaaatcatcactcaaaatattgcagaagtccctatctagtgcatccacatcaagaaagccagaaaactgacttggattctgtgattcttggctgtgaaacaacgatccctgaaaaaaggaacaacgtaacacagatgaaaaaactatgtgtacgagatatgattttgaagatttaaaagagaaacagggaaagtttttgagattgactcacctctgtctctacactcaaaactccagaattgttggtaggagggattaaagagtgagtatgcttaattccactaccagtagcaactgaaaattctctcctttcacccttaaacttaactttgcagagtgtgtatgtcattatctacagatcaactcagcataaatgattaccataaactcagatttttcccgtttacgagaaataaaatcacggtaagaaaacaacaacaacaagttaaagaagcctaaacaagagaatcgaaaaatgacctgattaggagacgagaacgtagcgtgatactcatgcatagcccaatcggacttggaaccaccgtgattcttaaacaccaaaacccttttctcaccgatcttctcacgatctcccgttttgcgcattatatccatggtaacgccagttttcttccaaaaaccagacttggtttttcttatctgtcgatcacctttaccatatttgttctccttacggccgaagaaataccaaacctgatctcttgttttcatcctagaatgggctgggaaagacagaacatgatcagaaattaccgggatgatacaacagttgggaaccaaagaaaaacaaacactcgcgttagaaagacttacaaggtaagtcccaagggtcgaagctacaaatatcaactgtgctaatgacttcatcgacatggctcgtgttactttcgagatttttcggtcggaggtaaatgtcgacgatctccccgtcagtcggacggaatctaaaacccaccggattcgccatttttcaacagctacaaaaaggttcagatcaaaactaagagagggaaagatatcaaaatatgaagtagagagctttctctatggtcgctcttcgcccgctcgtctacaagtttatatcataagagcaagtccaacaaagggatttaaagcatatcttaactgttgagaaccaaatttaaaaaactaccgctggtcatgctctaagcaggcaagatgggtttgtgcgcttatataaggcacaataaaggagatcctaaaaaaaaaaaaaaaaaaaaaaattgagatccttggtagatttcgtcaactattttacggacaggttttggaccccataatgcagatgttgggtcacataatttctttcctaccagatcatcttcttgataccctacccacttaagtcaaagtgcgcttagtcatgtgatgtgacagttactcctaacgttaacgtcaatggttaatttatcttgaagcttatataagatcacaaaaagtaaaccacattgaaatttgtatataggaaacttcgtagaagtcgtaaataaaaagaaccagccacaaatataaggatttgccgagtatggaacatagcatacaatacaatgtgaatattaaattacaaaagacaaaaaaaaagaggggcgcttacatatacattcataaattcctcagctctacatacacacatctgcggagtagaagaaccacttcaacttgaaaaatgctataccattttcttacttatatagggtgtgactgataaaaaatggacgaaatgagatgaaaaataaacgaagaaaagtgaagaaaagaaaaagcaaaaagcagaagaattttctctctcatgtatttgaagtgggatgaattcttccttttcacgttgctttttgaagaattgggaagaaacaaaaccaattactttttattgctttttgaagaattgggaagaaacaaaaccaattactttttatctgactggttacatttaagtacaacacagaagaattctttttcttctcactatttttcttctatagaagactaccagtcagacccatagttgtgatactgtttgtttttcaatgatgcaaatatggatattataactattattaaattacataagtgtggaaataaaacctagctataaacactggttcttgaaaaaagaaagcatatatgcagagtgagctatgatttacttgataaggaagagaccaatcgcagtgacgatgagtgttgaaggcaaaccgaatttgaaatgtttagtgaaagtgagagtgtatccatggctcactgctctacgagcttgctcacacactatcaggtttgctgctgaaccaagcaacgtcaagtttccagccactgtgctcacccacgccagcaacaaccacgccttcttctcctcctccctccccatcgctgatgccgccactcttgctcccaacaaaagcactacaaacgattaaaaaaaaaagaaaaaataatcattcgcatggtcttgtggttccttttgaatcaagaaattgttcgtggagccaaccatacatgtttggctttaaaaataatgacattaccggttggtacattagaggctacattggagaggacaagaatcacaactgctagaaccgcgattcctttggcttgatcaattttggcatatggctccattaggtcccatagagcggtagggataccagttttgttgaatccatcaacggttatgaacatcccgcagaaaaagatcaaaagcgaatacgatacctgcaaaagttacaactttgataagatctttgaattgtatctctaaagagtttaagaaaatttggttttcaccttctcgagagacggccttgcgtctttgaaatcaagaaccacgagtgctagagccgcggtaattgcggtccacgacatgtttaaacccataagcagagatattagcattcctaatgtgatgaaataaacacttgatttccataaaactcttctccatctcttggtctggaacatattgttggtattattgctctctccttgagactctgcgtcgttgtgttgttctctcgacgcatttgaattgcagcttattaactcgctctcacccgctgaacccgctctgtttctgagagtctcggcggcatccattctcaagttcgaatcttcggatgagactggcgaaaatgtagctggcgagaacctatgagattggacatcttcttgggcaacaacttcagaatcagcattttgtacttcttcttcatcctctttatgatctgacaataaccgccaatacataccgagaagaagcatagcgttaacggtaataccaacaatcatcgcaggaaaaacaccaagaagaaactcccaaaacgggatcttgctttgaaccgcaataacaagattctgcggattcccaatgggagtagcagaagaaccaatattcgcactcgtggctaaagcgagcaaaaacgggtgaggcgggagattcttttgcctagcgatcttcaacacaaactcggttaaaaccacacaagatgtatcgttagtaaacagagcgcttgaaacagcggaaacaagacagactctacatagcaagtctttcggacctctgcttttccacgaaagcaatgtgcctaagtacttgaacatatcagctctctcaaggtatatactaacaaccatcgttccaaagagaagaccgagtatcgggagatcaatggctgcataagcttgttccggggttatcacttggaagataaccattagcattgcaccgaacagagaaccggcggttcgaccaattggtaggaatggtacagagggaaacactgctaatatccagaaaatggcaaaggcaactgaacctaagaccagctttattactggagccattgccattttcttgcaaatatttcttgaaagctctctgatcaatgatcgaaaagcatggactttgtaaaccctagttggtgattttgatgaatcaaatatctgattagaaaccctaagatctctgataaacttgaggacgttgaccgattcccaatagaagaatcgtcctgttgaaaaaacaagaaaagggcaatcagttacgaattcagaacgacaagtattggataatcaaacaaacttgaccagtttcatggttaaacatacagtttcttaaggaggaatcgaaggcaaatgagtgacaaaaattgaagcaactacatagataacactcagagtaagcgaggactcatctttattatattgtcccgagtccccacgacgaacttcaccaaaccaaaaaagtcagcccttttccaattttctttagtttccaaaaagtgaagacaagataccgagaagaagtctctctgttgtgttcgctgtttcagatctttcttcttcccctttttcaattttcatgaaattaacaatttgacctgccacgtcctttagattaattaaagtgttttcttttacataacagccaaaattgaagtgttataacgagtcaacaaatcctacacgatactgtattttaaaaataattaaaatttaacttcatcttattggcttaacattttaaatttatcacttttactccactaaaatttgattcatgaaaataaataaaaaatctttaaacagacaaaactatacagcacactccataaggttcgtaaagatgtctcattgcaaatctcaatctcattgcttctttacatttacaagagccgtaattaaacaaaatttagctacaaagcattttgactggagagaattgtacggtgagacaagcatgatcggatatattgtaattctccggccacaatcctttctctgcttcttgtggaaacaaaattgctttattcactttcaatccgattgcttcatcttctccttcttctttcttactctccatcacactctctttgcagtttccaggttgatttaccatcgtcatgttccaaattttctgacattacataacacaacacatcagagtcttgattgacgttttaaacaaagctaccggtttgtgatttctgttatgtaccaattggtttagttttatttaccttaagttcttcatagtcgaagacaccatttccatcaagatcagctcggacccatagctcttttgtctcttcgaagctaagtccatgtggaatacccgttagatttacctaccacacaatatcaaattttgttgtcagcataaaagtccattcgtctttgaaagaatttgtaaaaatctggaagaacttatttgatccttattctactgttatgataagtgaaatctctagatgatcacaaagttttttcagaagtgtcaaattccaattagaatgtgcaaatctaagatttttttatcagcatttgtggaaaattgaggtctactttttcctgaagagaatgtatttaccttttgaagtgctaggcaaaagtcagagtaggttagtgaatcactgtgattttttgccccaagaaaagtaaaggcatcgtcctcggctatggaagctttgtgtagttgatactggaagaaaccatcaagagaaatcagaaatagacaaaatgaacatgaaaatatcgtttaggaaaaagtaaatttggaaagaatgagacaagacatggtaagtatgatgtgactttaacattttgtaaaggtatagtgcttaatatcttagttttccgaatatctcaccttgataatgctgaaaacagcttccacccaacttgttctcaatggttttcttgaatcactagggttacagagccatatgaaatcaactccgcaaatatttcccctgtggtttctgtggctaacccactgaagaaataaatggaagaatgacggataaggatgtgtcttttacaatatgaggcgttttaaataacagaaggctggaggaagtttttttgaagagatgtttaccctatgagcatcactgtcggtatactgatgagcatcatcgtatgatgaaataaacccttgagatctcaaaaatttgtagacatgcccgcgtttgcttccattccagtcactgcaataagcataattcaaaagtctgtgattacattgaactggcggatggacacaatatcaagactcaaagactagaagctaacccgcagagaataatgggcatgtgattaagtttattttccttttggtaagcttccagatattcaagaattttgtaaacctgtgaaaagaagcaatcaaattaaactatcacaagattcaaggtgaacggtctcaaaatgcaaaatgatggaaaggatgaccaacctgatgcagtcttacaatagacaaactagaatcgtgaggaaacaagaggtgagtgttcactataataacttcttgttgaacgtcttgctttccattaagcggaaagggaataactgttttgacatgtaagagctgagcaacacggtctccaaaatcgttaaagagcagctcccggtaatttacaactttaaaatggtccttatgaatggctgttaaaagacctgtaagaaagatattcaagtccacaaatgagacatcaaaagcgaagaagcctatctttcatcgcatgcgatcagctagaggagtccaaacatatagcattgactttgaattttagacaatatttctactccatccataagattgccttttaatacggcatcctactaacaacgacgttaagatcatataaacaccaacaagaacactttgacaccagaaagatcctgaactaccagtttccaagtcatgaaaaggtatagatttggacaaccctacactatttactgaagcatatcaagcagtaacattgagcctcttaactttctaatgactctggacagagaccatattcaatcaaaaacatgataaaaaataaagaatcttaccatcaccacgactgtttgttctagccaactgataaatagtgtagcctgaagatgaaagctggtggtggtacatgttcactaattcctcattcccaacccaaacttcctacgaacagtcacaattgctaagagtcagcttaacaaaaaaaaaaaaaagtcaaaatttgactctttctaagagacaaagtgtgtacctggagacagataactgaagagcgttgatggagtaacaaatctaaaatcctctggttacgagctaaccaaagcgtgcggaaatcgctctctcgagtgctatgattctgttaataacacccaacacaatcaaccaatgtcgtcgattccagaatcaacaaggtaaagagtgaagaaatcagaagaatagaagcaaaccttttgatcaacgcgtttataaatcggagccaagatattgaaagtggtacaagaaatattcgattccaccattgaagaagctaagttggagttgagtctctgcacaaacaaacaaacacaatcggcgaatcaaatctcagaacaaacaaaaaaaagaaggaaagtggaggaagagcgacgacgaaccataactgaaagcggcttgttgtttctgccggagagtagaccggaaaagtagatcggaagaggaacagcagcgaggacgacgaagagggagagtggtgaagagaaggaagggatgaatctagaccgtagaatcaagctcagcctgcttcgattctgatggctttgcatttgagtttttctttcgaattctctcaacagatcttttttctcatcttataatgaatttctatcggatttattctttttggcagtacttgattattattattattattattttattcataagttaaaaaaaaatatgaaccgttggtttcgtaaatatctaatttcagtgaaataaagacaatgtaatttcttcataattgcaatgaaataaagaaaaattagtctattgaccaatggtagattttggtatttttgttttggccattcatggaagtttacaacgatcataacgttttaaatcgtacttgtattttttgtagatttatgagaaaaggtaagtacaataaagagtaattgcagggaagaagagggatattaatgattggagaaggagaaccgcgtatcaggctgggctatgtcggtttctcatgacacggtcttgttgtatcacaccgattatatattatcgttttacagcaatgtttatatcatgcctacaaaatatagggattcaaattgcttaaccacgttgtattcttcttcttcttcttgtccaactttttctacgaaattatagcaaatcaaattcatgctatttattgaacgcaaatgtttaattttcagacaaatcagattcttacttttgctgttcaaaccccaaaattcaatgaagaaattttataatattcatcagatactgagcggattttaagcaaaaaaccaagagaagtgatagatactgagcgagtttgatatgaagattatcttggccggaggttgattatcgtctttccaacgaagcaactgcaacaccattatatggatatttggtgtctcgtcatcagagtcgtgccaatgaattttgatgctataaacaaaaaaatatagtttaatattttaataaataatgtaaacataacaaaaaaattatttattaaaatatacacataacaaagaagacggaaagctcctctctcacaagccaggctatctcgccacctgctatacctttgaatatttcaaaggtcttttttgagaagtatttcaaaggtccgtcttcttgacactaccggcgacaagagacatttttacaacgaaagagttcgataatagaaaggttagtaaaaaaataaaaatattctttgtcgtaattatttcaaaggtcatttttgagaagtcaataaaactatgttttgttttgttaacaacatgcattataccgtttgattgataacataataacgacactagcacattttactagtttacacattataatcaacctaatcgtttttggtcatatttttgttctaaattatttatgttttgcttaaaatttgcttaatttattattaaactttaaatattaattattttttttgttatgtttataatatttattaaaatattaaatcatattttcgcgtatggtatcaaatttttttggcacgttctgtttggatgttatgtcacaaaaattaaaaatttagtacttacaaaaaaaacaaaacatggttgaaaaaatctttcaatcaattactaaaaaaaaaagtaaatgaagaaagcaatacctcatgcagcagcttgtgatatgatccaaaaacaaatcgggacagctaaaggtcttggctggtacaagcaaaaactcggtctccttgagcccatccagcttctttcaggtactacaacatattaaaaagattgcacatgtcaaaatgactattaccatatccaaatttcgattgtttcctactttccttttatcttcaacagttgtttcctttttcttatttgagaacgttcgagaaatctggaccgtctattttcatcatattgcaactgtgagatctgatggtgattatctaatctaaacggtaagtttgttagattatgtgggaccgggacgatctatttcttaaacctctgttacaaacaaacactcatgtctattagtattaggaaataagagatggatatgatgatgattccgaaccaattctcaataaactgtttataatggaacagaagcagcagtgattgatgatctaacagacattgacatcaggctaccaatgctagtcttcctgtgggagatagaagcggccttggttatgccgagttttctgttgatctgtgtttatgtaatcacccgaggatgcaaacaattaatcccatcagctaaaagacttgtttgattcaaaacagactttagcagatcatttgtttttcttatctacagaacataatatattctttttttggtgatattatgattgggaaacatccatttcatttaaccagaaagcatggcaatcttttctttgaacaaatctccataaattacagacaaagataaagccggaaacaagaaaatgttgcagataaaatctaacaaaagaaagaacaatcgaaaaactcttcttctccttgtaatttgctcacaacaaaacctcttcttcagagcctcttaaagtggctttccacttgtcttgatatcatttctgattgctccttgaatcatcttaacgatcaaatactgcaaagtagaagaaaggatttcacttgtttaccaaattcgaacaagacaataaatcaaactgtgtctctttcttacctgagcgcctatgataagagggatgagtttctttcctttatcatcagagtaagatccatctaccatcttcttgtctacatgaattgctttcctctggtttgttgctacatcagttatcgccttaaccaagttcgggatccacgcttcaccatttggaagagcctgaaccgagagcaggtaagcaacttttaacagtcagtctctctccaagtcggatcaaatcagagattcgaaaacacaaaccttttcgtccttatcgttcttgctgcatcttccgctgttctctgcatagactaccgcgattgcagaatcctacaagccagtaaagaatgaaactgattcttgctacaatgaaccaaacatacattggtataacaattttcggagacaggtatatgtataaataaccatacctcaaactcttgttttcgcatcttagaaccagcccggatagttttgaggagagaatctgatctcttggaggaaaaagtttcgtaggaaagttcatcgggaggggaaaattgagcatgagtcagaacaagcaaggttttgcaccatatctcttttccaaaggtttgggtgattgctataacaacttgcttatctagctcatcgactctatacacatccaaacgatcaacatagagcaagacatctattgttctgttcacaagaaacctgtccaaaatccgagaaacacaacaactatcgtaaaacttccacacacactccaatatacagcttcagcgtaaaccagatactcataattcacaatttcaacagaaacccacaagtaaacatgttaaccacatatatacttagcttaattaattcaaaaacgaatgagataatcctatatgcaacaatcaacgaagagatattccaaaagagtagctactgaccctttgattaactcgagagcttggtgattgacatatccagcttccacaagtccaggggtgtcaataatgttgatagtgaaccctcccattgttcttgaaaccatcactggtctcaatccttcagcctacaaaatcaacaaaacagagccatcaaatatcttgaaatgactactctttcttaatccaaattaaaaaaatcaagcttagggaaactgaattacgtacttggaaaggactgacacggacgacttgttcgccgataagagaattgacagtggatgattttccgacaccgcctttacccagaacaagaactgtcattgagttcatatcctgcaattacaaaaacctcccatcattatctcctaatcacaacggagaatccgagaaaccgacttaagcaccaaagaaacaggaacaacaacaacaaaacacaccttttgcttcaattttccgaagaattcaatcagcttttcctgggtagctgctggaaattgctgaaacccaacccattcacgaacgagagaccccatcactcctaaacccttcagcaaaaaaattcttttggtaaataatcgctgagtgatgacgatgatgataattaatttcgaaagcgataacgttttgggagatttggaggagcttaccgttgtgtgaggagcgtttgaggtttttggaagaagctctctcgatgtgttccgcagagaaaagctaaagaatgtgaccttatcggtaatttgtttaatagttcaaattattttcacttttactcctctatttctttagtgtttctttttagtgccttcaaattttgaaaactaacaaactcaaccccaaaccaaatccagttaccaagttgcagcattacacttcatattttcatggaagactacattaggtggaacattgaattagcatagcgtcacgggagctcaagcgattctctgaacctttcttcgcttgtaagtcaaggaaaacaaatggtcactattggcttctcgagcatgattgtcttcgctcaggacccccagcggttttctcagagccttggcttccctctgaaagttattactagacgaaatcctcttgctctctgttgtttcagagcctctgtcaacagtcctaggcttaaaaccaggagacttcaggtggtaccggacatattcttcttgctttagaggtatattctgttctgtgatggagtaatttgaaacacggagagcactgggaacagtgtgtgttggatcatgaaacaccggttctgtaccttggattgatctttgtgtagtttccaaataggttaagaaagggtctgggatagaacagccaagagttccgtagggtggtttctcaaatgtcgtacctaagtatggagacgctgcaaatctagtactctttgaaccggtttcatggatttgcaggagattgtttcctggagctacatagggtttcctgaggatggcagaagaagatttagggactaatttgagaacaccctttggcaaagtctgatgatgatggccagcagaaactaagctggaaccttgataccggaatactccttccttggttatctttatcttgagactgttcttggagctgccactgcgagggaaggttaaacttttcgatctatttctttccacgggtttcactacattgggagttttgaatctacatgtagcactatccatttccttagatggaactctattgaggtccagtagcttgagattaccggtttgagttcgtcctgaccaaatgaggagccttgagtaattgcccaatttatttccatactgaacccacaccctttgcatttcggtaaatgtcctgatcagcttttcatgatagaactttaaagagtagtaatactttctcctcttgacaaacataacaccttctttgaaacaagctacctttggagtaaacaatccacctagcaaattcttgtaaaacttatcctctggattcccaaaatataaattggcaccatcaagaagttcctgcatcgtcaaactgaaagtctgtggatccatatctggcagaaaacatgagaggaagaatctttcttcttcagtcagaagtgagttccaagtctcaacagacaatattcccgttaaatctggtagatcgtagagctcgtatggtatgttacagagctgaccttcaaccaaagctagctcacagtttacttgcgcaatgtcgtaatcatcagagtcatcatcttcagagtctagcccaactgtttgattcttattcatctgtagttaaccacttactacccttaaaacacaagtacttcaaatctccaaccacaaactcagtagaaaggaacacaagcaggagatacctagatagaaaatgttaaagactcatcatcagcaattcacattacaagaattctactacaatacaatggacagcgagaagctgagtatgttactaatcagaaatcaaacgaacataaatagcattttactcactgatttcagcaacaacaacactaaaggctatataaaacacgaaatatacattgtgagatcaatgaagcactcaaaaagaagaagatacacaacaccagaaaatctcccagatcggatcagctacaaagcttaaacgtaatcgatcgcgaactcaatcaataaccaaaatcaaaagctccaacaaggcaaataactagagagcgaaaacccttggatttgacaacaaaaatgtgcagacaatttgaataaaaaacaagtatcatacaaatctcagcacaaatcagctccaatgagtttcaaaaacctaccggaactaataaaaaaaaagaatctcgagatattcagagaaatcgatcggaaagcgtaaaagacgaggagcttaccggctctaaagacaggtgaaattagcagattagggtcgaagaaaccatatccctttggctacagatacgaacttcatcgccttcaaagattctctgcttcctttctagagatttctatggcttttcgatcgatgcgacagtagagtagagactagagagactaattactgttacacttgtattttgatttctttaattaaagccgcctaaagtaactaatgccttgattactttaattaataatcatttttaaattgtgatttataatcaagttagacattacttcacaaatagtttgggcctggaaacgtataggcccatgtaaactttaataaaagaatcaccttgcaggtaagtataatatcctgatattattatttacttgatagaatgggcctataataaaagaaatcaccattaaagaattataggcccatgatatcaagtaaatatcaagaaatgatgattaatgatcaagttagacatcattacttgatattttggtaagtaggatcaatcaacggtcaggatccttttagtaaaatcatgtgtcattttcagtttgtctaaaagataagcctttcactttctctctctgtcttattagaaaagaaaatttgtaccgtttccaaagtctgagccaatcattgtgttgattctggaattctttgtgggaacgagaaatttgtacaagggagattcatcatggctgatagttgttgtatcagacttcacttattagcctctgttttcttgctcttattttcatccttcaacttgcaggtactttaaactttcgtaatctgtgtgttaaaattgcttactaagatcgatttgttggactcttgagctacaagttaaaaaaaaacaaaataaatcaaactttgtgatttttttctctgcgtatcaatctaagacatatgaaggggaaatgtatatatggttttttgtaattgtttctatatcagtaaagttttaaacttttgaagctggtttatctcttaatctcagggtattgcagcggaaaatctttccaagcagaaactgacctcactgattcttcaggttttgatcttaatccacacaattatctgtattgttttcgtctcttttagattgcctaaacgttgatgatcaacttttgcagaatgagattgtaaaggaagtcaatgagaatccaaacgctggttggaaagctgctttcaatgatcggtttgcaaatgccaccgtgagtttattatcacctccatgctcttatctctttaagagctacgttacttatcattgttcctgaaagtttgtgtttttgtgtatgtatgtgcaggttgcagagtttaagcgactcctcggtgttatacaaacaccaaagacggcatacttaggtgtacctattgtaagacatgatttatcgttgaagcttcctaaagaatttgatgctagaaccgcttggtcacattgcaccagtattcgaaggatcttaggtcggttttaatctcttagcttccactatctctgtcattaacccaatgatttactgactcttcttatgttttgtttcaaattatctccctctttattgcactaaagatcaggtgaaacatcatttcatttgagtgggttatatattgaacaatgtgttactctggtcgacgataactttatggttttggtttcttttgggtcattgtggttcttgctgggcatttggtgctgttgaatcactgtccgacaggttctgcatcaaatataacttggtaacacaactttctccatcaagccaagattgacgattgctacagctttttaatgtaattgctcttcttcccttgcagaatgtttccttatctgccaatgatgtcatagcatgttgtggattactttgcggttttggttgtaatggtggtttcccaatgggtgcatggttgtactttaagtaccacggtgtagtaacccaagaggtaaattctcagcaaagaacaaataataatggcaatgtggtcaaagtgtattgaacttttgtaatgctgttggttcttcagtgtgatccatactttgacaatactggttgctctcacccgggatgtgaacccacttaccctacaccaaaatgtgagaggaaatgtgtaagcagaaaccagctatggggtgaatcaaaacactatggtgtcggcgcatacagaatcaatcctgaccctcaagacattatggctgaggtttacaagaatggacctgtcgaggttgcttttaccgtttacgaggtaatgaaaaagatttttgattgatcaaaccatattgattatatcttggtgaagtccacattttcatgtatctttttgttcttcaggactttgcacattacaaatcaggagtatacaagtacataacgggtactaagattggaggtcatgcagttaagctcattggctggggaacttctgatgacggcgaagattattgggtatgaattctctggattttgattcagatcaagctgaaaaagtaataacattttcttgttcgttgttgcagttgcttgcaaatcaatggaaccgaagctggggtgatgtaagttcttcttttctccaatcaaaacttttaaattagaccttccaagtaaacaaaagcacagaacctgagatagaaaatgtgaaaatctcaggatggttacttcaagatcaggagaggaacgaacgaatgtggcattgaacagagtgttgtagctggtttaccttcagagaagaacgtatttaaaggtattaccacttcagatgatcttctggtttcctcagtctaaacaagacgatgtgtccctacttctgtaatatatcatttgcaactgtgttgtaagtttaatataccattgaaagaatcaccttcaatcaaaacaaaagtatgtatagcttctgttaatattcaattttacatgttaccatgcaagaggactgttacagtgtttatttggttttggtaaattatagccacctaaaagtaacgccttaattaatcattttaaattatgattaacaatcaagtaagtggaacaaatcaacggtcaggatcttatcctcgcagtaatatgatctgtcattctctaactaaaaagataagcctctctctgtctcttcctagaaaagaaaactttgtaccttttccaaagtctaagcaaatcattgtttttgattactggaactcgttgagggattgagaaaaaaataatcagaagagaaagatccatggctgataattgtatcagacttcttcactcagcctctgttttcttctgtttagggcttctaatttcatccttcaacttgttgcaggtacttgaaccttcataatctgtgtttgaaattgcttacgaatatttatgcatgttagtgctttcttctagttacgatctgtttcgtagccttctcgggtttttctgggtttgatcatgtttgcttatttgttggactcttgaagctagaagttttaaaaaaaaaaatcgaaattttctgggtcttaatcgaatcaatgaacgggaaacatatttgtgatatcagaattgtttaaagttttaaacttttgaagctgggttgtctcttaatctcagggtattgcagctgaaaatctttccaagcagaaactgacctcatggattcttcaggttttgatcttaatccacccaattttctgttttgttttcgtctcttttagattgcctaagcgttgatgatcaacttttgcagaatgagattgtaaaggaagtcaatgagaatccaaacgctggatggaaagcttctttcaatgatcggtttgcaaacgccactgtgagtttctgattacctccaccattccttacatatatcctatcaatgcttatcactgttcctgaaaacttgtgtttttgtgaatctatgtgtaggttgcagagtttaagcgccttcttggtgttaaaccaacaccaaagacggaatttttgggtgtgcctattgtaagccatgatatatctttgaagctt

SEQ ID NO: 3 - DNA, 100239 bp, Arabidopsis thaliana
gaattcgatttgattccgttgcaatggtggagagacggaatcctctggttctatcatccacaagaagtactctccgttcagtgctcaattcgtcacaacccagctctgccgacggcgaccgagttctgaataaagacggtgacttgttacgagggaacgctaggttgtctgcgggcattctccggtggcggaaggacggagaaaatgtttccgatgcaaaattggattctttagatgactctgcattggttggactctccactcaattgcttaagagactatctatcaactctggttctttggtatgtccttctcatcttgttcagtcaacaaagctggatcttttctggataattttgttgcttttgatgttaacaattgagtttttaaaatgcaaggttgttgtcaagaacattgagataggcattcaaagggttgcgcaagttgttgtacttgatcctcccaagacgacgctggaagatgcatctctcactcaagtacctgtttcggactctcttcatacgatgcttgtctttcccacttatgatttgatgggccagcagttattagatcaagaggttgcttacttgtccccaatgttagcttttaatcttagcttgcacatatcttgcctgaaatccctcgtacatcgagggaacggggtcttagagaagtattttgaagctaagtgtgatgaggagtttatcggaaaatctgcagaagatgggtcgaagattggtttggatttggaacccgtgtcccaagttccaggctatgcatcacatctgagagtttcttttgttaaaatcccagagtgtggtaccatcccatccctgaaagtcaattcgtcatttgaagctgaagagcgacaagggttaatagattctgcattacagaagtattttggaactgatagacagctatcaagaggcgatatatttcgcatttacattgactggaattgtggttcaagcatttgtaatccatgtagtcaaaggttgtgctccgaaagcgacgactatatatattttaaggtaatattggttttcatttttgccagaaaaatgctcattttggccagagcttactgaaaacttagttcatctgctcaggttattgcgatggaaccttctaatgagaggtttcttcgagtgaatcactcccaaaccgcccttgtccttggaggaactgtatcttctggtcttccaccagatttactggtgtatagatcaaaggttcctatgccattgcaggaggagacagtaaatattttggcatcggtgctttcaccacctctctgcccatcagcactcgcctcaaaactcagggttgctgttttactgcatggtataccaggtacatttgcttcggtttcatcaagaaaatacttcactttcatatatgttcttaagggttaaactatttctggaaacaatgttaaggaaagactagtaagagactatgtttctgtgtttacagattatggtaatttgggagaagtcataattcgacctttatgctctatgcatataactgaatcacgtgctaatagctttttgtatctattgcttgtttaagggtgtgggaagagaactgttgttaaatatgttgctaggaggttggggctgcatgtagttgaatttagctgccacagtttattagcatcatctgagaggaaaacatctactgctttggcccagacttttaatatggcacgaaggtaaaatggtatactttttttcttttctttcatgtattcattatgaactgcattcagtaaatggccgtgttttaatgaagtgcaaaattacttacatttttgtaaatattgagctcttctttctggaatagtatttttatccacaacttggtgaatgccttgttttcattgtcacaggtattcaccaacgatacttttgcttcgccatttcgatgtttttaaaaatctgggctctcaggatggttcactgggtgaccgagttggtgtgtcctttgagattgcatcggttattagggaactcactgagccagtttctaatggggacagttccatggaagaaaaatcgaatagcaatttcgtaagattttcatttctttccttggttctccattgcgcgttgcacagtttcacttaagttcacttttccgttttccaaatcgttgtcgcataatccattttagctaagctctcaaacaactcatgatggttttagacctcgtactctataaagtaaagaaaagagaaaatattgctcttcgaaacccttttccatgatgctttatctgtatatgtgctaatgcagtctgaaaatgaagttggaaagtttaggggacatcaagtgctgctaatcgcatctgctgaaagtactgagggtatctctccaacaatcaggcgttgctttagccatgaaatacgtatgggttctttgaatgacgaacagagatctgaaatgctgtctcagtccctccaaggcgtttctcaattccttaatgtatgtgagtacaatgctccaaaacttcaagtatttgttttatgatataatttgaactaaattaaattacctctcattgaaatcttagagatactagatccatttattcttccattttcaaactaaagttaacaacttcaggcttgatggatagatattttcacattgtagattagctcagatgaatttatgaaaggattggtgggacagacttctggcttccttccccgggacttgcaagctcttgtagctgatgctggtgccaacttatacatcagtcaagagtccgagaccaagaaaattaactctctgtcagatgatcttcatggagttgatatacaccaggcaagccaaatagataacagcactgagaaattaacagctaaggaagactttaccaaagctttggatcgatcaaagaagagaaatgcatcagcccttggtgctcctaaggtaacattcacagttttcttgctgtggtgttttctcgtttgtttgtctatttatgagacaagtttgcatatttttttgttactggagatgcacataacttaaaggtttatttgtattcgtaggttccaaatgtgaaatgggatgatgttggtgggcttgaggatgtgaagacatcgatattggacacagttcaactacctctcctgcataaagatttattttcgtccggattgcgtaaacgttctggtgtacttctctatggccctccaggaacagggaaagtaagtaagccattttttctttcacttttagcatctcttaatagtctgttttttggcagttatatttttgagtttttgaattaaatttacagactttactggcaaaagctgtggcgacagagtgctccttaaatttcctcagtgtaaagggtccagaattaatcaacatgtatattggagagtcagagaaaaatgttcgagatatatttgaaaaggtaagttatatttcttcttccctaggagaagcatattgagtctttggttctgattcttaaactagtgtgttttcttcaattgcaggcaaggtcagcgcgaccttgtgtgatcttctttgatgagcttgattctcttgctccagctcgaggtgcttctggtgattctggaggagtcatggatcgagtggtatctcagatgcttgcagagatcgatggactcagcgactcttcccaggatctgtttattataggagcaagcaacagacctgacttgattgatccagctcttttacggcctggcagattcgacaaacttctatatgttggagtcaacgctgatgcgtcttacagggaaaggttaggcatttaaacaatcaaaagcatgtccaaagacaaaaaaaattagaagcttcctgattcttgtttttgacagggtacttaaagcactgactcggaaatttaagttaagcgaagatgtatctctttattcagtagcaaagaagtgtccctctacattcaccggcgctgatatgtacgccttgtgtgctgatgcttggtttcaggcagctaagcgaaaggtgagagggatagggttgaaatttaagactatataagtctctgtaaaagcttttattgaaatcgctttgtatctgcatacttggcaaatgcaggtgtcaaaatcggattcaggggatatgcctacagaagaagatgatcccgattcagtcgttgtagagtatgtggattttataaaggttaaaactcttttccttcatctactcatcaaaaagagttgccattttcatggttgagtagaaatgttaatttgttatggttcggttttatcagtcgagagttataatagtttcccactttgtcttctttgtaggcaatggatcagctctcgccatcactctccataactgagcttaagaagtatgagatgcttcgagatcaatttcaaggccgttcgagctaaacccctctcagtacataaaaattagcttataatgaagacatttcatatttttttcccagactattttctctgaacagttctgttgatttggttagtcaattgatagtaaaattaaagaatcaataatgtaaaataattttcttggtttgaattacctttgattggttacgcacaagtgattcttcgcttccatagttccatgtaataatataacacacaagtgaagcagattattcaatggtaaaaggttttcttaaaaaaatttccacaacggttcataaaagaattctgtttttggtttgggtaggaaataaaatcatcagtttgttatattaggtttgtgttttatattatctgtttgattatggtgttgttagtaatttcagaatattttctccaaacaattatttcaattggcattccaaaaatagcgtttttgttttccacacgtgactaaattccattaattacgtgaagcatagaatccatatggcgaaagttttttaaattacagtaaaaatttttatgattaaggagattttacttgcaaaaaaaagacaaatctttgaagactgaaatgacgaacttgaccactatgacatcacttgtcacgtgggatttgctttgtttgggcgagctggtccgaaatcaatttttttttttaggaaattatttttgttgagttaattttttttcctctttttcgtttgttcgagaaaacagagaatgaggaatcaaaaaacggaattttgaatttgcaacgtgaggaacctcctctgtcgtttcgatcttcaagtttttttttaaagctttctctcttcaaagctcttcacgtgagctctcccaaatctgggcgttattcgctttctggattctgaatcgcattatccaacgaattcagctgattgattttatcgggctgctttgttcaagtctctctatgtaaatgggtatttaagagttttgcttattctctcgatcgatctaagtttttttctgaggaaatttggaagattttagcttcttcgattgatatgatatatataggtttgggttttagatgattttggtgagtagtagcgatgctagaagcgaattagggttagggtttggtggattaggtgaagaaatcatgcaagattgtgactttgaggaagaaagtacacattcttatgtttcttgcgttgacccagatgttgctctctcttacattgtaagcttcttctgacctcttaactatgttttccttttcttcttctacaactactacttagatagaatcctttcttttttccttttcttaaggatgagaaactcgaaaacgtcttgggacattttcagaaagattttgaaggtggagtttctgctgaaaatttgggtaagttttcttgtatatttaaactttgttgctttctcttatgttcatttatgaattcaatgaatgtttataggtgcaaagtttggtggctatggttcctttttgtctatgtatcagagatctcctgtttgttcacgtcctaagacttcaccagaagttcaacaaaaccaattggtaaagatcattaaacaactcaaacttcgactagagcttgaatttaagcttttatagtgaatgtcattttctgtttatagggtggtcgatctaattgctcagcttcatcactagtacctcaactatcaatatccggatccgcttcaaaacctcctgcttctgatgttttggtcaaattaaacaagtttgtcaaatcaagtcatatagggacacctgatagcaaacacatgtctgacgcaaaaacttcttcttctgctccatcaaatcataagactctcaggtttcgtataaaagttggttcaagtgacctctcgtcactcaaaaacgtttctacctttactaaagaaggcctcaatatgctaccatcagcatcgcgggtgaattgcctctcagaagttgaacaagatttactgaatgggatttgtgattcgcccactaaaattcttatggtgattttgttttctttttctgtttcttccttctccttaaagattgaacaatgatgaatatgagtttgacatatacctttgtgtgtgtaggctatggtgtcattccctttgcataaagatcagctgttatcacctctctctgatgatcttattcagttgggatcgaaagaaaagattttgaaagatgctggatatggttctacaaacaagacggatgcaaaaagtacacccgatggtttagttgtttctgattcacaaaagcgtgctggtaagtttcctattgggaagaaggaaaagttaagggatagggtaaagtataggccaccgtcaaacaagcttgacagaaatcataccgtatccaatactgaaaaagaggctgacaaagagtcctgtgaggagcttgtttccaagactatgaagcttccacttttatcctgtctatcaccttcatatatccacccggcaaaagagattgataacgtatcagattctaatgtggagagtatattaagaggaacgaacaaagatgcagctttgatgggttcaaagccggaactagaagataatgtagtggcattttcagatcgaagtgttaaggaaactgaaagtattaacgtaagaaaagacgtgtacctgataaaaggtgaacctctaaactcattggaaagtaatcccaagcgggagaaagctccaagtattgaacatgtagattattcttctgtggttaagggtactcagagtgagacaaggaatgaagagcaaattttaaagtcaaaactgcctaaagtacagaggtcacaaaaaggttcaagctccattgttaccatgaatagtcagagaggcaaggacgctgctgtaaatataattaagaagaatgtaccagataaattgcaggaagatattgaagaatccgaacacatgtgtaagggattctttggtgattcgaaagaatcaaaagaagaaaaacaaattagtcccgtacttaaagctgagaaagaaaagctttcagaagaaaatgcattgggcgagagtttcaacagtgttaaaaatgatgaagaggcttgtgatcatctaaatttggtatgtgaacctgatttgaaacaccttattaagccgagtgacttgaatgaagataggcacaccaccaagcagagtgttagacgggaagtgaaaaataagcattctcttgaaggtattatttgtgaaagatattgattttccttataatattttctttctgttcaaattatctgatctgcttgatgaatacgcatgtaggaggaatggagaatatgggaatggaatctgaaagggaactttctggggtttctaagaaaccaaagactggaaaatcacgattttccgctgtagatcaacctggatccaacaaatccaaccaaattctggaagttttagatactaacaaaactatgattactcaagccttagccgaaaatgtcaaggattttgctaaggcttcctcgcatggcgaacgtgatgacagaaagaggaaactgaaggaaaatgaggaaagtggagattgtatgagacttagagaagctgcagtaatggaatcaagtggagagaacgttagaaagagaaagaggcttaaaggttcaagttgtgatgaaaaagagttgccttttagtagtgaaagctgtgataaggaaagaagtgttagtcaagaaaatggtagagatagtgcttctcatctaccttctacactgtcctctccgagtttgtgtaaggatttgggctctgaaattatcaaaaataatgtccgcgaaagtaaaggttcactagttgaatcagttgcccctttggccttgagagtgttagactcaggtgagcttaaatcaggaagaatttcagaaagggatgagtaccatgatactgattataatgctggtgagacgttaaaaagatgccgagatggtgaggcttatagtactatcgatagaccagggacaacaaagaaggctgcagaagattccaaggatagagaaagagcatatggggaggattgttcaattgaaaacttaaaaccaaagaagtcagggagatatcctggtgaaaattgcatagagggtgactctaagcaaaagagtagagaagaggagtcatctgcaccttcgaaagataataactggggtctggtgaataacgtgcaagatcttggcactgctgttaaagtaaaaacaaaagaaagcaggagcaagaaaagacctgctagaaaagtgtctatggagtgtaataaagaagactcaagggaatatcaagatcctaatactaagctagatagaagtggtagtcatttttcttctcgacagaaacctgatacagcaaacacttctcgtgggaaaagcaacccattggaagtgaccactgagcaattaaagaataaatcagcttcaccagctcaagttgaagtcttgggtcacgacactgagatatcaaatacaaagaaacagagactgcggaatgataatcacagtgtgacccacgatgaaggttcgcgaaaccaaaagcaaaatggaagtaggcataaggatcatgttggcttaagccctttcaaaaaggaatccacgagtcagactgcctccaactcaatcaaagaggctacagacttgaaacacatggctgatcgtcttaaggtttggacatttttatggaaaatgttgcagtggttacgcatgttgtctcttccttggcttaacattgacagtaaccttttgcagaatgctgtgtccaatcacgagagcacaggtgtttactttcaggcagcgcttaagtttcttcatggtgcctcccttttggagtcatctggcacgaccattgccagatccaaggatatttacggcagcacagccaaactttgcgagtaagtttggcattcaacatgatctaaatttgtgacttttttctactcgatttgttgtgcacctctagggagtgagatagctgaattcttctgatagtcaacgcaattaagtcccccaatttactatttagagggagcctttcactgtgatggtacttgttcatgttgccctctcattttagctcagctgctgcattgtggccaatagatatttctagcatgttaagatgttctagtgaaccctgtcctgatgttacgaaatttttactgtttatgtaacaggttctgtgctcatgaatacgagaaaaataaagatatgggggctgctgctctggcttataaatgtatggaagtagcttatctaaggataacatatacctcccatggtaacataagaagatgcagatatgagttgcaagcagctttgcaagtgattccttcaggtatttattacaatttggaagattcttggattgtctttattctgtgaaattatcagaaaaacatcacagtacttgtagtttccgtatctacaacaaatgggatatatgtaaaccgtatgaggaaaagccactaatttagtggttgaaagacaagtttcgcagaacaaaatttcaaatagataggcggctcgattgttgttttgttaaaaaaggaacttctttcattagattaagacagatacaagattgtaataaagactaaagatgttgttgcctgtgagcatgattatgatgaattatctttccattttgtttgggtttgaaacaggtgaatctccttcctttgcttctgatggtgaaaattcaaaccacacattaacagcggaaaagtttgctttgtccaacactgtgagatcatcccctagcgtaaccggaaaccatgttatctcttcaggaaacaattcctctctttcacagcttttggcatttgtaagttcagttaggttacttttgtgatttgatgaggtgccgtaaaaaaatttctacttaagtttatgtttacaaaacattgtagctgctccagttagttaggctgggtttagacgactaaatatttcccgtctatggaaatatcaacaggtttttagtgaagtagtgggataatagcttgcttgagcaacatgaataggaaccatcatcaaacatatcaaattttgcgtaacaatcttgcatcatataccaagtatttccctggagtcaaagttaatctcaatcgtgcggttgaatgtgttttgtttttgggtgttgcagtcgaaaaacgtaaactacgctatggaagcatcaagaaaagcgcagattgcattagcagctgcaaagggaaaatcgtttgaaacgagatacagtagtaatggtataacatgcatcaaaagggctcttgacttcaattttcaggacatggagaaactgttgcatgtggtgaggcttgcaatggaatccataaaccggtgattatgaattatgtgtcatctcactctaatatcaaaaatgcaaaactccccacatgtcatactcagggagatgaaaggaaagcgaccttggaaaattgaagacaaagaaggcctatatatgtaaacttgttttgctctcttcactgctccagtgtatagcgtttaggaccttgatttgtgagacttgctcaagattaaagtaaccatcttgtgttttgtgtgtataattattaattgtacatatatatatgagagagctttagggttaacaatagtcttccaaggatcgtgaaacaaaaattactcaattgtttcctgacaattacgaatatattttcaagctctcttttcatatcaccatcaccgcacagagtatgtatgtaattgcgacttgaatatgagacaaatctgtttgtttcaatcaccaatccatccaatgatccgacaaaagaatgtaagagtcatttacaaaaccgaaaatccgaaaaccttttctctattacaatttgtgactaagccaaatacttgaaagtgttgggattgtcggtatccctctccaagtaatctctgctgatcaagtcctcaatccgtttctttatcatctttatatcaggctgcaaataaataaaaccaatatgtaaatttccttgatggacacaaattacaagacatttacagaattagagtttttgtatttaccttgaacattttgctgagatgctcaacacattcagagaccaactgttgatgccccaacacttttctactcttcatgatccgaacaagagctgcatcaattgcatagcgtctatctttatcaacatcttcaacaattttcttcctctcatccatcggaggcagaggcacctgttcaagaaaaacacatcatttttgatccgggcttacatgaaaataacaacacaacgctaatgaaaatatcatcataccctaattctcctcatcttatcggtgaacttggagttgaattcaaaggtatcggtgttggagatgtttctcgacattggttcctttataagaatcttgtactttaagcatgatagtgaatgaagcagcctggcaagatcttcatggccgaggtttagctgctccaagatctcagtgtagcttaatctctctgtgttgttgaagagtaaaagcacagcagcctgacagaagaaaaaacaagatatttaagtacaaataaacatcatcaccaagtgacaacaaaccagaaacatacctggtaggtggtaactactatctcaattgtttttttatcgaattttccagctaactgacaagttcctaaagaataaatccatgaaagtctcctggaattggtttttgttccataataggccttaaaagcttcaacacagttgacctgaaacaaaaagaaaattggagctcagacaatcttcttcttttctgtttcaagacttacaaaataaacgacttaccatttcaatgggtagattgaggtcggttgttttgtaacttggccaaaaaccagtagtaagtacagtgacagtgaaatccatccccagctttttggtcttgttaactgataaaaattccacgaagttggtttggtgttcttttgccaatgtcatatccgtcagctatatgaaacaaatcgaatgtacaaaaaaaaaaagcattattaaccttcgttactactaaataagcaacccgttttcaaaggaaataaaactcatgtgactaaccatgccctccatcttagaagtaaactgcgcaccgagtagttctttaaactttgtaagtaaacttctttcgtggtagtcattaccgttgcgatcaaacaagagccgacgggcttgtttcttcctgaaaaactcggcgaaaagatccttgtcacttatataaacaagcaacttaaccacctgtaataaataaaattaaaaaagtcagcatcaaagtgacatatttgtagggcattattagcagtatatatgaaggaagaagaaaactactttctcaagcgtaagttcaagatcttcattttcaagcttctcaattccccctcccgtcttgaggatattatcgcaatacgttgcaagaatttctgcactggacactccagccactgtcttgttacagaagacttcaaatgcctccttcaatgcctacaatatattcaaagaaactatggtcattaaataatatagtgtggaaaacaagatagacatgtgaacacacacacatacacacaccttatggaagaggctgtgtttctgaaaacactcatcgacgtagaccatgaatttatcgtgtaggtcaattaattgtctgataagcacctggtcctgcaccttcagtccactagtacttgcagcctggggaagtacgtaattctcagcaataaaaaaaggagtagactaacatctaatattcgaatgagcaaagaatataaaccttatcagtagctgcctcggtagcttgtttgataagggcacttccctctacagtaatatgttgcttgaataagtctgcaacaggatccagcccttgcggtattggatgataaagcctgtacatcctggcgagatcatccatctgaaagtatatccaaatgctcagtcaaagagtgaattttagaagagaactctttaagaattaaagaaaccaacacaagtcgattaccttgtcgtctcttaacaatgcacggcatcctgagtgctcattttctataagttgttttgcaaccactaccaacaattcattttgtactttctgcatccaaaacaaaaaacaaacaatcaaaacgcttaaacattccctcagtcaaaatatgattattccaaatatataattatatatttcagctaaccgcaactagtttcggctcagtggttgaatgaaggtagttggtgactctctccttctccagtcttagagactcctcagcctttatcatgtaatcaggacaagaattctcctggttccaccttgaggcgttgcgagagtagtaagatgcagaatcttcaagcaagaagctttcaaaatcctcttcgtatttaaccagctctcccatcccattcccacaatagacatctattacgtttttcaatagtgctctatcaatctgttcgccctcgcgttctttatgaatctggcaatacaaattgcgttagataaaccagaataagtaaaccagagctactcagttagagatacttacaagtgctagtacagcgtctttggccttggactgtaactcttgataaaccaggtcgcggaaggatatgaagccaacagcactcagtgttggatgagacccccgacgagtataaaaacggtcaagatattcgaagaagtgggataaccatctaacaagaattttctggttggcccatctcttaacaagctctctcaacatatattcaccatgcttctcacgtatagccggcaacacctaatcacatataaaaacattagaccgtttgctcaagttgtacagaacagcgttacagaatcaaagcccaaacgcaaacatggtatattactcacagtttgtttattgtaatcaacatatactccaccataccgatcatagatctgctgtgagtaatcattaggaggtttctgggtacacagattgtggacagtcctgtgaattcacatcgctgtgtgttagtatccacaccgttaacggaactctagtaaaaacaagaaacaaacattataataagaagacatacgtgtacagctgcatacgttgaaccgggtcaaatggtggctcatcaggcacttcttccagaatcttttgtagctttgcaacaccagcctccatgacagaccatcctgcctccaacacagaatccttcttcgccattatgagatgaacaaggttctgcaataaagtaacaagacatgatgagaaatcaagataactaaaacagaatttacttgttgagatctatgatactcttatatatcatcaaaacacaaactaaaactaatcagactaccaaaagaacaacgataagaagatattacgcatccatcacgatgaatcaccaagagagaaagaagaaggaatttgaacacaacaatcaaatcaagtatttcgcagagaatcaacaaagcacagagaagaagccaacgtaaccctaaatcgttcatacagaaacgggacgtaaccctcgagcagatattgcgaaacagtgacaaaaacagaagaaatcagcgaaagactaaagaagagtacgaaatcgagacatgtgaagagaaaagtgtgcgatcttaaaccctaggttcgtcacgtaccagaaggttccgagagtattactcgaatccgatttcacagggatttggaagagctctgagaatcgagaagttggtgtcttaaagcctagaagagaaaacagaagatattattatataggaggctttgagaaaggcggtgaagttttttgttattgttttctttgaaaataatatatagaaagtagatacacttttttattccttttctttttggtcaaagtagaaaaaacacttacctaccaattaacatttttaagttgaaatctggactctataactatgaacatttaatattatgtaccttaacaaatgtgtttcttctatttctatggtgtagtgatttggaattatatatgtgttggttttttttctcttgtggtaatgataaaaaaggtattatagatttttttattattaatataaaattatgataactatgaagattaatacttttaaggaagtatatcatgataaactgatgttatagtattttgagtttgttctacaaagattgaattttaggattttacttaatttttattgattgatattaattaattgtagatttcatactactattgattcaaagatattaaaaaatatttcatttaaaaaggtgattgacaaataattaaataatgattgtttgttaatatgtgaaaactctagaatatcaatcttttagaacagagagagtattttggaaattagtaaattttaacagaagcatctagaatctttttcttcttttttttttttttttttacatagtacatgtgatgaagcaataaactaaacacctctttaattaatttatattgccttttcaagaaattgaaccgcaattggggagagaaaaaagtaaataaataacctttagagctagtgtaaaatcattagacttttgagttttgatcataatcaactatacaagttttaaactaccgtgaagatttcaccattttgctttgcttttaaccattctaccattgtgtgacctattaccctattagactcttcaaacagtttcaactcaataaaaatctaatggcatttgagattataatgaaacatgaaaatacaattcccaatttcagttccacaaatatacaatagccattaattcagttcagtttttgttggttaaccggatcttttgtaccgaaaccaagatcatggtatctttttacgccaatagttttccacaaaaaaaaaactggtgcatggccatggaccattaccctcctccgatcattggtaccataatttacaaaatttagttctcgacatctgagagactctatgaatcaacctcgaatcctatcaaacatgggatggtccagtaattctctagcagaaggccgacgcttcggatcacgatccatcattgtctgtttcaagaaacatgtcagaatttctgtcttaaatgctatgttccaatgcgtgggacagccatgacaacacacaagtaagaatgcaaataacataccttaagaagttgttgtaactgcaacgaatggccaggaaggagaggaagttttccttctttgatattgagcgactggtttcttgattctgtaagaggagatcccttaatcagctcataaaccgtcacacctaaagagaagatatcgactttatcaaggtgttcgtagtcttcatttagaatttcttgaggcatgtaacgtgcatctccttcttctactggtaagcttttgtccaatcgtgtggcacaaccaaagtcaccaagcttgcaaacaccgttcttaatgtaaatattgtcaggttttacatctaaatgagctattcctttctcatgcacaaaatgtaatgcctttgctatctgtaagagacatagtacaatggtatgtatataagaattcaaagaatcaataatatctctatacttgattttatatgaaaatgaagccagtgtttacctgatgcataatcaccaagatctctctttctgagactttaagagaagatttcttaggcaaagctgacaagctgtgatcgcagagttccagttgaatgtataattgctcattttcaaaccacgaggagtaatatcctactatattttcatgaaaccctacgaacaaaacaagataaaaacggtttaaggctacactgagcttagcttgcaaacagggaataacagaatagtttgagaacaagaaggccaaagaagggactgtactgaccaagagcagcaagagcttgcacttccatcatagctttacgtctgcaaaaattcagctgtgattacttgaacaaaaacgatccaaacaagatgaactattttcagcagatatgtgtctttctcttactaagaaaactagagaaaattatacctctctgaatctagatacaactttcttgtgctgtgtttcacagcatataggcaaccgtccattctcttcaacaccttaaatacccgactgaaatgtccagcaccaatttgctggagaaaccaaaccaaaatacgtaagaagaagcaacataattccgtcatgatcacaattccaagctaaaagaccctttcgcttacccggatttcatgaaagtccgtgagatatcttgacaagccatccccacttgtacttacagggagaaaacctacataacagtatatttagtacagttttactgaagaaaccaagccttattgatttttaaagccttcaggaaattcttgagcaagaattttagggacaacaaacttacttgcacattttgatctctgatgtccaaaagggtcagtagcagtctcagactgattcaacacatacggattcttgaggcaagggggtggcatagcccgacaccgcagagcaactgcagcctgtgaaacgtatccagtcctctctgtttgattagcttggagtttatcccccatcacctcatctgtgtcaatatcatcattctcttgttcatctactctatgttttgaagaccaggtagaatttgaatgatttcctgtgaaactctctgcatcaaacacaaaaaaaaacaaacaaaactgagtaatgaaaaaattaagcaaagaacacactgtcaccaaaacatgaaatcactagatactactagtgtgaatcttaaagcaataaagaattcaatattggacagttgttaaaacaggagatcaaacataactataatgataacaattgtaccacaaaaactgaaacgtatattttcttctcatccgaaaatcttctttttactcatactaaacacaaaatctgaatccaaagaaagcttaccctggcgacatcttttgcttttaactgtatttagtttaacaggagacctaggacatggagaatgatcctacaaaaacaataaagagaagaactttaaatttgagacattggtgaaataaacatccaaatcaacaattttaccttgctgatatctaagccgctcatcaagttctgattgtccggggttatatagtcaggtgtgctggaaaaattaaccagagaagaaattattagtagctgagaccatcattcatcaacatctcacaagcatcttttagctagacataagtttagctttcatttttaaaaagtgaatataagggaaaccatctcaaatctaaagtcagatcttgaaatcgtaatactaactaatcccaaaattcaactacctagaagataacgatagatctcgaattagatatacacagctaagaaatgccagagttaacgaagatttaccagaagaagtcttggctaagaataaagtccttctctccgcaattggcatctgaatcagcggaacccaactgatttcggagttccgaagaatccgaatccaggagaccctgaaacgccgatgaagcaacattcgacgacggacgattttcgaaagaaatcttcgacaattgaccgaattgaagcagagagtgacgctccaatgtcccttccatcttccgaatcttcttcgatgccctggttttgattgtcccttgggttttcctcttcgccaacagtgttcttccgttcttctcgaacatgacgatgaatattattactttgggtggtgattcaactaaggaaaaataattgaaataaattaataaattcaaaatttgcgcgctctcgtcttttagagtttcgagctaaaatttgggaatagtcatctgcatgactgactacggtgcacttcctatataatcaattctggaccgttcaatcttcaggattgaaatattttgctacagataaagtaaaggtgcagcggatcttctgtagagcgtatcatgtacgctttgatgggtctttaataaataatatttttttctataatagcactagcattttttttgttacgattcactaatttaaatattcaactttcttaagaaatataatattttttgttacgattcactaattaaaattttgaattagtattttttgttaattaatttaacaatttgtatttttattggtcaaacaactaaaaagtttctcatttttttttttccaaacatgaattaactctccttaatccttataactaaagaccagtaatttgtactagaatgtgaaattaaggaattgccagattaatgtttgattaattctaaaatgtgggatataaaacatgggaattgggcctattaaagcccaattactaatactaaaagaaagtaaactcagagaagggcccatatccaagcatactaacggcaaggacggtataaaggtgcacgccggcgagatcgatttgaacggtgacggcgaatgtgacggcgaagaaaccttccggtgactgttctacatctctgagaattgtttgcttttgcgatttcttttattgttggattaatttgattttgagttttgcttttgttcttgttggattttcaggggaatccagattccgatcagagcatctctggtgagaactgatgattgcttttatcatctgaaatttcgattttagatcttagtgtttaggtcgctcattgtctaacaagtgattcgcaagctgttgtttggtcttttagaggaggaggaagagatcatcaatgttagtttgggagaaaatgatatgtggccaagcgagaatgcaaaggaagaagaggtaatgtttaatctcaacttgagcttgcataaagctctctgggaactcctgagaatttgtctttgagaaagaacatgggaacttttgattttgcccaattcctgattgttgttggcttgactagttttgaggagctatagggtgaatttgattgtggtttgaccatagttggcttgaatattgtagggaggattaatacttcaaacaaagctcgaaaaactcataggtatatattttgcgatcaagccttttctatgactatcttaacttcagtcaggtttcccgtaccttcttgcagttcatagattaactgattaaggaaagtgttttcataaggagcttatgtgttgttttcaggttgtggtgcgctaaattatgctagggatcccggtgatgtaacggtggaagcaactgtgagtcgttttcgttttcaaattcttttgcgcagcttcttgttctgaggaatattggaatcaaatggtgatgagagaaatttcctttttagctacggaagatatcagaataactaaaccagaattgtgttacagatacttacaagtactgatttgatgccgaagatttaccagaattgtgttacaggaaatgccgaagatttaccagaagaagtcttggctaagaataaagtccttatctccgcaattggcacctgaatcagcggagcccaactgattccggagctccgacgagtccgaatcgagaagaccctgaaactccgatgaagcaacattcgacgatggacgattctcaaaagaaagcttcgaaaattgaccgaattgaagcagaatagtgtcgctccaatgtcccttccatctttcgaatcttcttcgttcttctcggttgatggttcctagggttttcctcttagccaacagtgttctttcgttcttcaaaatttgatggaaagtaaagacaataaataaatatattcaaaatttgcgcgctctagtcttttctcgtttcgagcttgggaataatcagctgtatcaatgactacggtggatttcctatttaaccgttagatgaaaggatagtaatattttgttacagataaagtagaggtgcagtggatcttctggaaggcgtgtcatgtaatttaataaataatactaaaattaaaattaaaattttaatatttatttaaagttaaattattttctgttttatagtataattttaatcattttatacataatacaaatttttacttgttattatggatagatacatcaattttagaaaattaaattaaagtatttataattttttaattcttttattggttttaaaagttaaaaaaaattaaactaaaagaaatattgataaacaagttattcttattgtcaaccttcttgagactcaaaattattcggacagcgaaccttatacttgtttttttatatattctaacataaagaggatatgatatgaagagaaaatcggaaaaagtgttatagcgatgatgacgggtgatggagggtttgcggatgtgattttagatctcatagagaatggatttaaagtggtcgtagtgcacccgactggagactcaaccagccaactattcacattatcacctgactatcatagattgattgattcaaaaagtatgctaaagacatatgaacaagcccgtgactcaaatgaataatacttcattggttccttggattccgagtcctaaaaaatcaatgtgtatgtatttatatctttaaccttttaagaaatatataatgtttttaatgtatttccaaattacgatttagaattagtgtttattgtgattaatttaacaagttttctttttattggtcaaaaaatcaaaaaattatgaaataactctccttatattattgaagagcagtatttgtacaaaaatgtgaaattaaggaatttgctaattataactattaactagagattgatccgcggtatatttcggtttaatattttcgaaaaaaggttaaagatttttattttaattaatataatatatataaatagcatattaagagatataccatagacctatatttttatcaaaaatatttgtatgatatacttccaagacgattttgtatctttttaatatttttatgctataaaaacttaattaattaaaaaattagcaattaattaaatgtaatttaatgatgataatatttagttcagaatataaatttagaacaatagggatgttcactctgattacattggttctatataacgaatgaaattaatagcgttaaaaagacctagaacaatattttttttaaatagatattgtaggaaataaaaactaaatagtatatattttggcccaaaattctatatgtagattaattctaaaatgtgggatataaaaaacaaattataaaacatggaagagttttattgaattgggcctgttaaagcccaattagttatacaaaaaagaagaagtgaatatctcagacaagggcccatatccaagcatactaacgggcaaacgacggtacaaaggcgaacaccggcaagatcgatttgaacggtgacggcgaatgtggcggcgaagtaacttaccggtgactgttatgcatcgctgagaattgtttgcttttttctctttccaggacattgatttgattttctgttttgcttttttcttgttggattatcatcaggggaatccagattccgatcagagcatatctggtgaggactgatgattgcttctttttcttcatctgaaatttcgattttagatctttgtgtttcattgtctatcgagtgattctcaagctgttgtttggtcttttagaggaagaagaagaaaatgatatttcgccgaaggagaatgcgaaggaacaagaggtaatgtttaatctcaactttcgattcgttaagcttgcataaagctctctgtgaactcctgagaagttgtctttgagaaagaacttggcaacttctgatttgccgaattgattgttgttggcttgagtagttttttttgaggagctatagggaatttgattgtggtttgaccatagttggcttcaatattgtagagaggattactacttcaaacaaagctcgaaaaactcataggtacatataatatatccattttgcggtcaagccttttctacgactatttaacttcagtcaagtttcacaaagagcttctgtgttgtttccaggttgtggtgagctaaattatgctagggaaaccggtgatgtaactctggaagcaactgtgagtctttttcgttgcaaattcttttgtgcagcttcttttttggaggaatattggaatcaaatggtgatgagagaaatttcctttttagctacggaagatatcatcctctcttgaagatgtggtcgaagttcctgactcccccgaggagagttatatttcttcttccagaagaactggattagcatgcatatctgctcaggaaaatgggtcagatgatgaggttaccttctaatcttggagtccatttcactcatgcatcttgataagttcttcaaattggtgacagtatcctctacttatgttttgaatggtgattgttgttgccttcagattacacatgatgaacaagtggcaacttggtctgctataagtaaagaaaccaagtcactaatccatttgaatggtgttgcttcagtcgcatcatcccatctatctggcttcagagccaagaaaagtagtaatggtactgttttatccaaaactcttcttggtatttttttaccgtacaagttaaagaacgttgcaccacgtatgaaaactcaaagaaacagatcatgtatgcacgattttctgaaatctctgagttgggtttctaatgtatatgcaggtctcaaagatcatgggaggccaaaattttcatttaactcacatactcatggagaaacgtcatccaagataagtgacatggctgaaatctttgagcctgatgtggaggatcaggctatagaagaggatccaattattgaatgccccaacagttttgatgaaagatcagaaaacaggcagggtgtttctgttgctgagtcgagagaagttttgcacgagtgcactaaagatgcggtacccaagcttcaagaaattcctctagataaaattagactgataaaaagaagctctgaactggtattattgattatacagtggattagcatttgatttgctgctttgctctcagacatctgtttcattcgtttggcctcctttctgctccaggacagcagacatgaagcaaaaagtcggaaatttactcataagggaaattcatctaacttccaagatagtgatactgatgatgaacttcctggacctatggatagtggatcatcaagcgatgatgaggttttattcttttcctttcttgtgatttgggtaatctccttctcctcagtttacagtcaaattcaaattatattgttctgtgacatagcctagttatcaaagctcagtgccaaacatttccaaccagaagaaacaatttgttggggaccggtttgatgaagcaataaaagcttcctctttgagcaaagaaggtctcttgttcggttcacctaaattatctgggtaatcaaactctcaacatcttttatgcaccacactcttaaaatcacacatcagttaacatgaaaacccatttttggttgcatcaatttgcagtggctctagcctgtatggcaagctgcaacagatcatgaaacaagaaaaagagacggaaatggaaatcatgaggaaattgcaaagcggaatcggagaagcaggtaactctttttgtaactcccatataaacaaaatctagttcatacctctgttactcgttccaatttcccaactcagattcatcgggctatgttgatgttaaagtcatgtcaagacacttggagggaaagcttgtcgtctgcaaatgctctgtcattgacctctctggggtttatctctccatctctttgacgcatctgataaacctgctcctttaattagacccttaagcaattgatttagtcacattcgattttgtaggactccctattactcaagaacacacaagctcttgcggcaaaagaaacagaaacaacaattatttttagtccgaaagtttgtgcggatgttgatatcgaaatagggaactttatccgagtatatgcgccatggtcagttttgattccactctttagactcttatcccatgtcactaaactcttttgtgatatttagcttttcaattttcaacaggaaggagttggaagtgcagaaaaccaatgatgtgattattttgtcttcatatttctcaagtttgtaatataactcacacaaatgtcaagatgtggaaaaaacttgcaaatgattttatcagtgtgtataaaaacgataattaaagctctctgattgataacaatcatactgatcagagcttaaagtgttttttgatttatcgtgttttcttctttgggtttactactgattaaaggcgttaatcagttctcacaaatgattcaactcgttttagttatttatacatgaactgtttgttggtttgattcctgtcgtgtgctttggtaaacctcaaagtaaagcataatcatagtattcgtcttgtttattaattagcacttaaaataatggaacaaaaaggataataaaagaaccagaaaggataaataatgaaataaaacggtagatccctagtttacattgtatcattggaacaattcatctctcaatacacaagaaaggtggactctttacgtggatgtcaaggaaaaacaaaatgttcctcagcttttgtattgcaaagaaaaagcatataactaagttggtatatataatagggtttatggaggatacatgcagaaattaaacaagtgtatctatatcgtatatatggactgcttacagatggtgttcaagttatttccaaactggaaacgtgaggcagaagttaaaaagctcggtaagattaattaatatataggtttataacaaacaaacaaaaattaagataattttgatttcagtgaaatttgttctatgattcaaagttgcaggttacaaggttcatggcgatcctttctccaccaacacaaggcgtgtcctcgctgttctccatgagaaaagactctcttacgagcctattaccgtcaaattgcaaaccggtgaacacaaaaccgaacctttcctctctctcaacgtaaggaatgatatcgcaaaatcgaatgattagtaatttcaggatgagatattacacacctaattatagattgactttgtgccgaatcatctacatatacaaaaatttgttatatatggttaggttttgatactcacctagggcttgtcttggttacttgtcacccaaggatttcgagttttaacaatgtgttattgatgcagccatttggtcaagtccctgtttttgaggatggaagtgttaagctgtatggtgagtttaatcttacacactaataacaacaacatgataaacatttgttatacttatatctctaatcaacttttccccctctagaatcccgagccatcacacaatacatcgcatatgttcatagctcaagaggcacacagcttctgaatcttagaagtcacgagacaatggcaactctaacaatgtggatggaaatcgaagctcatcagtttgatccacccgcatcgaaactcacttgggaacaagtcattaagcctatctacggtctagagactgaccaaacaatcgtcaaagagaacgaggctattctagagaaagttctaaatatctacgagaaacgactcgaagaatctagattcttggcttgtaatagctttactttggttgatcttcatcacctaccaaacatacaataccttttgggaactccaacgaagaaattgttcgaaaaaagatctaaagtgcgtaagtgggtggatgagattacgagtagagaggcttggaaaatggcatgtgatcaagagaaatcttggtttaataagccaaggaactaactgaaagcagaagtaatctttacgtgtgaatgtgtgtgtatgtgtatgttgagtttgggtctttgtttgtaagcttgtgcgtgttgtttgttgccttgcgaatcttattttatgtttggttaatatatgtttcatgtaaataaataaagaacaaaaaaagcattatttaaactaattagataaattcagataagattctacgattatgaaaatgcgaaaagcagatataaataattcgatgccaattttgaatttatagatcactacactcatgcattcttgttatgttaagttgcattactccaaaactaccaatatcttctggagtaaccaaatagaaggagggaattttaaaacaagctatattcacacagcctcggatgtggtgcctgaacatattggattggttttgataatatttcaattattttcaattcaaataataataataaaactgaaaataataaaatccagtttcattgaatatttgggtattcctagtactaaattagttaaatcaataaaaatatatttgaaaattttaaatccgaaaatttaaaaggtaaaaaaattattttatttacttaaaaaccttgcaaacgaaaatattttgtatataaaaaaaatagtttacataataaaaatatttgcaaaaaacaatataatttagtcttagtgttaaatttacttgagtgaaaaacagttaaactttatatacctcaattagataagctattaaatctatacctcaatttttttattttattttttggttcaacgctatatcctacctaattagattggctaaattgtataagctagtgcaaaaagttcatataagaacaaaaaactgtaaaaggaaagaaatctacaatttcatgtaaaaaatccaacttattaattaacaaattttgaaaaggaaataaagtaaataataatggttatggattcaccttatctaattataaatacatctttatatgctctatcctctatgagtgtactatagagagtagagagagtagaaaaaatgggttcctccatattattggttttgtttactctcatggttatgctgtccatttcttatgaaccactcaaatgtaattatcttgaattttttttgtttgcttttcttcttgtgctatggttttgaatattcataattgcgttgtagggatgggcataaacgcgagccatgtaccggaaacttgctaccatcattgtaaccagacgttcgagagtagtcgccaatgctttaaatggtgtcaagaattagctcgtaaagatggtaatcatactcatttatatactaattaatgggatggaataaagaagttttgatgggtttcttaattctcctccttcttcatcgtattacatgatgaaatatgtaaaattgcagagtacaagatttatgggtacccttactcaaccaacacaaggcgtgtcctcgccgttcttcatgagaaaggtctctcttacgatcccatcaccgtcaacttgatagccggtgaccagaagaagccgagttttctcgctatcaatgtacttttcacatctaaatatctaactctgcttcatgattaatggttaggtcttaactagggtttccattttattggtctcttcttattgatgcagccatttggtcaagtcccagttttcctagacgggggtcttaagttgactggtgagtttaaaactacattttcaactaattaatgatctaatgaattttgatataatttgttttcgtcagaatctcgagctatatctgaatacatagcgactgtccataaatcaagaggcacacaacttctgaattacaaaagctacaaaacaatgggaacacaaagaatgtggatggctatcgaatcttttgagtttgatccactcacatcaacactgacctgggaacaatccatcaagcctatgtacggtctaaagacggactataaggttgtgaatgaaaccgaggcgaagctagagaaggttctagatatatacgaagaacgactcaaaaattctagcttcttggctagtaacagcttcacaatggctgatctttatcaccttcctaatatacaataccttatggacacacatacaaagagaatgtttgtaaaccggccaagcgtgcgccggtgggtggctgagatcacagctagaccggcttggaagagggcatgtgatgtgaaggcttggtaccataagaagaagaattaatcttataatcttgtgatgtactttcggtgatttctttaagtttgatgttatgaataaaaggcaaagcttttgcaaaaatcactcttttttttgccataatgatttcaaaattccaaagaataatatatacttcaatatacatgtcacaagattaaatgtcaaagttgtttataatgagcatttttgtggatgtggaaaatgtgaaaattactctgttcctttgaatgtttctatacgaaattatagttaggatttagtaatgtatttctccataattatgctaaatttagttagttacttcaatatgattaaatactttattgaccccaaatttgtaattgtaccagattgtcaaaagtgtgaaaccaaattttcttttcttttgatattgttttgtttcttattatctctcgttctatcgaatgatctaactcgagcatccaacgatctaactcgagcatctaacgatccacgtggacccaacaacgtcggtcagagtttgactagtagatgaaggactattcttgtggtcgttgtcacgcggtggctgatattttctcttatttttattttattttaactattttttacgttatatttaagtcttgaaccaatagaaacgacgaatcatacattactcagcttgactttgaaataatcctataacaaaagagcattccaagaattttatccaaaaaacaaaataaaaaagagtattcaagcttggtggcgccgtttgtttttggtttattcactaaagttactctgttttagttgtataaatacacactcccatttgtgtatttcttttcatcaatcacaaagatctctctacttcaataaatctccaccttactttaagaacaagaaaaacacagtattaacaaatggcaggaatcaaagttttcggtcacccagcttccacagccactagaagagttctcatcgctcttcacgagaagaatgtcgactttgaattcgttcatgtcgagctcaaagatggtgaacacaagaaagagcctttcatccttcgcaacgtgagtacataaaacatctgtcaagacaaaatattatatttcatctagatactgaatcttggtcttaacaatcttgaatattgtttttgcagccctttggtaaagttccagcctttgaagatggagacttcaagattttcggtaaatacaaatatatatcattatagtcatgtttacaaatttttggttttatgatcattgcaataatagaaagcagaaacactcaaaaatgttttttttttggtgggcagaatcaagagcaattactcaatacatagctcatgaattctcagacaaaggaaacaaccttctctcaactggcaaggacatggcgatcatagccatgggcattgaaattgagtcgcatgagtttgacccagttggttcaaagcttgtttgggagcaagtcttaaagcctttgtatggtatgaccacagacaaaaccgttgttgaagaagaagaggctaagctagccaaagtcctcgatgtttacgaacacaggcttggtgagtccaagtatttggcttctgaccacttcactttggtcgatcttcacactatccctgtgattcaatacttacttggaactccaactaagaaactcttcgacgagcgtccacatgtgagtgcttgggttgctgacatcacttcaaggccttctgctcagaaggttctttaagtgaatctcaaactatttatcgatcagaagatgtaataaaagtggcgatgacctaattgcccaattctcataaactctgtttttctttttgtgtttactctgtttttctgctgccgagtgtttgatttgaatgtaatcttcgataatgagtcttgatataataaaatatttcttatcttaaagtttaactaccaattaatgttgatctcattcttcaaagttgactatcattctcctaagtcttgaacgttgacttccaaattaggtcgctctgctactcatcaatcactaatcttcttcctttccctaatcgattccaaaccttctgtggtgatggcaagcttcaaagtcaacaatgttattcatatttgtttgagcgtaactgtcaccaaaaaaggttcctagatcaaaaaagttgaaagttaattagtttccgaaataaaacagaggaacaaaaggaagcgtgtttaagataaaattagggttttcttaggaaagcatataaataaattgcatagctgtcgcaaaacctctgtttactcgagtgcgaagaaacgacggaaatggttattaccaggagacggagacccttttcaattctcgccggaattaggattctcatttcctaggtagattacttgtattcacggaatgtaagtcttaactagggtttccatttaactggtcttttctgctcgaacgatcgtcttttaatctctaaactctttactgaagtagacctattttgaactatttttgtttactaatttagcgattagtcatcgacgacctagtaaacttgttataacgagggtatattattacgtaacgatcagttgcttatatttgttatatcttattagggtttttagcctcttgaccttactcatgcaactattgatctgataaacatttttgagtttgatttcgggaaaattttgatatgtctagtcttgctcagagtctcgagctatatctgaatacatctcgtctgtccatagatcaaaaggctcataacttgtgaattacgaaagctacaaaacaatgggaacacaaacattgtgaatggatattgaaacttatgagttcgatccactcgcatcaatacttacatgggtataatccattaaatctaaagacggactataaggttgtgaatgcaagcaaggcgaagctagagaaggttctagatagatttattacgaagaacgattcaaaaagaatagcttcttgactaataataacttcacattgcctcatctccttgattcaatgatccaatttgaacatccaacgatccatatgttttcaacaacgtcggtcaactttgactagtatacattaaaagactattcttgttgtcttatccagccatggttgatattttctccgattatattgttttataagttatatgaacagtatatgaaaatcttgaaccaatagaaacgacgaatcatacgttactcagcttgactatgaaataacaaagagtattcaagcttggtggcgccgtttgttttttgtttattcactaagttactctaatttagttgtataaatacactctcccatttgtgtatttcttttcatcaaccacaaagatctctctacttcaataaatctccaccttgctttaagaacaaagtcttaacaaatggcaggaatcaaagttttcggtcacccagcttccacagccactagaagagttctcatcgctcttcacgagaagaatctcgactttgaattcgttcatatcgagctcaaagatggtgaacacaagaaagagcctttcatcttccgcaacgtgagtaatatttgtcaaaacaaaatattgtttcatttagatactgaacctttagtctgaaaaatcttgaatgttgttttgcagccttttggtaaagttccagcctttgaagatggagacttcaagcttttcggtaagcagcaaaacacttaaatttagacctaatctcaaattctgtttttgacaattgcaattaaagaaagcagaaacactcaacttttttaatgttttgttggcagaatcaagagcaatcactcaatacatagctcatttttactcagacaaaggaaaccaacttgtctcccttggctccaaggacattgcgggcatagccatgggcattgaaattgaatcgcatgagtttgacccagttggttcaaagcttgtttgggagcaagtcttaaagcctttgtatggtatgaccacagacaaaaccgttgttgaagaagaagaggctaagctagccaaggtcctcgatgtttacgaacacaggcttggtgagtccaagtatttggcttctgataaattcactttggtcgatcttcacactatccctgtgattcagtacttgcttggtacaccaactaagaaactctttgacgagcgtccacatgtcagtgcttgggttgctgacatcacttctaggccttctgctaagaaggttctttaagtgactcacaaactgttaatcagaagattgaataaagtggcgatgacctcattgccctaattctcataaacaataaaagtggcgatgacctaattgccaaattctcatacactctgtgatttttttgtgtgtgtctcctctgttttttttttttggtttgaatgtaatcttcaataataatgagtcttgatatataataaaaatatatttggtagcctaaagtttagctactaataagtagtgttgatctcttatgaccaaaaaaaagaaaagaaaattagtgttgatctcattcttgaaagttgacttaattattctaatttttgaaagctgacttgagacttcatttttgccattgtaaggaagaaattgactgttgacttttaatgctttgcaatttaattagaatattaaacttcatagttagacagaatcacattcagttattaaaatatcacaacactaactccaagttaggtctgctactcatcaatcactaatcttaacaccaactccagcttagttatgctactcatcaaatcactaatcttcttcgttttcctaatcgattccaaaccttgtgtcattgtgtgacaaagtcaacaatgtttttttctttgggtctaattcgtaccaaatataagtttctagataatattcaaagaagttggaagttaaatattatttccgaaataaaacagaggaaataaaaagcggataaaagttttgttttttttccgtaagcgtagaagaaaattgaatggctgtggctacagctccgtcgctaaaccgccatttcccccgccgcatctcgaacctttactcgagagttaagcaacgaaggccatggctgccaccaggagacgcgacccttttcaattctcgccggaattgggattcccatctgtttgtttacgcttcctcttcttcttctccgtcgtcgtcgcctccgtctccaaattcaccgacggatgatctcacggcagagttgtgcgtcaatactggtcttgatctctttaagagaggacgggtaagtactagagttcgattcgaatggttttgtggtcgtaggtgaatatgtttcagtcggttttgggttttctatgtcttactctttttggctgctcctgtcttctattgcgacgcttgtatgattatgtataatgggtaagccctaaaatttagttactttccagtcgctagtaattttaaaagggatactttttgtctgatcgttgctagtttcttgatcttaatgtttgaaacttggaaacaaaattagcaattctctgcatacgcttgtactagttataatgttgacacttggagctagcaaaagagtctttgcttggaacagatttagttgatttgtcatgttggattctttcaggtgaaagatgctcttgttcagtttgaaactgcactgagtttggctccaaatcctattgagtcacaagctgcttactataacaaagcatgttgtcatgcttaccggtaagaacctcgaaccatgtactaatgaaactgtcttatatctactgatttgaaagatcctgatgagattatgttttctttcatttcatcctattgtttatcgatttgaggtaggggcgaaggaaaaaaagctgtggattgcttgcgaattgcgttgagagattataatctgaagtttgccacgattcttaacgatcctgatttagcatcctttcgcgcattacccgagtttaaggagctgcaagaagaggtcttgcactctccttttgtatatctttttcatatcccaaggaaaactttctcattggtgaaaatttcttccaattgtttcaggctaggttaggcggggaagatattggcgataatttccggagagatctgaaacttatcagtgaagtacgagcaccgtttcgtggcgttagaaaattcttttattttgcatttgcagcagcagcgggtatctcaatgttctttaccgtaccaagactggttcaggcaattagaggcggtgatggtgctccaaatcttctggaaactacgggaaatgctgcaattaacattggaggtgagtcatagacaccacttgaatcttaaattcctttttttctctgttatgtgagtaagctttcggaacagcaatgtgcaggtattgttgttatggtttcattgttcctttgggaaaacaagaaagaggaagaacaaatggttcaaataactcgagacgaaactctttcccggttgcctctacgcctgtcaaccaaccgcgttgttgaacttgtgcagctaagggatacagttcgacctgtgagtttctttttctactttttactgcctggagtgtgaattagcctttgagtttctgagtagtgattgacactgtcgttaggttattctagctgggaaaaaagagactgttacacttgcgatgcaaaaagcagataggttcagaaccgagctcctaagacgaggtgttctcttagttcctgtggtatggggtgaacgcaaaacaccggaaatcgagaaaaaaggttttggagcttcttcaaaggcagctacatctcttccttcaattggggtaacgaaaagattctgtctttgaaaaaaacaaacaaaatattctcattttgcaaaacagtgatgttctcttaacttgataggaagattttgatacacgggctcaatcggttgtagcccaatcgaagctgaaaggtgaaatcaggttcaaggccgagactgtttcgcctggtgaatgggaaaggtcgaaactttcattgccatttgttgctgatcaaagtttgatagaagaaagatggcaactttgttgttgagtcttaaagatgtctctggttttgtttgtttcaggtggataagagatcaacagatatctgaaggagttaacccgggcgatgatgtgtacatcatactgcggttagatggtcgagtccgcagatcgggtagagtaagtttcatctagaaaccttttcctctcttgctttctcgtgtttgatatctacttattggtttttgaggaggttttgtggtaagtaataaaaactctgttttttcaggggatgccggattgggctgagatatcgaaggagttaccgccaatggatgacgttctcagcaagttagaaagatgaaactgtgaagctttcttaattcttacatattgtatcttcgtaaaaccttagaattgagtagagagaactcatgggagaagaaaaggtctgtattgtttgtttgtgttcagaagtccatgaaattgatatttgtgtatgtgaacacagtttttgcattgtcaaaagaaaatatttctattaatttttatgtgtcttacataccaattatctttttatgatatccaagatctcgatttacttagattggtttgctatgtactctattaatgtcgtcatgtttttatgagacgactcatccgtggttctaaacaatacgaaggccggtgagagtgagaaacgcgttttgattcggtgagactaagaaaattagggttcgctttttagaagtatctattatttaaaacatgattttcgattattgtagttaaggaaggattaggttttattttctttgttttattgggataacgatggcccaactcttttcaatttttcatggtcgttggaagagaagatgaagcatagcttttcgttgtttcagaatatgtatttaattaaaaaattgaactatgataatatatttttgagtatttgttattcagtagtttaaaagttggtaccaaacgtaatttgcaatgactaatattgatctcggtcgatgccaacgatcattgtttactaataaatgaaagtaccaaaattcagatatcgaaatccataaaatgacttttaaaataccttacagaaaagtgattaaaaacttactatatcctagattaaggaacaagtcaattataaattcataatgtcatctagattcagtgctttcagatcataaaacatgatagtgttgattttaaaaattcaaatggataatgagaaaaggcttgacccctccaatattccaaatcgttttggttcaatttctgtcggctctaacaaatattcaaccactcccaacaattctccaattaataataattaactaatttgcataatcattttttttcatttcactgtcaagtggcatttctgttaataccgaaataacacaagtaaaatttcgaaactataatgtaagttcaaaaaattctattgtaactacagaaatcaaaaattctaaacagaagctcgttaaattttcaaaattttaatataacaaagagaaaatgttactagtattcgaatcaacaagttattgtcatgctatgtctcatattcttctaaataaatactgaaacttttaataaaaacacaaaatagaatttgaaaaacaaaacaaaaaaagagaaaaaaaaatcttcaacaactacaaaattaaaaaatcgagtccacgcactcaccatgtatatataaacattaacttaagcaataataaccaaacaaaagaacccaaagaaaggcaagaaaatggacaagtcctttactctgttcttaactcttacgattctcgtcgtcttcatcatctcttcacctccggtccaagccggcttcgccaacgacctcggtggtgtagcatgggctacgactggagacaatggttcaggctgccacggttcaatagcagagtgtatcggggcggaggaagaagaaatggactcagagatcaatagaagaatattggcgaccacaaaatacataagctatcagtctttgaaacggaacagtgtgccttgttcaagaagaggtgcgtcttattacaattgtcagaacggagctcaggctaatccttatagtcgtggttgcagcaaaattgctcgttgcaggagttagacctacaaacaagaaagctatcttcttgatcttgacttatgttttctttgatccatcaagcgttttcattttaattaaatctttaaatattcatcatgtctctgcacaatagtaaagacctatgttttgatcaaattgggttgatttgtaatattttatgtgaataatcatggtcttaatgatccatgaagttgtttggtttttaattattacaaagagacgagtattcaaagagttattacctacgtttgatcaaaccgggtttggtttgtacctcagccgctttcacagtcggattgaataaccggtctcaagttgcaacacacaagtgaccaactctcaacctaacccttaccaactctcggcgcgtttacgggaattagtttgttttgaaaattaatattttatatatattggtcgatttgaaccaaaccggatcgtaagaaattggttttatccatgataccactttttctcttcgaagggtttgagaaactgaaacatgggcttggaaacatagaaggaaattcactacaaaacaaaacatacttgaattagtaacaaaaagcgtgaaacatgcagacattattataacaaactaacatttttggttcttgtctaatcaattaggggttgtctcaataaaacatgtcgcccatcagcttgacaacatggttctaacacggtttcttttaggttaaattggccaagttgctaatcaggagaacactatcttaataattaaatcaagtagttgaaccatccgtaacaacatcaattttataaatcattttcatgtaatttgcaaaattttatagttaaaacttaaaaacgttccatcgttgaaagaaaatagaggtactacaaataacaataatataggtagaagatccatgataatggatttttgattttttttggtttgttaaaaggtattcattaatcatggcaaaaattcgcaacatgtttgcttgcatacgctagaaaagaaagaacatgatgagttacaattttttttaatcttctccctagctatcccaaatatccgaaaataaagaagaagataatattcaggattgagtttctctttttataaacaatagaaaacatcttcttctttggttgatccttatcccaaaaaatgattggccacaaaattttgaaatattttcttatacattttccattccaccattaaatgtctcgtctttctctttttccctctttcaataagtgatggatttgaaccaaccgacttaaaatgggccggtcttaaagccgcaccacactaatgggcctttacctatttacaatttttctgtctattgaacagtagacttactgctcatataattggcgggatcaatacacgtgcttaatactagaacattcggttcgttcctaactgcaaacgagtttggtaatttagttaccccataattatcaccacagttgaccttagttttaagtttgaaattcatctaaaacaccatatatttgaatacattacaaatacaatgaaacatatgacacacttgtgtgatggtttagataaaatacgtattgaaatagctgtaagaatgttacttgaaatgcaataaaacgcatgtcaagttgtcaacatgtaaacccaacaaattaaacgattaaaaaaatcagccacaaaaacaggtagagcatgcagcaaaatattccaatgcttgggtctctatgttaagttctgtaattcgtctttattatatatatatttggcaaaatttaaatattgaccgttggatgtttttggttttaaatctgtaccaataagcgaatgagagaatctacttcttcaatataattccctcaaaatctacttgtgatcattttataatgctttggtcaaaagtgctgattttgtaattaattaatttttgtcgtttctaatacgagggtgaaatttgtttcttaaagtaaaaaaatggaaacttgttaaatgttttagaaatatgacaaagaaaaaggaaaaaaaaaaaaaaaaaagagtggagatacgaacttttatataagaagaagagaaagttgcagcacttgtctgaatattattatttaagataaaaccgacttttgcagtgaaaatctcttctttgaatcaagcggcggagacggcggcggtgaagaagaagaattagagagagagatatggttgatacgagacgtagctcttctgcttccaagcgtttttgtgctgcaacaagttcatcctcacgtcctaccaaacgatccaaggttaagatcgacacctacgttcgtggctctgcttcaattctcatctctgcttgattctggatttcgattttagggagaaaggagtttgatcaattctcttcctcctggatttgaatctgggttttatgaattttggaatttcgtgttgattttgagtttggttgtgtttaggcggcggcggaaccggcatcgtcttcgtcggcgagtgaggtgccgattgataatcaagcaccggtttcggatcctggatcaatatctggagacccggaacttagaacttctgatccgcagagtaacgatgcggagaggccagttactaccaccgatgtgccggcgatggagaccgacacaaatccagaacttgaaggcttggtgacgcctacacctgcaggtttccatgcctgcatgttgtcctttcattatatagaaaaaaggatctctttttctcatatgttttgggtctttttctcatatgttttgggttttttcaggtgaagtggtggtggaagctgagaaatcgaaatcctcaaagaagcggattgctaaggctccttgggccaagcttctttctcagtttcctcaggtttgtgttatttgatttatatgtttgcttgcatgtttcgcattacccttagcaaattgagcctagttggtttaccggaatatggtaaagatcctggcttttggtttattgggtccactttagtctgctgccatgtcaagggatgtttactggctagtctctatctagggatgtttcaacttccagtgactccacttacttttgtccttatttgcaatttcagaaccctcatcttgtcatgagaggctctgtgtttactgttggacggcgagcctgcgatttatgtatcagagatcattctatgcccaatgttctatgtgaactaaggcagtctgaggtatggacactatctgattgatcttctactaccctacaggacaagaaagccttttttcttataaggttttgttttttgcagcacggaggtccatcagttgcatcgctggagataatagggaatggagtacttgttcaggtcaatggcaagatttaccaaaggagtacttgtgttcatctacggggtggcgatgaaattatcttcaccacccctgggaaacatgcttatgtatccttttacaagttctttgaaaagttatccacgttccgtaattagggttgatatatcatctatgaggttcttattatctatattcagtggttattctatttttttcttgactagtgttcagatatttcagcctcttaaagatgaaaatctagctgctccagacagaacttcttccttgagcctttttgaagcgcagagtgcccctctgaaagggcttcacgttgagacaagagcaagagactcttcatctgttgatggaactgcctctttattggcgtctatatcaaagttacaaaatgtcccttttctaccacctactgctaaaagtgtcaaaaggcagcaaaattcagaggtccctgtgttaccttctagctgcgatgattttattctggatgttgacttgaacgatgctgatagtaataatgatcatgctgctattgcttcaatggagaaaactgttgcttcgacttcttgtgctgccaacgatgaccatgatgcagatgggaatggaatggatccttttcaagaacctgaggctggaaatattcctgatcctgcttatgaaattagaccaattttgagtttacttggggatccttctgaatttgatttaaggggtagcatttccaaaatactggtggatgaacgaagggaagtgagggaaatgccgaaagaatatgaacgtccatcagcttcggtattaactagacgtcaagcgcataaggatagtctgcgaggaggaatactcaatcctcaggacatagaagtttcttttgagaacttcccatatttcttaaggtcagccgtgcttataattttctattagatttctttgctattgtggtgttccaaatttggataaacaactttctgaattctcacagtggcacaactaaggatgttttgatgatatccacatatgcccatataaagtatggaaaggaatatgcagagtatgcatcagatttgccaacagcgtgtccccgtatcttactctctggaccatctggtataagggaaactctggacaagtattgtttatgaatcttttgtttctcatttccatttccctaacaaattctcatatggaatatttgaaggctctgagatatatcaggaaatgttagcaaaagcgcttgcgaaacaatgtggggccaaattgatgattgttgactctctcttgttacctggggtaaacttctgttttttttttccccattttgagcgtttgattgaatgcatatttgtaacatatttttttgtctatcttggaatcgtgagcatattggtattaaattggcactctgactattggttccaaatgctttagaagctatatttgtccaggcaatctgttaagttattggaatttacacaatactgctagcattgattctctactgtttctggatggcttcagggttcaacacccaaggaagcagatactaccaaagaaagttctaggcgtgaaagactgtccgtgcttgctaaacgagctgtacaagctgcacaagctgctgttttgcagcataagaaaccaatttcaagtgtagaggctggtataacaggtggatcaacattgagctctcaggctgttcggaggcaagaagtatcaactgcaacctctaaaagttacaccttcaaagcaggtacggttgcttatgtcttgttttttttcctttgtggtgccactttctgtgttactgaacaagcacttccgtaattcttaggtgatcgagtaaggtttttaggcccttcaacttcttctcttgcttctctccgagctccacctaggtattgttttttgtttttattctcttcttttgttcgaggggttttcatctgatgtagattgttgttgtcaaaactcaatttatttcttttttcgtattattctgtctaggggaccggcaacaggttttcaaggaaaagtactccttgcgtttgaaggcaatggatcttcaaaaatcggggttagatttgatagatcgataccagatggcaatgatcttggtggtctatgcgaagaagaccatggttttttttgtactggtaattttcgtgctaatatctactacacatttgcgtttaaaaggtaattgtagtaatgacattcttcctgtgcagcgagttctcttcggttagaaagttcttccagtgacgatgctgataaacttgccattaatgaaatctttgaggtagttctaccactttttgttgcctatattaaatctttgttttcgtagctacagaaaccctttaatctttttgaatgatcttgtaggtagcttttaatgaaagtgaaagagggtcattgatattgttcctcaaagacattgagaaatctgtgtcggggaacactgatgtgtatataactttgaagagcaagcttgagaatttaccggagaatattgttgtcatagcttcgcaaacccagttggacaaccgaaaggaaaaagtaggagttctatttaatatctctttttgtatgcttaacctgtcttgatagacttaagttcttctcaacatggttagtttgattgttttgatcgtttcattttcagtcccaccctggaggtttcttgttcacaaagtttggcagcaaccagacagcactgctggaccttgcatttccggtatgataatcttttataatttctagattataagacatctaatattctttcccctggattgtaacttgtaaatgacgatgcattatatttagagtgatttttcatgtcatctacaggatacttttggtggtagactgcaggataggaacacagaaatgcctaaagcagtgaaacaaatcactaggctatttccaaacaaagtgaccatccaattacctgaggtctaagcctgtactattttatttttttgtttaccatttgtttctttttatttcattttcgtttgtccttaaaacataacaggatgaagcttcgctggtcgactggaaggataaacttgaacgtgatactgagatcctgaaggctcaagctaatattacaagcatccgtgcggtgagcatctttcagtgaagtcctatgtctatctaaatacgcctgcctttttgtgtttccttatgtctttgttaatggttcttggcaggtccttagcaaaaatcagctagtctgccctgacattgaaatcttgtgcatcaaagatcaaacccttccttctgatagtgggcatctttaacttttccttctttctttctttctttcttgagcatctggttatttgtctaatcgaaaaccatatgattaataggtgtggagaaagtggttggctttgctttcaatcaccatcttatgaactgctcagaacctacagtcaaggacaacaagcttatcatctcggcagaaaggtgagctgaaaatattgatcatgtggattcggagtgtgatattttcttgcgaataactgtttggtgtgtgttgcagcatcacatatggcctgcagctgttgcatgagattcaaaacgaaaacaagagcacaaagaaatctctgaaagtaattatatagaaatcttatgctattttgactccaaattaacttctggattttaacaattattatgctatattatttcaggatgttgttacagagaatgaattcgagaaaaaactactatcagacgtcattcctccaagtgatatcggtgtttctttcagtgatattggggctttggaaaatgtgaaagataccttgaaggagttggtgatgcttcctcttcaaagacccgaattgtttggcaaaggtcaacttacaaaggtacctttcttgctttttaaaatcaaatcgttgtttcattcaatattctatggaaactgaattataactgttttttttttcatgcagcctacaaagggtatactattgtttggaccgcctggtacggggaagacaatgctggcaaaagctgtagcaaccgaggctggggcaaactttatcaatatttcaatgtccagcattacttcaaaggtattgatcacttaaaacggttacctgactctatagtgttttctttgagattagacttgacttgagatttcgtgtagtggtttggtgagggagagaagtacgttaaagctgttttctctttagcaagtaagatagctccaagcgtcatttttgttgatgaggtatgttgctagacgttaagaacagctctcatacctgtttattacagttcctttttctttctgaatatcttttgaacgggatcaaaattatgtaggttgatagcatgctgggaagacgtgagaatccaggagaacatgaagctatgcgtaagatgaagaacgaattcatgataaactgggacggcttacgcacaaaggataaagaaagggttttagtattggctgctaccaacagaccatttgaccttgacgaagcagtaattagacggcttccccgaaggtaatgaatgataaactgtcaattattctctgatttctgtatctttgtcatctttgaagcgttgcttaagagaagatcttctgtgcaggttgatggttaatctgccggattcagcaaacagatcgaagatcttgagcgtgattttggcgaaagaagagatggcagaagacgtagacttagaagcaatagcaaatatgacagatgggtactcagggagtgacttaaaggtctgtaacttcctccatccaaagcacaaactgaaaacccatttcataaaaatccacattctaatcaaattgtctggtttgcagaatctttgcgtgaccgcggcacatcttcctatccgagagattcttgaaaaagaaaagaaggtttgtctctgttttaaaaatcataataatggttatgattgtggtttttgaaaccatggttttgttgactcgcaggagagaagtgtggctcaagccgaaaaccgagcaatgccacagctatatagcagtacagacgttagacccttgaacatgaatgatttcaaaaccgcacatgatcaggtttgagaaactgaaacatacaaattagtttcaccatttggtctagttttgggatataacggagtgtttttttttattattgttggaaggtatgtgcgagtgtggcgtctgattcatcgaacatgaatgagctccagcaatggaacgagctctatggagaaggaggctcgaggaagaagacatcactgagttacttcatgtaaagagaaaacagagaggttgtgttttgttagtttatatatatatatatatatatatataaatctctctctaatttatatgttgtacagagagattgagagagaagagagtcagtcccctcttgaattgtctaaaaaatgttttgctcggagctgcctcaattcttttctttctttctccaaaaaaatattctaatatcagatgtacaatcaatttaaatgcttgatgtgatatgttactatatatatatatataatgtatataaagtttagatatttttatactcctaattttatttactttcttctttagtttttggtggtgaaattcattattgtttttataaaatgtcttcaactggatactaatggttgattaataggttgagcgaaacagacagatctgaaatcaacggtccacgcaggaataaattctattttaaacttaaatattttgtgatattttgaagtcttttacaattgaaaatattttgtaataccatctctaaatctccctcttttgatctccaagtcctccatggttttagggcttttgctttgccgattgatacctaggctctgatttgatttttcctttagaaaactttcaaaaagtttcagtagattggcttaattggctctgttggtccttgtaaagaggataccttttcgtggttggaaaaaaagtcacgttttggcgaaacgctagtttaatgagatagagacgtggccatctttgaaaagtcaacgtttggtcgcaatcggtgacgtacactgtctatatttaatttttcagcaaccacagtgatttattgaatgaatcaatacataacaacaaaattatcagaaacacaattccttcttcttcttcttcttcttcttgtctccgatgtcagccatggatgttatgattcactcttcaagctttctcctcccttgcgacgaaactagtacagggacgagatacgctctcgttgttctgaaccagagtttgccacgattcactcctcttctctgggaacatggtactgatgaatcgctctattcttcagaatatatatgactctgttttcttggggttattctaaaattggtttcgaattttctgtgtagagcagcaaaacttcgtctctgtgctgatggaggcgctaatcgcatctacgacgaattgcctctcttcttccctaatgaagacgctttggccattcgaaacaggtccaactttctgaagctgtatctctcgctctcttactctttcttcggatttgaagattattattcaaatttagtgatggtttattggaataattagtctaaatttgagctggagatattttttttgtatgagttcatagattcaccttcttcttatctttatgtatattacatagagaaagatttcatgaagaagaacttgtattttaggtataagccggatgttatcaaaggagatatggattctatacgtcgtgacgtcctcgacttttatataaacttggtaagctcttagtctgtgatcacatttttagaattgttatccattagatcacaacctatgtgtgtggtgtctttgatagatctaacatgctttcgattgttctactttgtgtgtgtctttaatctctccagggaactaaggttatagatgaatctcatgatcaagacaccacagatcttgataaatgcattttgtatatccgtcactctactttgaatcaagagacttccggagtaagttttttttttattacagaggaatgctttctgcttctctttctctgcaactttttcaccttgtttttatgtttttcttctgtcagctccagattcttgccactggagcacttggaggaagatttgatcatgaagccggtaatctcaacgtcttatatcgatatccagatacaaggatagtccttttatctgacgattgcctcatccaactccttccaaagactcatcgacatgaaatacatattcagtcttctctagaagggcctcactgtggactcatacccattggaactccatctgctaaaaccacaacctcagggcttcaatgggatctcagtaagtaaacatcttgcatcatcatcattataatcgtcatcatcagcatcatctaactatagtttatatctgttctttttttataatcttcttaaggcaacactgagatgagatttggtgggttgataagtacatccaacttggttaaagaagagaaaatcacagtcgaatcggattcggatcttctctggactatatccatcaagaaaacaggactttccatacaagaccatacaccttaggcccggtaacaaaacacactttagtatattatacgctactatgatgttcctgatgcaacgaactagttcaacattattgtgttgatttgttgttcactgtactagctaataatacttgtaccattactgtcgttatacattaagatgcttttttctttggttctgtcattgtttatgtggggctttgttgatttgtcgtactcaaaattgtgactggatgttggttagatattggaatctacttgtgcggtatatgagaaaagacaaaattcaaaaggtgaatgactacgattgagcatatgtcatcaaccatagttcagacattaggcaccatgcttgacacggttgttgtctagggatggagctcttgtcatcgtctctgcttcaaatgaaacttgctatttgttcttttaaatcactcttctttatgttggatgagctctttagatctaatctctttccatattataacaagacccatggctttccttatattttagtaatggtcaacgaccactggcactaaagagtgtatacatactaacatcaaagaagacaatgatgtggtttggataatgaaacctctgaacatagccatggagttgtggatataggggtaagaatcaagagtgaggatatggtagcattggtagcctgatgtcaatcaagtcctcagaatctggcttctgctccaaaaacaaacattgcctgtagcaaaacggacattgttttttgtatacaaataaacctgatcctaaaagaaagcatagaaccatttggaataaaattagtaggccaataatattgacaaaaagaagttacatacttaaacaaaccaataaaaaaagatgattcttctaaccgttatatattataaaaaaaggaaataaaccaaaacgaaatttcctttagtttagattgatattagtaaaatggaaatcggatctaagtttagatttcctctataatcccaatggttagattaataaatataatcccaacggttagaaccaagaaccttgtttgcttattatcatcaataaactctcacgcattctcttcttcttcttcttcttcttcttcttcttcttcatacttgagaaatcaaaattctctattcacctacttctttcttatttttcttcttcgagaaacgaaagccaaattctatcatcattctcatctatttctcttcgccgaacgacattgaagtaagccgtgagttcgagttcatcatcattgattgaataaccctctccaatcgagatcgatttcagttgaactggatttgattttagaatctgaagatgataatcaaactatcaatcgcctgacgaagctaatgtcgacgccaacactccgatgaaaaccagcctgagagcaatcgatccataagtaacggacgtttgcttcttcgccttcgccgtcagatctgctcgagtgagaggatcaacaagaggaagatcggaaaaaattctgagagtttcgtctaagggtttcgaatggacttttcgagcggaagatcagaaaaaattctgacgagagaagacaactacaagagaacggtggacccacattaggctttcgaatggactttgctttttgggccctttttgcttcccaagcccaacaaggtattttactttcctcctttcttatttttgtttttctcccttttttattttcttactaaaactataagtttttcttttataagtgttaaattttaaaattttgtgtaaactaattgttaaatttttataagtgttaaaatttttgtgtaaatttttataaatgttaaaattttaaatttttgtgtaaatttttataagtgttaaatttttaaattttataagtttttcttttataagtgttaacgtccatacccctaagaggcgtcatcggttcaatatgatttacacttaatttaattttttaacatttatttttattttattcaaaaatatttttaaaactatattttatattactactagtaaaactataaggtttttaaactataaagttttttcttatatgtgttaaacttttaaattttgtgtaaactaattggacacaatgtccaaacccctaagcggcgtcatcggttcaatatggtttacatttaatttaacttttaacacttatttttattttattcaaaaatgtttttaaaactatattttgtattactactattaaaactatattttgtattattactattaaaactataaggtttttaaactataaatttttttcttatatgtgtaaattttttaaattttgtgtaaactaattggacacaacgtccaaacccctaagcggcgtcatcgttttaatatagtttacacttaatttaactttttaacacttatttttattttattcaaaaatgtttttaaaactatattttgtattactactattaaaactataaggttttttcttatgtgttaaacttttaaattttgtgtaaactaattggacacaacgtccaaatccctaagcggcgtcatcggtttaatatggtttacacttaatttaactttttaacacttatttttattttattcaaaaatgtttttaaacctatattttgtattactactattcaaactataaggtttttaaactataaagtttttcttatatgtgttaaatttttaaattttgtgtaaactaattggacacaacgtccaaacccctaagcggcgtcatcggttcaatatggtttacactaaatttaactttttaacacttatttttattttattcaaaaatgtttttaaaactatattttatattactactattaaaactttataaagttttttattatatgtgttaaaattttaaattttgtgtaaactaattggacacaacgtccaaacccctaagacgcgtcatcggttcaatatatagtttacaattaatttaactttttaacacttatttttatttcattcaaaaatgtttttaaaactatattttgtattactactattaaaactttataaagttttttattatatgtgttaaaattttaaattttgtgtaaactaattggacacaacgtccaaacccctaagacgcgtcatcggttcaatatatagtttacaattaatttaactttttaacacttatttttatttcattcaaaaatgtttttaaaactatattttgtattactactagtctactattaaaactataaggtttttaaactataaataatttcttatatgtgttaaatttttaaattttatgtaaactaattggacacaacgtccaaacccctaagaggcgtcatcggttcaatatggtttatacttaatttaactttttaacacttatttttattttatttaaaaatgtttttaaaactatattttatattactactattaaaactataaggtttttaaactatcaagttttttcttataagtgttaaatttttaaattttgtgttatctaattggacacaacatccaaactcctaagaagtgtcattggttcatacctaatttaaatttttaacacttatttttatttatttaaaaatgtttttaaaactatatttttatattattactattaaaactataaagtttttaaactataaggttttttcttataagtgttaaatttttaaattttgtataaactggatacaacatccatatttaaaaatgattttaacactatatttttatattaataaaacttcttataaatgttaaattattaaattttgtgtaaactaattggatataacatcaaaacctcgaaggaggtgttttaagttcaatatagtttacatctaattttaatttttaatttttaatacttatctttattttattttaaaaaaattttataatatttattgtatttttgtgtaatttacacaaaattttgaatccttaggattgttgagttcacatttggtttttgtataacactcacatcgattgtagacttgtagtgagtttgtgagatgctctatgttctccctaacttttttttctgtctctaggcacgatttcacgaaaccggaatctgtggaccaaaagttacctagagagtgattatttttgagaaaatagtcttcttacgagtatgttaaatctaaaattataaatgaatgtgatttttatccacacataaccttgagtactaaatacgaattttgtaaaaatgaatcttttctttggaataagtttacttcaaaatttacagtgaaaaaattataaaagatccactgaaccaatcaaatattgtatctattaccgtatatcatcgaccggtttaaaataatttgtaataggtaaataacagaacgacgtcgttttagagaaccgtgtaaaccctttgtagttaaaccctttccgccgcgaacttcatctctctgctttttcttctccatcgcgaaaataaaaaatcagtgagagagatggcgaggtcgagaagaaagtacaggaactctagggctaaagttcgcgttgctcttcctaagaagaaccctaatatctttaaaccagctttcaacttccctcccaagctccgcgctctcatgggagacgatgtccctgaatgggacgatcaagctagcgttatccagaactacaaatcctttggcgtcatctctaaccctaatttgcttggtatccgagctcgtaccgaccatatgattcaggatgattccctcaacgttcctccacctgtagagccaccgactgatgatcctattgctaaggagttcgagcccattgattctggaagcgaacttgaggaagacggtacgtttttctcctctgtctttgattcgattttagattcacgctggattgattagtttttcgaagttggtatttaggaaattcgaaattagggcagaaatcagggtttggagtggtgaatttgggagaactaattatacctatgaagaatcttagttcttggaacaaacatcattagttcatcattaacgatatgcttgtgtaaagcttcagattctctactaattcatgtctatgaaactgattttacctacgaagaatcttagtttgcttgatcatcatctctgtaaatgcttgtctcaagcttacaatattagtagacaaaatatacagagaatcatgaatatacgttgatgccattgatgaaaactacacaatatttatatgtagctgttattaagcaagaatctgcttcattagcttttggattcattactctttcatcactatgtttattaagcaatttacagagttgatgcaagtttcctttttgtggtaactaattgttgaaatgctttgttgtgagatgtgtagatcttaagacagcattggggaagcaaagaaaagatggaaagagtgctcctttacagccgcttaccactatgcaacgcacacatataaggcgtttggtggagaaacatggtgatgacattgaggttagatctataatcctactgattctatcatttttgctctgtgtgatgatactctttctaagttctaacatctattcctttgaacagggcatgtaccgagacaggaagctaaactcgatgcagcattcggttgcaacacttcgaaagctatgtacgagatatcagatttacaaagacaagaacccgattttagtttcatgatgatgatgatgatctctgtatcctttgttcaattttgttataaacttgcaacaacactacaatggttatgaagtttctataaatcagaattcagtattttttctattcagaagcatctttatgaggtgaagaggacatatgcaaacttataaaccatatttaatgcttaagagttttcagttttttcacaaagaaatcgtcactctctgtgcaaggaaacacactcacagaggaaagcaaatcaaaattaagattatttttactatcttattatcaaaatcaagaatctcacttaagaagccacaaatcaaactatatcatattccagtgaagcttcggcattggtaatcccaatattcctttgcttgttgtaacctttctgctctctctgttttacgcctttcttcccaatagtctctgcagctgcattattgcaggttttggaaattgtaagtcagtctttttagagacaggttttaaagattaaaagaagaatggttgtatatgcatttaccttcgcttaagtaaaatattgagctcatccaagtgaacagcacctttataaaccccatcctgatatcgaatgggcgaaaatacagagatttagtgcataaaacaaggaagactagtagactactaagtcgtaattagcagtggagaatgtgtctaacctcacggcaaagcgggcatttttcagttgcttctgcggttttcaagccatcaactacgtttactgatgcagcagagcaagcacacatgtagcaatatatgtgaccgcaggttagagatattggatcaaacaccgtgtcctgtttttcgccaatcaattgtaatccgtaagttaaagacttattaatagcattacatttaaaaatattcattgctaaagacttagtctttgaagtggaacctgcaagaggagagtggaataacaccttgacacgacaaagttaagactctatccctataggctgatactttcttctatatttcagattactaataagtcaactacattgagattcttcttaagtttcttaccaggcatattgaacaagtcaagtcaatgtcaactttgacggaatcagagagctcgcaggaaagtaaaggcttcccatcgtcgaaagtcaaagcgcaaccatcaaacaatgcatgaacaggaggaggaggagaagttatagtagctccagattccttcttagattctttcagattgatgtgaaacgccataagctcgcagagccacggtgactgaaggatttctattcgcattttctggacctgagtcttaaacgcttgtccttgcctagactcatgaatctgcaacacaaagatgccaaacatattgaataaacaagtgcttaaaaagaccatcatcagtctttggatcttacaatagtagatgattatcaaccttgtcatatttcttgaggatttttcgaatggcgacggcattgatgagagcgtaattaaccaaatctttaccctcttggatcaaaccatgatggtccttttttcgactgttgcctctgagccaagtaagacactttgtaaaaccagaagctaaatgaagctcaagaagcttctgagcatgctcgttaaaccatccaacaacatcttccatttccttgagaagctccgggaaaaaagtcccatcacaaactacaaaatcaatattgaattctcaaaccaaaaggagaaaagcaggggatgatgattcattcacagggtaattatgtcgaacagtacctgggcattcacgagaacaattgtggttgattgcatcagtaaaagaaattctagaaggaacatgatttctcctgcatctcttgagaatcttcttgagtttcttaaacccaacaccaggaagattcttcttctccttctgtccttgcatgtactcttcatacttcttacaaaacttcatttattttttctctgaatttcacaactcaataaaacagataaaggttacaaatttagatgaccatcaacaaacaaattcagccctcaaacaaaaaaaaaggattttgatcaacaaaacagagtcgctcttatctctttccctatctctctcttgcgtctcgtgttggcttaattatgtatgaaaatgaaacagaaacaaaaacagaacagagacgtatttatgaataaatgaaggtggtggtgactggtgaagtcggcggaaataacaagttgtgaaataaaagaatatgagaaaacaaaaaaaaagtcaaaacgtttgttttgggaacatatcttcttcttcgttaaaaggtgaagtttgtgttatgagagttatggaaatatatattaattcttctgtgcaactattggtggatttcaatttcaatgacttattattaatgtagtgacagactcgttacgaatacattaaagatttgggttttttaaaattaatgagagcacatttgtgatttgttgtatatcacactcgatctatttctttatgccgcgtggatgccaaagtctggattctgtgtatatcctattcgttgaatttatttagtctcacatttctttattatcgtaaactatataaaattatgatataaaatctgcgagatattttaccattcaagaagggttattttgctataatttttgttgttttcttttacgtatacatgttgatgggaaaaaaaaaactctgatgtaaagataatatataaaatatgaaaaccactgtgtaatttgggataaagatgccaccagaaagggcccttttgttggtttttctcctttgtggggtcaaattagaaacttggaaatagttttaagaatataatatatttttttaggaagtttaggccatttccattggtaagatactttaaaagtttctcaaaaaaaaaaaaaaaatattttactatgatttagtttatgtccaataataaacacacatatatacacatagtctctcaaaaaaaaaatataataatattttactatgatttagtttatgtccaataataaacacacatatatacacatagtctctcaatcattattctaaagtttctctgcagagaaactattctcaatctctctcatatctctctcctactttattattattttatattttttagttaatgaaaaactatgtgagagactactcatggagatgctcttataattgacttggattggatttcgccactaaaactctgctttatattattttcaagccgcgcattttgtttattttaactttacgacccccttaattattactatgtgtatcatgattttgcactaacatttttcatccagagtcacccaccactgtccttttttctttgcttacatttttttttcatcttacaaaaaaaacaaaacaaattagaggtatatgctctagtggcaaagaaaatttaactttgaaactttaatttcttttagctttatttgaatggtgtaatagtgatgcattaaacccttgcattttaaatgtttaatagaaagctatatgaattgtactatttcttactacataatgaggtaatgtgataacatataatgtttcatcttgctagtgttctaggtttgaacgtttcaattcactatttactttttgaaaagctccaaaatatcaatttaaagttccaaatgaatcgacaaaagttccaaaaataaagtggcacaccattcatttgtctgctcaagtggtcatttgttttatacaattcgactggttatgatcattttaaggcctagtggccagtgggatttgatgttttcaaaaggaaaacagaaaatacgcattagtcaaatattttcgaattacacggttactaacttagcatacaatcattttcttatacattctaattaacaatacaacaatgtacgatgtgtaacgtattaaacaagtaaataaattgatgcctttaagatttgacaagaaatcagtcgtctcttgcgtaactaaaatgcaaaagacactcaaggaattataggtattaagtacggctttttatacgaaagcgtatgtcttgctttatacgcaatattatatatataggtcaaacacgctatatccagctcttatgctaatccataagataaacatagttttgaagaatacataatcacctttatctatcaaagagaaattgtaataacagactaatacctatttggctttttctaacatacaatgtttatatcttgatttattgtaaagatgataaagaaaaaaacatagtaatgattttatttagcaaaaataaaacatagtaatggtttgcatttccgacaactaagcattataaccattgaaatcaaatgatcaagacgaagcatatgatggatggtgcagtgttcccttgaggaaggaagagtaccagtgagcagagagtttagggctcctcttaagagaaggatccttgaagtccacgtacaataatccaaagctcctctcgtacccaccaaatagctcaaacacatccatcaacgaccactgaaaatacccttttacgtccgatcctttcctgctgtgtcaaattttatgcttagaatctgactgacacatccattgaatgataacttgaacaacttttactgttacctgagtgaatgaagcactgctttaatgtacgagctcagatacttcacccttgttgtgtccacaagtgatgagctgtgaggagtcatttgtcctgtaaatgaagaatcaatcacccgacagagagagagagtttaagacacatgaagaagcaaactaaagtctgagagaggcagagagagataaagagagaccattctctaggatatagacaggagggtttccataagtttctttgacatacaaaagtatctgttgcagactccatggtgtatttgcatactgaaagaagcaaatcatcaaacatcagtcttgtctcttgtaggtgatcacatataaaattgatatctacatacaaacctcattctcgattgatgtgtttccaaccactgcaaaatggagaaaccagtgagcctgcagatttttaacttttaattctcagacagtatcatataacttacaggtcatttccacggctatatctgtgttgaaatcctggagattaggtttcagagaggaagagttgtctttgacataaagcgccatgtaatttatcactccaacgaaatcaaatgcgcctttaacttgttctgactcctcctctgtaaaagctggcaatctagacccaacattggtcttcatcgtctcaggataatcaccaaacaccaacggatgtaaaatccttacaaaaaccgaatcaagaaactcagcgcgaatcaagtcatagtcaatgtgatgcttcaacattaggttcttaatgacttaccaaccaatatagaagtcattcactctagctgttgcctgcttatccttcacagagttagttaaagggacagctccatatgtgtatacgctaatgcctactgatccatgttgcttgtactgtgtaatgaagaggacataacaaaatgcaatgcatatggaagatgggagagaggcagagagaagaaccttgtactgttgcttgtataagattgttgcagaagcgtgtgcgagcaacatgttgtgtacggcaatgtaaggctcaatggaagagtttcctttggtacaattaagtccaaatggaggagagcatcgagcaggcggtgttattccctggtcataccctccaagggcaaacacattgacctcgtttatagtagtccaatgtgacactctatctccaaactccttgaagcaagtatctgcataagctgtgaagtctctcctataacaataatcattacaaaaagattgatgaataagtttgatatcaccaatcaaaaagaaggtgaaaggagaagaatcatacacgatttcttggctgagccaacctccatactcatcttctaaggcctgtgggagatcaaagtggtgcaatgtaacatgtggctggattcctggtgagtcgaagaagtaggaaacaccatgagaatattaggtttgtttggtcttgtagctaattaattaacagggtcagggtacaagtttaaccatgagtgatcaattcatcaataagattgttgtagtattgtagccccttgggattgattggtcctcttccacctgaaataaaatcatattcttcatcaatccattgataatgtttcgcttcgattggtttatcaatcgagtcgtggaaaaatcatacttggtaaaagccttgaccaggatatagagaatctgtaagcctccaatcccatgtctgccatgagcttcacatcttcctgcaaacgtttccatctgtcacatggagacagagacatatattatatactagatgggaagaaaagggaccttgtatttgtgatactggtcacatgcaacatttccagctgctactccggagtgtcctgaaatgaaactatatatgtaaacctcttgccaaaattctcgagctattcagagaaacatcaagagaagaagaaaccaaaccggcatgagcaaaaacatcccaaatgctaggagttctcccatcttcgtcagcagctccttccacctgttggaatttatagacaaaacactggtttatctgatagtttctgatcttttatcattctaacatgaaggtgaatatatatgtaatgttacatctcaggaaaaatactcaaaaaagggttgaagaacctgataagctgatgtgccagagccaaagacaaagcctggagggaagtcatttctgctgtatttaagcgacgaaactgcggttaaagccaaagccagcagaggaaggaacattagactattgctcaataacttcatctctctggtcttgtcaccgtacagagcaaaaaaactttagcaagcaagaacaaatacgaacggtgaaccccttgtgatagattatttaagtactttaacaagcaagtacaagtttggttgaaacacggaactgcattcgtctgcttctaggagtgggtccacttgttttgacaagtttgatgaagaagtaaagagcaaatcgtccaacgatatagaaaatagggagcagcattagctttcaaaaggctttttgtttgtttccttagctttagtatttttttgtttggacccacatgttaacatattgagtgatcaacaccatagtaccacactctctaagtaaagacactttcattatctctcaatgagcagcgaatacttttcaaagagattgttgattgccttttgttgcatgttctatatcatccaataaaatcaagttttgtcttcaggcttatatagctctctaagctaaagaggacagagaatccaaatcaggcactactataccaaggatatagaactataaagatggaatcgaacatgatatgattgcaaaagagcatgagaaattagggaaacgaacaaaggactgagttcaccacaaaaaccaagttcaaagcagacgtctccagacaagattcaccggttactggaatcgtacagttcaggctatacagtcagattccggatcaggtctaaacacgacgttgtttaagtgagagctttagttaattaagaaaaggatgaatcagaaggagggaaaagaaacgatatcttcaaaaaaaaacatcattctcaaaagtaaagggatccagaagacgaagaatggcaagaatattacaaaatgatagtgcaaatcaaacttgtcgcatcttctacagtcaataagcgttcagatataatccacttcaagaaagtagaatttgttttgagtagcaagaagatgcttctctcttctcttttcacctggatatctcccattttacctgcaaacaagagctcagattcagatttacgcattatcaaacaaaatcagattgcaatgtttcatttctaagaaagattatgtacctcgatggactcctagtgtggataggactcttggctggacttggcttgctagggctcttgcttccttccttctgaacctgtgatacagaaaagctattaagataacgaacaatgtaaaacagaagattatgtcaaaataaaagaggggtcacaagttggatcttgttactcacagaaggtagaggagatcttgatcttgaacgcgatctgcaaaagtccaagaaaagaaactcagattcaaaaatccaaacatgttgtgttttatactgttcagcaaggtcctggagcctctccttctatctcacagagattaagaagttgcaacaaataaaaaaaaagaaacataaaccaaactattctgctacttagttaaaacataggtgataggacagaggttttataagccatgtggccaaaaaaacttgtgttgccaaatgagccacggacgtcccaagagaacccagattccatattgtcaatccatcgagccaatatagttttacagaaatcccgatataatattgtgatccaagtgatccaatgtctccactgttatccatctagcagcaatgtaaattagtgaatactatatcaggaagccacgaaaagcaaagtctctattccaaagtttcccatacctcttagacgaaacacttgtcaacaatcaatttccatccagatattaatttccattttctagtcgtatgtaaatccatatctatgaaacaaaaccattttcttctcaggaaagaaaagagcatatttaaaaatgctaaaaatgtaaggccaatctcgcaaatcttaaccagaaaagggctaagcatctaaatataaggatggagtaagaagggacaataatgacgagcaaacagcaggtgtcaacaaaaaaccagtatatgctcaatcaacaagaactttgagcatcaacaatgacttttctaatcagattttcataaacttcacaggaaaatctaccgactaagtaatgttgcctggtgcattctgaaaaggaatcaaatcattaccttcttggagacggtgaccttgacttcgagcgggggccaggagatcttgatgtagattttgcaggggacctacgtgaagactttgccttgggacttctgctcctgctcctgcttctgctcctgcttcggctcacgcttcgtccacggctgcggctgcggctcttagaataggatcttccccggctaggactcctagaatccttccttgaatcatattctctaacctaaagagatatgaaacaaaatattaaacacaacaatgaaaagatcacaattcacaggaaagtcagcttcaactaacccggacatatccattcgaaaacgcatttcgaaactctgtgtcgtcgagctttttcagctggggaaattcaagagtgagagctaatcagtgattaaggatgagtagaacaaactctcaaccacagaagagaaacagggaaaatagcttaccgcatacttcatgtcctcatagcaggtgtaatcaacaactccagttgtccctacagtaagattgtccaagattaaaaccattcaacttggttttcgatggacaagattatatgggcacacttattacctctagcatcacggtacacttgcgagaaacagacatcgcctcctttacgcatgtgatcctaatgtaaaagtgattcatgttagaattcagaaactttaaagatacaaggggaagtaaggagttttgttgaccagtgtgaagtcaccttgagatcttgccaagaagcagatgaaggcaagcctgtgactagaactgtggtggacaaaagaaaaacaagtaaaattaggaacaattcctacaactttggacagaataatgcaaattatatgactacataccacgaaactctgatctcctagatggcccacgactaccaccatcaccacggccgcgaccaccaccacggccaccaccattgaaactaccccgagtatcatctgatgaacgcctcccaccatgcgccaattccacctacaaaaggcaaacattcgttaaattagattgaaaaccaatccgaaaacactcaagagttgtaattaaatatctgaaattcgagtaataataactaaccctcaaacgatgcccatcaaagtcatagccatcacgaccatgaatagcatcttcagcatcccgagcatcatcaaactaaacagattaacgaaacacaaataggaagaaaagtcagaacaagttcaaattctcgaatcataacaacagagagccaaactgtaataacatcaagaatcataacacatgtcactgcaagaataagaggtggtaagctgacctcaacgaatgcataaccaggaggccttggaggaaccttcaaatcaatttgaacaacaggtccatactgaaacaaaaggaagaaataaatgttacggagacttattattatcgagtgtaagcgaaaacaaggtttacatagcataaagacgaatcctttaccttactgaacaaatcttcgacctctctctcacggatatcgccaggaaggtttccgacgtacacggttctactcgaacgactgctcattcttcctttatcaaatccaaaaacacaagtccaaagtcaagattcaaactttatcaagaatgtctgaagcagaggaagcgaaaattcacctgttggtcgtcgatttgagatctctcagcctccgcaatttgggaatttagggtttcgaagttggcgaacgatataggttaataagggagcgtcacgtgagtcacgtgagccttttatatactatagtgtggcgaagaaacgtttcaattatctgctttaatcaaaatcttaaaacattacaaagaaagcaacttaaaaaattctcacaaacaaaaaaattacatgtctccgaaactggcttgttgttagataggttcatttgcctgtgaccattccaactttatggagatgcttctaagactatattgttcgagtaatgtcattctccgtcagtcgtcttaattatagccagctacaaacatagaaattgtaaggttagttttaggaagacaaatatggcaaaacatgtttgatcactaactagggttggttctctccaaaatttgacattgttctttcattataggcgtaagaaccttgttgaattggtttgtagttaaaagtcttttgccttgagatatgtctttgttgctcttagagaaatctgattttgaagtttttgatttgttaagcagatacagaatcaagcaaggagatttgtgctgaggagaaagagttgtcagacaaaaaatctcactatagatgtcgtcgaggcagaaggaatgattacaaagctattgattccatgactcataacattcttttacttatagattcgatcaaagcactgttatttcttcaggtgactgactttcatccactaagatgaaaaactgcttccgagtcgcaatgcgaaatcgcaaagccttgagaagttgtatagatgttttattcataattgtacaattgtaagagaataaaccagtgtttgatatagtttcctccacatcttttaaatgctgagataactactctaggaaatgaaatacggtacaggttttatgtgatcaaatatctcttgatgttgaacaaagattaattgaaccgaggccggttcaatatttgatatcatttcggatcaaacagaaattagacaagctcttagcccaagtattgggcctaagaagcccattgggctaacactaaacaaaaccctagggactcttgtgggtcatttatatagtccatccctaacctcgccgcgggaagattttcatcttttcgagccaacgtctaatctaagcaagagagtttcattcaattcaatctctgtaggaagatggctcgagtaggggccaagtcgagtggagctggtgctaagaagaaaggagtttcttttgtgatcgactgctctaaaccagttgatgatacgatcttggagatagccacgcttgagaagtttcttcaggaacgaatcaaggtcagaggtaaagccggtgctcttggtaactccgtctccatcacccgatataatggaaagatcaatgtcaacgccaattccaatttctccaaacggtaaacttcttttcttctctcacacgtctttagaaaccctaacttgctcttaaattgcaaaaatctggttttgaattcaggtacttgaagtatctgacaaagaaatatttgaagaagtacaatctccgtgattggctacgagtgattgcatctaacaaagacaaaaatgtctacgaggtacgctacttcaggattgacgatgaagtagctagttacgaggaagattaagctcgaccttcttcattcatttttaattacacttggtctatatttttcctgcttaggacggatctttattaattgtccaagtttttgctgtcgtatgattttggtggttaaaattgacacaaggatgaggactaagttcatttcaaaattctgaaagaaagagtgactaaatggccgactctttttgaggccgtgttggttcggcagaattgagtggttccgactcaatttagtttaggagatcaaaaaatatctaaatatatgcaatcacaattatttaggagataaaaaaatatctaaatatatcattaatttcttttgagcattatgaatacgtacatatggtaatttcatatatgaacatttatattttcggttgactacaaaaaaaagaagataaaaattggttttggtcaaactatagtatacttgtatattagatgagttaattaattttaaatccagataagtaaaacaagttgttaattacatacaaaacgactttgaaaacaattttaattataagttacaactaactttaaaaccctaaacccaaaaaaaaaaatcaaaagaaacagaaaacaataactttgggtgaaagcctaaattgacgcagcctatctgctctgcttcctctatataaaccctcctctcatctctcttccttctcatctatcctgcaaagcattttgaaatctgtcaagagagataggacgaccaagtttgttcgatctcgttgccgcaaaaaggtaacagcagtcatcagatcaagaacctgagaaacttctcttttgcgctgtttttcttcttctccaaaactcgtaaaacctataaaccacaatggctcgttctctcgctaacgctaagatccaatccgtcttcggctccgaaaagctctcgaacgccgttttcaggtaacatctgtttctgaaacaaaaacgttatgtattgctctgttttctcgtcgctttaacaaaacgctgacgttttggattttggattctcttcagacgagggtttgccgccgcagccaaaacggcgttagatggaagcgtttcgaccgcggagatgaagaagagagctggggaagcttcaagcgagaaggcaccatgggttccagatcctaaaaccggttattacagaccggaaaccgtttctgaggagattgacccggctgagctacgagctattctcttgaacaacaagcaataaatttattaaaaaccgtatttttattcatcaatgttgtttaatgaggagattagcaaaatgggttattatgatcttttgtggtgaatcccatcttattccgttaccatttctgtaataatcgtttgatcttattattttgatcttattatttatgaagttttaaaggcttccatcttcccattaacaaagatttgctatgactcaaagtgatgacaaaaaaaatactttaaaaaaattcaattggtataaatattattttgacgaaactacaaagaaaaaacattgcatggcctttattctttgtataaaaagagcataaaattggagttacttaacatacatacaataatatagactaaatctccttaccaaaaataaattatatagactaaaaatcatgtaacaaactggtaaaaaccggtagaatcacaaaatcttttatatacggtacaccaacaataagattatcaaatttagataactttaataatttaaatccaaattgtcgttctttttataattattttccataattcgaacattaaatatgatattgaaaattaagcttcaaaatattgaagtacaatgatgtgtgaacaaatcgcaaaataaaccatacttaaaaatatgtcatccttagactaacaaatcaaagccatgaacaatccaaccacgtggcaagccatgttgcagttgggaaaatgttgatcatagaaataagtaaagcttaatctaagcatagaaaaataagaagacgagaagctttaacttgtgagcctcagaaattaactttagggtatgaagaccacataacttccgtgttaatggttgagagacttgagaagaagtggctcacactaaatcccaaaggccaacattatgcaacaaaaagacacaggaaaagtttgtacctcacattcttaactaaatggcgcttcttaagctaaatatctgtttttcttcagcacaatcacttgatttaatataaggaaaaggaaatacatgtatgccaattttcaaaatcgggagagaatcatcaaacatacatgtaaaaaactatccaattttcaaaatcgggagaatcatcaaacatacatgtaaaaaactatcttccttacttcatcttcaaaatattatttccaaacaccaaaatttgaacttacacaaatattttcgaaacattgtaatctagttcattagtacattcatgtctaagcttaatacctagtaccttcaatggaggatattgcctactttagttttggcaaagtctttgatgaagaagataataccatgtcagtggcagagaatctcgagcatatgactcacaaacaaacacagatcacgaagctcaagaatccagtgatctctgaagaatccaacattttcttttgaagtaaaaaccaaaacttttaagagttgttggtcgagtccaaagagattgtctcatcatcactaggcttcaatcaacttctaaagaatctcatactgatccatccgaaaccatggacaaaagatctaacgtttcatacagacattcataagcattcgtcgaatgcaacacacaaaccattgatcagccaatacgaaactcaaattcatgccaatcttctccttagacataagaattaactttttccaccactgttttattcctgatcggttcataaatacaacttatcggttcgatcctaagaagagatacaaacaaagcattgattgaaaaattaaatgattggagaaagaacataaatcatccaaagagttcagattctgcaataagaagtcttaacctttaaaccgaagaaacaaaagggtttcttcccaaagtcttcgtcttcgttttgcaatcaaatccgcaaccacactgtggcgactcgtaaaactcatcgatctcgaagttcgccgatgtgatcccaacggagaactcgagttcgtctccgttcctaataacctcaacgatgttgagccacaagaagagaactttcaccttcacgccggtaagcttcgtgatcttgttctccgatatgtatccagagattgtcgatttgtaatccaattggtaagagccttgaagagcgaaactgcacgatttgttgaaatacgcgtggaattgaccagtagatttatctaaatcatatgacaccactcctttaggaagaatcccgacgggaaagttgtagctttggaggagagtgtacgccgtcggtatatcgtcatcgttagcggcggcgattaatggcgaaggaatgcaaaataaaaagaagaagaagattgaaatcggaagcagagtcatgattcgtccgatgtaacccaaatttgaatctttaggagtcgtagctaaatcactaatttaggttttaggtttattatcccgtttggatttcgttttccgtcactttctcggcgataaaataagagttttctgggagagacgtgagagacttttgtatagctggcacatctgatcagatcaagcgaccataaacacgacatcgttttaaccgaacaactcgacacgtgtcatcagtaagcccatgaggtgtctttttgtcattttgtttcaaaacaaacaaaattcttcacatgggctaattttgggcttaaaccaacagtagtgtttatttttatatattcataaatcataacagcttcgaggccgtgtttattttatatattataatcataacagctttaaggcccatgggctttaagaggaagagataggcctataacaattaaacccacaaccacactttgggctgtccacgaaatacttgctcgagaactcctccgaagcagcaccaacgaagaactcgacgtcgtcgccgtcacgagacacctcggagatgttgatccaaaagaaaagaactttgacgcttacgcctatcaaccttatgacccgtcctcttgttatgatgccggagattacgggtttgtatttgaccttgtacgagtctatggagaactgacacgtggtgttgaaacggactttgaaaacgccagttcttcggtttaggtcgtagtcgtggacaccttctggtaatattcctcgtggtaaggtgtagttttcgagaacctggtagacacttcgctttttttggccggagacggatacagaagtagagagaagaaggaggaagatgatgaaaatggacattgtttctgttttaacttatctctgtgtttttgcttagtttagtgtctaatctaatcgtaagaattttccttgaatctgtttaagaagttggttttgggatgtctttgtgtgtttagttataagtagagaacgatgagggattagttggggtttagtgacgctgtgatcggtccgtgaaaggaatgaacggctgagatttgatgagcttaatgctcacgtgttaaagagtggaccatcgacgtcgtttaatgatacatgatgttaaataatctttattaaattcttaatttatcgcaaaaattattcagttacattaccaagctttacatttcctttgcgttgagcttgaatttcggttttattacagttcaacaaaaataatacagtttctttaaattaaattaataaaagaaaatgattaagaacaaatcacaaattactatgaaattagaccgctggtgtaaggcactcctgtcttccaaatccaatcagcttcgataaataaaccagtgaccgtgaaattagctgcatcagtggaattaatcacgtggtaaccaggccatgtaacccggtttgtagtgtttgagcccggtccggtattgttatactctgcatagtacaatgtacttaacgcaaaatcaccgttccattctctccaaccaaccggttcaacgaaaccatcaatgtacgattgcatgtaaaccgtccttgaatactctttccacggtcgacccaaatacgttttaactgtatagttactcgaaacaagatcatccgccggcttaatcgtacagttttggattgatgtaccagtgttctggttcggatcagaccggccttgggcggtgatagcattgaactgatttggcatcggtttcctcgggtataaattacagttttgaaacacaactgccgcgtttccaaatataaaatcgaccgttccatagacatcgcattctctataaaactgtcttagagaatgtgtgtagagtgtatcttgataagcctcgaaactacaactatagaagattgagaaatctgcgccgctccgtaacgcaacagcctggtgcttctccggtccggccgtgttccggaacgttatgttcaccgcaacaaagttcggtgctgtcacagctgaataaaagattcatgtgcacgattagttactagaatcacttgaacccaaaaataacgtttatttaatgcctgcattgtcaaactatgtcgtactaaaaaaatcaacaaaatggttatgtacactcagtattattaatgcatcttgtcccctgttcaccactttcaattctaacttttttgacctaaagttttaaatgcaataattaaaggcaactatttacgtactcgagaaattttaaatattattgaaaaataactttgagatctcgagacattattattaataacatgtgattgtgtgacgtaccaaatgtggcggaattgaaagtagtccaaccgtcgacgacgcttctatttccggtgaccaccgtctgattaatcccgtcacctatcatcatcatgtaccttttgttcttcgcgattgagatatactcttcgtagattcccgccgtcacatagatcaaaaagaaaccggcgcttccgtcggtgttgttcggcgccgccgctacagctgccgtgatgttggtgaaatttcctgttccgtcttggctcacggtaacgatatcgcttatcagaaccatgcttccgtcgtctccatcaccgttactgtcaccgtcggcgagttttcttctgctgagtgactcgtaaaccgcttttgttttctctgtcatctttaacggtagagctccgttacggaacagacggaatggtttagtgtgggtcgatgaaccggatctcggttgggcccaagcaaacccggcccgtttcttcttctttggaacccaacctttggtgaagagagcgagtgagacgcccaagagcttcgtgtcattgacgagaggcaaagcgacgccggttcttacagtccacgtggcggaataagaagcggccgtggtaagtccttcaagacacgtctgctcattagtcagcgccgcggaaagaagcgtttggatgtcgtcggctttgggaaacgacagcggtttgaaagaggtttttgctgacgtgtcgttaacggtttcgaacgacgttaagaggtaatccattgttagaccggcgagaaaacggcaatcttggagagctctgataacggcaggttgagataaatgagcgttgcgtttgatatatctatcgacggtgcgaataaattttcgcgattgcgatagcgatttgcggatagagaaacagccgtattgttgaacattgccttggctatgtggaaaaacggatttgcaatactttggatccggcgtcgttttgcagattgttgaagagtttgatagagtttgagaagaagcaagaactgattgaagaaagaatgatagtgtgatgagaatgaatattggagattccattggtactggaaagttttatgtgaatacaaactttaggttaagtggtttatataagtgtggtgatgattaatgaggatgaggtaggtccattttaattttttaatatgtgtatgataactatgatattgtaatgcgatcataatcctgagtcaactcgtttgggagtcataaaaacgcgtaggtttgtttgcagaaagtaatttactaatcatcggaaactctgtctgcttattcaaagatgcctatctgttattgcagaacattatattcatacgtttatagagaaaatattagtatttgattatgtgtctatctatatgcgtatctcgatgataattgagttattaatagtagccgttacctgttatgatatttgtttttattaatagtttgattgacattagtgcatcataacacggaatttcgagacaaatgatttaatatcatgtaagcttgttgaagtattaaaactttgctaggtaaatttgtttgtttgttggtaaagaattcacaatcagtttctctaattaccgaaagaaacaaaacaggaaagaatattgacgttttattttatggggggtgcaacactcctttcaaagaaaaatatttgaacaaatatgtaaatgcatgtttggtgtaggtatatttgtacaactgacttattaggtgttaatttatcgtttttcgttgttgcaaacttgcaatatgttgacaaattgttcaattatttgtcagcattaaacattttctcaaattatttaacggataaaatcatatcgatggttccaagttccaatctaactatagctctctttttaaatacaattagtccgctttaaagttttataatcaacttacattcaatgcattcgtgactgtatctaattgctaatgatctaacgtaattataattttgtctgcttaatatgtcaacacgcagtcacgcacgtaactaatgaaattgtagccgttgacatttgatgacctcacacacttcagagttcagagtaaaccgttttaattaattactagttatcaataatttattggaatgtcagaaatatggaaacgttaaatcaaaatgttaaggaacacagtttcacggcagaacggtccgaaaacaaccgactctggcctagatttgtataacataatatctagttgcattttttattccagattttcttaaatcttaacgtggtacatatgccataggctcacagctccttcacaccaatctaatccgtaaacaacatttactttattttacttttggtcaatcgtagacatatggcctagaagaaaaaaaagaagaagacatatggcctatgggccaggtgttgcgattataatagcccaactactatattgaactgaaaggaataaatgaaggtgcaaggcttatcgactttgtaagttgggccctcaaagtttagcccattttcaaggagatgaatcatgcgtatggacaatagcaactttaccaaatattacgaaaagacccttaatttattcttacttttacgattttcaccttgatttgttattagtttggacacaatgcccacaactctcacatttgttctttcgctctccaagctccatctctttcttcttcttttttggtctgacaaagcatatgcatatctcattattattattttggtcattaccacgtaaaattgactggacgtttcattggatttttatttattttatttttcattttttaccatatttgatggacacttaaaatgtttccactgaattcggtatggagtgattgattacaaaacttttacgatttcgagattgtgttaacaatgagcaagcaatatttacaagatcccttcaaacttaactttttttacaaagctacgtaaacaacttaaaaaaaatcaatcacacaaaaaaaacaaactaaacttatcatgttatttaacaagtataaaggtgtgtttagttttttcgtaatttccaaatattaatgattctgtttgtttggttcatgtgactaactaaccggtttagctaggaaagagaaaaccaaatctttgctctatataaatagctaaatctcctctgctcacctagcagcaagcttcttcttctgcatactggtcattgattggttaatcagagctctctcttttcttttcctatctctagagactagagaaatggctctctatctctcttcttcacgactcatcacctttctctctttcatcttgcttctctccaatggcttctcgtcctcttcctctcgccctagcatccaccatcgtcaccacctggacaaccacaattacaaagacgctctctccaagtccattctcttcttcgaaggtcaaagatccggaaagcttcctccaaaccagagaatgacttggagaagcaactctggtctctctgatggctctgctctcaacgtaaatgacactactttctcttgctttgttgttgcttttatggaaaatgtgaaatgggtctgttctcgattaacatgaatgctagcaatctaggttaaaacttaacatatatcatcaaaaaaggttcaaactttatggggttgttgcataaaacagaggaatcgaaaccctaaatttgtttattatggtttttaggttaaatttctctatcaaaatcataaaaaaattcaaacttaatgggactcttgcttagaacagaggaattgaaaccctaattttgttattatgctttttaggttaaaacagagaaactaagttacatattttcttggaaagcctaatttgtgtgaattggtttaattttgtaggtggatttggtgggaggatactacgatgcaggggacaatatgaagtttggattcccaatggcattcacaaccacaatgctctcatggagtttaattgagtttggtggtctcatgaaatctgagttaccaaacgcaaaagacgctattcgttgggctactgactttctcctcaaagccacttcacatcctgataccatttatgttcaggttttttactttgctctaaattctctcctcgaaaaaaaaaaacaagactttgggaaacagagtggtttaacgttagcgtgttcataggttggtgatcctaacatggaccatgcttgttgggagagaccagaagacatggacacaccaagaagtgtgtttaaagtcgacaagaacaatcctggttctgatatcgccggtgaaatcgccgccgctcttgccgctgcttcaattgttttcagaaaatgtgatccttcttactccaatcacctcctccaacgagccattacggtactgtaaatgtgtcatttttcacaattaatattcttcatttagtaaacctatatttttcaagttttataattaggtgaaatattcttcatttaataatcatttggctattaattttttttttttaaatctatatgagcattaattaaaaagttgcatttgtgggtttttaaggtttttacatttgcggacaaatacagaggaccctacagtgcaggtctggccccagaagtttgtccattctactgttcttactctggatatcaggttcaacattttaaacttttgaagttggatctatattaatttaaagtgtaactgtaatctcggaaaaaaaaactgaaattgaagtcatgtttttggttttggtttgttcaggatgaattgttatggggagctgcttggttacaaaaagcaacaaataacccaacatatctcaattacatcaaagctaatggacaaatccttggagctgatgagtttgataacatgtttagttgggataataagcacgttggtgctagaatccttctctccaaggttatacaaatctttgaaactaatcaaagattccaaatttagaccattggttcttgaattcttatgaaacattttttgtgtgactttgttttgttttttcaaggagtttctgattcagaaagtgaagtcacttgaagaatacaaagagcatgctgatagtttcatttgctctgttctacctggagcatcctcttcccaatatacaccaggtttttgcatatataccactcatcttctcattgaaatttaaaaatcaaggaatttatgatatatgtgtatacatatttataggtgggctattgttcaagatgggtgagagcaacatgcaatacgtgacgtctacatcgttcttgctcttgacctacgccaaatacttaacctctgctcgcaccgtcgcttattgcggtggctccgtcgtcacccctgcccgcctccgctccatcgcaaagaaacaggtttgtttcaaaaccaatgtatattgactctggtatactttggatgtcaaaatcaaacttgactatcaagtaaattttcagttaatgcacataataaatgtgacaccatctgcaagactacagcataccaataaaagaattaagaatctatactttattataatgataattagcaaaaatgaaataaattttgtattttgctaaagcatgaattaattaatatcccaatataaaatggaaagagtagtatttgcttaattaattgattcatgtgatatatgcttcaggtggattatctacttggaggcaacccgttgaagatgtcatacatggttggttatggtctgaaatatccacgtcggattcaccaccgtggctcatctctcccctccgttgcagtccacccgaccaggatccagtgccacgacggcttctccttgtttacctctcaatctcctaatcctaacgacctagtcggtgcagtagtcggtggtccggaccagaacgatcaattccctgacgaacggtccgactacggacggtcagagccagcaacttacattaacgctccacttgttggagctttggcttatcttgctcgatcctaaggccaactttaactaagcttaaaccgcatttaattgttggtttacaatgttaattagtagtaatgattttataaatgaatggccaagattgtccgatccggctgaatgaatgttttagatgatgtggtatttgattttaattttctaataaaaaaaaaagtagcatttagaagtgggaatgggtctatgaaatgagattacgtcaatatgagtgaaattgataaattatccaatcccataaacgagatggtgaacaaatataaatttacatttactgctagtaaatacaactacaattactttttaccacgcaaaaggagagaggagagattttttttttttttttacttcgtaaggataatatgtacttagaaaataatatacagtgacgaaggatgatgaatgctttcatgggaaacgagcaattgaccaggttgagagagatatgggccgattaaagctgtcactgtctctgttatgacagaactaagttcacgtttacgtgatttaaatttttattgatagaggagatgattgtgtttacaatcactgaattgttactgattttactgtgaattgcatatcaattggtaaacctgtaaaattgtcttatcattttgtggattaccaatcatatttatgagaaatctcaattccatttacataaatatttaaaagacaattacagaataatttagctatgacgctccgacataatcaacaaacaaaacaatattttgcatctgtatatatatatatacaaaattttgttacacatacacataattttgaggaagaaacaaaaattattatttggttgcaattttagactgttttataattaaccgagtaatattgatcattctcaaccacttaatcaattgattcttttttttttttttttttgcttgatataaaaaaagttacggtaaaattggaaatcgttactacctaagattggggtcaacaatccgtaaaagaagatggaatcacacactgtaataccaatacttttctataaggaatcaaatctataaatagcatactaactagcactataaaaacattatgaatcctcctatgagcaaatcacttttaaatttgttaacactcttttaaaagaacaaaaaaagcaaaaaaaaaataaagatattatcaccatggctaacgcaagaagtttggtcgccaaggcaaacaatattaacgtaggttcattgattctaatggccttggtgtttggttcttgcgtggctaatggtgaatatctcggcggccgccgtggtctcgctgctaattccggtaaccccacggtctatgatattactaagtttggagccgtaggagatggttccaccaatacttttaaggtaaagtttagtttcattttcgatccataacctttttgagtattttatagtaaaatgcatgtgacattctaacgattgatccaataacattcatgcaggcgtttttgaacacatggatacaagtgtgtgacagtccagtaccagcaacgctactagttcctaagggaacatttttggctggtccagtcattttcgccggtccatgcaagagcaaagtgaccgtcaatgttataggcacaatcatcgctacgaccagcgggtacgcaactcccgagtggttcttgttcgagcgtgttgacaatctcgtcctcaccggaaccggcacattccacgggaaaggtgaagctgtctggaaagcagatggttgtggtaaaaaggtccaatgcaatcttcctccaacggtaagaccaaataactatatattatttcaaatcatgtatatatagatacttgcaataactaatcacacatttgtacgcatacatgcagtctctcaaattcaggaacatgaaaaatgttgaaatcaatggcataagctcggtgaacgcaaaggccttccacatgttcttagtcaaaactgagaatgttaacatccaaaacattaagcttaccgcaccagctgaaagccccaacaccgatggtatccatttgagcaatgcagacaacgttagcatcctcgacagtaccatagcgactggagacgattgtgtttcagtcggtcgtggctccaacaacgtaaccgtcgaacgtgtgatttgtggtccaggacacggtctaagtgtcggtagtcttggtaagtacaagaacgaggaagacgttagcggaatccacgttaacaactgcacgatgattgagaccgacaatggtcttaggatcaagacatggggtgggtcagacccaagcaaggctgtggacattaagtttgaaaacatcatcatgcagagtgtcaagaacccaatcatcattgatcaaaactacggttcaagaggcggagtaagtatatacatcactgaaaatgtctcaaaccaactattcttttgaatatatgcgttaacaattccttttttttggcatgttttgtaggattcacaagttgctataagtgatattttgttcaagaacattagaggaacaacaattacaaaagatgttgttcagattatgtgtagcaaatcggtgccgtgccaaggagtaaacgttgttgacgtgaacttggactatgtaggcaagacaggaggagagaagaagtcgtcatcaggcggtttggtcggagctctttgcgataacgccaatgttatcttcggtggaaaacttagtttccctatgtgtcccaaataagctttttggtataaataatttaatattaaaaaaaaaaatcaaaagtttcacaaacattgttttgtttgtgagttagtttgggaatttatcaacaagaaataatcagtggaatatttgacttttgataatgttttttttcccgattttttttgattttttttttggttttatgtataaataaacagatccttcagctggttgcttaatagtttctggttagaaaatttggtctgtgggtattagtgtgtacaatcattttattgctctatctaaagtcatcgatttctttctttctaagtggcaaaatatctctttcataaaaaaaaaaggaaagaataataaataaaaatatctctttcattctaacttggcattaaaatttagcaaaaactatttgtggaacttgaaaaaaatattactagctcagacttaaacttaaatagtaacaagcatattaaaagtcatgctaactgagatattgatttcctcatctcaagaaactatcttatgaatctgtttccgattattttagtttcccatcaatcatctttaatttctaggaagtttgattttttgaaaatttctccacctgcttaaatttcattacaatttttaatcttagataaacaactgtaatttatgcaaaatgaactgattatataagtcgttatgaatatttatattttttaaaaacatttcagcaaaactgatatactttttttttttttttttttgcaagcaaataaacaaacttccttgaataaaacgtgaaaaataataagagtctttaaagataaacgttgttcatatacattacgtcatataatatatataacaattaagacaatacaaacatatatacaattctcattgggttgaaacattataaagataagataaacatctgtatatatacattggtatacaatatttttcataaatttttttttctctaatcgacagttatatatatacagaaccataatttttaaagcatgctttccaatgcgttttttttttttttttttttttttgtaaaccaaagccgtgtttctaaacctcaatttataaatttggtgtagcttttcaaccttgatgaaattattacatagaatcattcgttaaaagacttataattgggtttagaaaagcccattttaaatttaaagcccaatatactgctcgaaaaggaggaaaccctagaaacattgtggtatataaattcttttcgtctcgttcgctaatcagttctccgccacaccaatctccagaaaaggggagaagcaaaaatggtttctctgaagctccagaagcggctcgccgcatcagtgatgaagtgcgggaagggcaaagtttggctcgatcccaacgaaagctccgacatctccatggccaattcccgtatgttgttgcttttttcttcatccttttacttttattgttgtcctgtgtttgtctgcgacggtggtagacggtcttaggtgttgaatcactgtgtttgtttccgatctgaaaatttagagcttgtaggtgttgttacggtttcatttctctagttataggccttgtagaactgtgatttgtctcgtgaatcaaagctagaggatttgatttctgatattgcttcttaatagactgaggatttgaatgatgttccatttcgagtattgttgttatatatttgaagatctttgtagcttcaaatattaagaatgtgatgattggtgttgaacttattgtaggccaaaacatcaggaagcttgtgaaggatggtttcatcatcaggaagccaaccaagattcactctcgttccagagctcgcaaaatgaagattgccaagatgaagggtcgtcactctggatacggtatatacttcacaactctgaaaatccctctatttaatcgtgattttgaagaatgattagcgttgtttactcttgccttttttcctgtgtttatgattaaataggtaagaggaagggtacccgtgaagctaggttgccaacaaaggtactgtggatgcgtaggatgcgtgttcttaggcgtctgttgaagaaatacagagagacgaagaagattgacaagcacatgtaccatgacatgtacatgcgtgttaagggtaatgtgttcaagaacaagcgtgtcttgatggagagtatccacaagtcaaaggctgagaaggctagggagaagactctgtctgatcagtttgaggctaagagggcgaagaacaaggctagccgagaaaggaagcatgctaggagagaggagcgtttagctaaggtcagagcttaacttcttacaaactttataaagtttttttttaattttgatcagagattcttatgtgttgtggattgtttgcttgtagggtcccggtggagatgttgcgcctgtagctgctccagcacctgctgctacacctgctccaactgcagcgtaagtgttatttcaattttgttgtgaattgaatttgtttcaaattggttaacatctatctaaatcgtgtatgtgtgtttttttgcttgtgcagtgtaccgaagaagaagtctaagaagtgaagaggatatatagtgtgaagctatatcgatcatcagttcacggattagactctgaagaaggttttgaatgttttatcgaatgcgtttgtggaataacttttattttcgcaaagaacataacttatgtcagttaatctttatgctttcagatttttagcttacagtgtttcaacagacctactttgcaagttgttctttttttggtttcttattgtttttcgttcgtcatacgcaattacaaaataaccatccattaatccatccataaattgttaaattttagaattaatatatgcaataacaaccatcatctatttcgaagtgttgtttattttcttttgactttcgttttgttgattcttcactctactcctccagatgatccaacaagtggtccacctcttctgtctgctgagagcttttagtagaagcgttatttgataataactgtaatacatcaacccaaacgatactgatatgttttcatttcaatcctttacattaatcaaacactaataacaaattcacagtaacatatgaaaaacatcactgtcattaaatatcagtggaggtattacgtaccaacctgtaagcgccaattcataaaacactactaaccaacacccactcccatgtttttttctagcttttactatacatggtatactttcattttcttttagataacagctaaagctttttacaactcgtatgcgagtctatgttctccttgttgtcttattactataacgagcaaatatgtgtttgacaagagaataagacaaagaaaaaggtctcacattgacacgacttctatacacacaccaataaaccaatgtgtgtgattttggatatgcgttggagatattaacgtatacatttatttacatgtaggaaatacatagctgtatcaccaatatctccaacacattttatcacgtttaatccaaaaactacaattatctttctttttttttaattattatcataagaaaatgtaaaactataaacacatgtcaaaatcaataatgttacatatatcaaaatccaataaaaatattatgattgaatatgcgtggtgaattgattgacatgtgtcacaaaaagaaattacaaactttgaaaagtctagcttatacaataagatgatatattttaataaataatatatgtgattcttttctttttagtattataaatctattatattatcttatttcaattgatataatttaatacactttttcaaaaaacagtgattgtaatacttttattattatactatctgtaatttattagataattttccttttatttatataataaatgttctttttaaacttgtattttgggttgacaaggcccaacaaaagcccataaatgaatttcggatggatatatagaagagaaaggacatttcgcctgcatgggtaaaaaactcaacaaatcctgaaaacaacaaattcccgaatcacacagcgaggaggaagagaatatggatatgagtgtgattatgaggtatggggatgataaagccgaggagttatgccttgaagtggaggattactgggctcgagtggatgaatccgatgtatgtaattctttcattttcttaattgttaatttagaggatttttacctttgggttgttcaagatgacgactgttgttgcatgttgcttaaatttgtcacaaagattaactttaatagatctgcttaatctatgattgttctgtttttttgaacgaaaatttctcttcttgctaagtgatttattattaattttttcgtaattagggtttcgatgtcgagggaatccaagcaccaccagggggcactccattgatacactacgactgtcatctgcccaatagtaggcatcctgatcctgtattggtcaagctttatgctagtgcggggcttcatcgctacaatatgttggaggtaaaaaaaactccatcgtggtaacagaatgcttgtgtacatacatgacatttaattgctctctttttctcaggggacgaacttcaagctcgttgatgtaatgaaattcaacaagttaatgatgcatttgtcccctttctacataactttacttgcacaagatccagttagccgttcgcagcaaacctttcaggttcaagttgatgaacactgtcttagcactatggatttgacggttctaattgctagacctaaaggtaagtaaacattgttgttgttgttgtttttcttcttctatatatatacaagtagactataaaagtaggtagtctcatcacttgctgataaatcatgcatgttgcatatatagctgtgtccaccaatgagtccgtcttagctccgcagagtttttcagtggaagaatcgcctgagtggccgtcagatttcaatgatggaaaacgattctaccgggtaagacacagcatcatcagttttgttttgttcatgatcgattataagcaggactactgatatgtttttttattatttttattattgctttttcatttaggtgaaggaatctgagttgcgtaacaatgattggatttctctatatttgcaacttgtactcgtatcacatgataggatgagaatctcagatgtaagtcttgactttttctttaattgtatcttttttgcatatcaatgacacaccatgagttggtgataatcaataacttttggttttgtttctcaactgttgttggtgcagagcgatctgtccaagctgaagattgtggaagcggtgatagaaaccaaggacgatatgctgccgccgaatgagagactactcaatgccaaaactgcaattgtgtacataacttttaagggcttcaccaagtgtcggattggtgatgagcatactgaacgcaaaactatagttagaagaatattcgatgaggatacaggacacctttctatcaagggtgagttgattggtgagtacaagcttggaggggactttgaccctggttgttatttcaactctcccgcgattctagaagctaggcgtatttgtcagggcctgccgccacagccgttttgatgccttgatggactatatatatatatgctgtctgcctggtagcaagagttacattttcaaatatggatgctgttattttgtggatttttaagtgtctaatatattatcgaatatgcagtgttttgtggattttgaagtgtctaatatttattgaatacagtaagttaatatatatatatattatatagacaaattgacatatatttttggccaaagtatctcccttggattttgatcatactctgcgaatgtgattcctttcggttttgatcatactcgccaaagtgcatgaagaaggttttttgaatgtgtttcgtggaataacatttattttcgccaagaacataactttatgctttccgatttttagtttacagtgtgttacatactctgcgaatgggcccctatttactctgtttatgaagtcaatttttgaaatgttggatgctctcgaattggatttgcagttacgaacagagaacacttatacggacaaaattctgaggttcgttatataaagcagtgggaagttaaacaacgttgtagtaactgggttcgttagcgtgttaaaacagcatgctttcaaaaagttgcatcgcccaccgtggggctcgaacccacgaccacaaggttaagagccttgcgctctaccaactgagctagacgggcttgttgactatattcacactattgttatactcatataaaaaaaacacatcccaattttaactagatgcaggaaagaaatttgcaaggacggtgctctgcgacaaaagattcttgtgaagaaacaaactgaaaactcatcagcttatattataaggctaaagctagtgttatgtctgtaaaaaagatgcatatatataaatagagctgaataaaattacaacaatgacaatcacctgcctttcccattggcgacttcacatctttattttactcagaagagtcacattcatcatcaaacatggctgatgacaacagtccctgtacaaactcacacttctttgccttctccaatttatcactatccgataaaggacacgacgatgtaccctcttttgctgctgacgaatccttaatcggattcttgtcttctacacttgaatcaggcagcacaagcttggtctgatttggtaatgcagaattgttgatgaacgataaaaattgatcggaaacatgtttagagggatgctgatgatgattcatagatggtggcaactcatcaagatgaggttgaagatatttatcagataaatatggatcttccctgtaagacatttccttctgctcactgtaaaattatcggtcaaggaatttcaaataaatcacattcattatagcgacggaaatttgacttgaaaggttttgaaaagaaacaaaaaaggatatcttcaagacatctctatgatgtgatgttatatgatccaccatatgcatcttcacccttttgctacatacaggacatatctacaaaaaccacaaaacaaccaaaacgaattgtaagatgatgctaccacatgacaattcacggaaccagattaataatgttccatcatactacttatatattcatttctttagctcgtaaaaccaatctatgcttcaaaacagagagctcaagtcacctactctctatagcaagtatgtaaagccaaaaaaagtgtcaaaagtattaatatcctaaaaccttaaactgatcaatggagagttatgtaaaacccaaagagtaacttaagataagagtggcatgtttctctattaaaactatttgcaatagcaatcagattctcaaacgcatcaatctaaaacaaatcctaatcaaaattatagattgaagttatgtttcccacaatccgaataactaagctgtgtaaaactgcttcatgtgaagcttgagtgtgaaatgaaaagagcaggagagataggaagtgaattcacaaaccccattgttagcttcatgacgatgttcttcgtcgatatggtgacacaattcaactaaatcataatcacttgcgcaaaacgggcatggatactccactgctatatcgtcgtcaacttcttcaaactcttccaaatcttgataaggccctgaaatattcaccactaattaactcgagagcaaaagagaaaaaaaaagtcttctctcatctaaaaagcaaaacgtaaagctacaatttttaacttaaacgaccaactacaaaaagtcatcaaaacagaactcaactcaatcgaaacccaattaagaccaatcttcaatcataaaccctaaaaatgaagtttgaaagaaaaattgaggggatttggataataaacctgattgatacttagcagcagtttccgatcgatagcttctagaagaaccagatgagctaacgcaccacatatcgtcttccatctgctttgtcggagcctttcttatgtaaaaatctcagataattgatgagagaccttcttcgtcgtgtcagctaaatacccaattgtgtaagagatagcagaaagaaaatgtcaagaaactactccacggaaaggccaaacctttttttaatccgccgagtcttaatggacaagaatacttcgggtggtaagagtgaactactattatacccttacattgcactgagcctttttctcagctaactcaggggtgtttttgtccttttcttgtaaggatgttactgttattgcattgctccccaagttaattatcagtaaaggcctgacttgaaattatataaatgggcttaaagtcaagattttgaaatgatataaatgggcttgaagtcaagattttgaaattatttaaatgggcttgtaggcctaataataaaagcccatgttaaaatctgagaatttttagattctgatagacggaaaatcccaattttcccggaaattttcagacaaaatcgcgttgagattcaacaactttgagtgagtttttttttttgtcatttacctttgtcgcttcgacgtgagacgagccgtggaagaagacgaaagggctcttaagctctctttactcttttcttctcctcctctttttgagatgggaagccctaacgccgccgccgagacggatctaacaaccgatgatttcatcggagacacacgacgggactctggttctgatacagagaccaacaccgattgtgacggagaagatttgcctcttcttctgctacctgctcctcccggccacttcgaagaaggagagagagttttagccaaacacagtgattgcttctacgaagccaaggttagtgaaatacactctctgtattcttgaattagagtgttcttctctgcttatgctttatgtctctgatcgtttccttttttttttttataataatattctcaggttcttaaagttgaatttaaagacaatgaatggaaatattttgtgcattacattgtaagtagatactgtatatgtttaaaatcattcttttgagctattttgcttctatctttagttttgaagatgtaaatgatttcttttggcagggttggaacaaaaggttagagcttcatccaatatagttactggcttctaatcggtttgaaatcatttgaaactatttataaataagagaattcttcatatggtgatttactgatttgtttgccaagtctcagttttttgataatgtaaaaaagtctttgactcttgtatctcttctatacaatgatagttgggacgaatggataaggctggactgtctgttgaaacattcagatgagaatattgagaaacagaaagaacagggtttgaaacagcaagggattaagagtgctatggcttggaaagtgtcaaagatgaaacctagaagccctaatggtcagtcagcttcttcttttgtttgttttgcatattcttgtctcgatggatatcttgctgcttttgtggatattcagagtctctatcagggactctcatttggtcttgcttgctttattctatgtcgactaagtagaagttgttgagattaaagtatacatacacatctttcgttgttagttgagatattgtgtcagttgagatattgtgtcagctgagattttgttcaatattttcttaatttttgcagttgctagaggaagaaagcggaagcaagattctgttgatacggtaatcgctcctttagtggatgtatttgcttaatctttcagcttccaaatatccagggatttttttaatcaggggagtcttactcatgtcttgttgtttgctgaatacaggagaagaatgtgcttccctctgacaaccttttaagtttcaatattccaccagcattaaggaagcaacttcttgacgattttgaatttgttactcagatgcagaaggtatttctatcagcctgttatttcttctctcaattctcaaacggtcttttctgtgtgttttgacgcagttgaccatagtcttttgattcatttagtcagagaaaaaatattcttgtagtcgcatgaatatatttgttgtgaatgtcatatttaggtgcatatgttaaggaatttattttaagtcatttttgggaattgtctgagcagcttgtgcaacttccgcgttctccaaatgtggatggcatcttgaagaagtacattgacagccaaatgaagaaacatggcaggtaagctctttgtggattatagtttctttctgctgtcagtttccaacagttacacttgttaatctcttttgttgctattctcatatacttaaagagagtataaatcatttgtatatgctccatggataatttggttgacagataaagcgtattccaagcttctgatatatctagtactttctttggtgaatctatatagggtaacagattcattagaggaaattctgaaaggcttgcgttgctactttgacaaagctttaccggtgatgttgctttacaacaatgaacggaagcagtacgaggaatccgtatcagggggtgtttctccttcaactgtgtacggagcagagcatttgttgcgactctttggtaaggccagtttttgtaatctgcaaatctgcctttatcatgtggtttagttgtcaagataagactatataaatattgagttttgcagtgaaattaccggagttgctagtacatgtgaatatggcagaagagacattgaaggaattgcaggacaactttgttgatattctcaggtttcttcttcttgttctcctacttaactctttttacaagtatttaaagacaaataacaaaaacaaaatgataaagcaggttcttgaggaagaatcagagtgtgctttttgtatcgacatacaaagcagtggaagaaatggagaagaaagaaggttaggaaattgtgcctaatgacgtgttcttgtaagtatgtgcagcgaatcttctctttgtagtattttgtaacgagacctaagaccatcctgaccatccttattgatggtctcttaacataactcttatgttaagagatatgtcttataattaacaaaagtgacttaaagtctcttatataagaaattttgttagttataaaacatgtctcttagcataagaattgttttaagagatcatcaataatgatgatctaagaactattatactatgttccgtctcgattttgaaagtacttaaacgtcgttatcgtgtttgtctcggcgttttaaattccactgtattagtaagaatttatttttaaaataactttagtcatttttaattatctcttctcccttttcaattattaatgatcatagtaacttctcttgatttgtaaatatgctacatagttgatcttttgaatatacgaatgaaaacatattataatagtatgtgttcaaaatcttttgagttttatgagtacagaactatatgtttaatgggcagattagtatataaaattaccagtgcatcagaaggaataatgatctactcgagtagtatatcaaaataatactattcaaatgtataccaacgacaatgagttcaaaatcatcaaaccccatgggatgatgagcaaataatatttttatcagctactctatacatcatttgatgataatatgcaaaaattgtataccaatgagttcaaaattatcaaaccacatgggatgagaaaaaagcatattactatttttaaacagcttctccaatataaatttatttgaccgttacggaaagggagagagatacacacactctttctcttttattattttccgtttatttgacttttcttctttatagatcgacctggtcccacgtaatcttttcaaacttaccgtttggattcgataatcaccgtccgatctcacatgaagcaacgtgaataaaatgaacggtttagatctatcgaccgtttatagcaatacctttctcctttataatctctatatctctctctctctgaatttcgaaaattataatgctcttctgcttcgtactagctgcttcagcttcttcttcttcttccttagattcaaaatctctcttcttctgagtttctgattttcaagtttgagaactactcttttccttctaaatctttgatttttttctctcgtgatttttgtggttcactgctaattgtgaaccaaagatggtgaaatcagcagcttctcagtcaccatctccggtgactataacggtgacaccatgtaaaggatccggcgacagaagcttaggattgacgagtcctatcccacgcgcctccgtcatcaccaaccaaaactctcctctaagctcaagagccacgcgtcgcacttccattagcagcgggaatcggagatctaacggtgatgaaggaagatactgttctatgtctgtggaagatctaacggcggagacgactaattcagagtgcgttctgagctatactgttcatatcccacctacgccggatcatcagacggtgttcgcttcacaggagagtgaagaagacgagatgctaaaagggaattcgaatcaaaaaagtttcctctctgggacgattttcaccggtgggtttaaatcggtgacacgtggtcatgtgatcgattgttctatggatagagctgatccggagaagaagtcaggtcagatctgctggttaaaaggttgtgatgagaaagttgttcacgggagatgtgagtgtggtttccgaatctgtagagattgttactttgattgtatcacaagtggtggaggcaattgtcctggttgcaaagagccttatagggatatcaacgatgatccagagactgaggaagaagacgaagaagatgaggcgaaaccacttcctcagatgggtgaatcaaagcttgacaagaggctttcggttgtgaagtcgtttaaagcgcagaatcaagctggagattttgatcatactcggtggttgtttgagactaaaggtacttatgggtatgggaacgctgtttggcctaaagatgggtatggaatcgggtcgggtggtggtggaaacgggtatgaaacgccacctgagtttggggagagaagcaagaggcctcttactaggaaagtcagtgtctctgctgcaattatcagtccttacaggtaaagaacttttgctttagctgtttcttgatttagtatgtttttcttagaggcttactgaattaggatcatggaatagatttactatgtcgtgaatgtgctaatgtgttttgttttttcttgtgtgtgacgaaacagattactcattgcactgcgtctggtggctcttggtttgttcctgacatggagggttcgccacccaaaccgagaagcaatgtggttgtggggaatgtcaacgacctgtgagctttggtttgccttgtcttggcttttggatcagcttccaaaactctgtccggttaacagattaactgatttaggtgttcttaaagaacgctttgagtctccaaacctcaggaaccccaaaggaagatctgatcttccgggtatcgatgtgtttgtctcaactgcagaccctgagaaagaaccacctctggtcacagccaacaccattctctcgatccttgctgttgattaccctgtggagaaacttgcttgctacttgtcagacgatggaggagctttgctaacatttgaagccttggctcaaacagctagctttgcaagtacatgggtgccattttgcaggaaacacaatatagagccaaggaaccctgaggcctactttggacagaagcgtaactttctcaagaacaaagtcaggctggattttgtgagggaaaggaggagagtgaagagagaatatgatgagtttaaggtcagaatcaactcattgcctgaagcgataaggagaaggtctgatgcttataacgtgcacgaagagctaagggctaagaagaaacagatggaaatgatgatgggaaacaatccacaagaaactgttatagttccaaaggccacttggatgtcagatggttctcactggccagggacttggtcctctggagaaaccgataactctcgaggagatcatgctggaatcattcaggtaacttcttttgtcaaaattgtttgctaattgtctaactaatttcaggtttgtattgaaaagagagttctaatattttgtgtgttgctgcaggcaatgttggctcctccaaatgcagaaccagtttatggagctgaagcagatgctgagaacttaattgatacaacagacgttgacatcaggctaccaatgctggtctatgtgtcgagagagaagcgtccgggttatgaccacaacaagaaagcaggagccatgaatgctttggttagaaccagcgcaattatgtctaatggcccattcatcctcaatcttgattgtgaccactacatctacaactctatggctttgagagaaggaatgtgcttcatgcttgatcgtggtggcgatagaatctgctatgttcagttccctcagaggtttgaaggtattgacccaaatgatcgttatgcaaaccacaacactgtcttctttgatgttagtatgagagctttggatggacttcaaggtccaatgtatgtgggaactggctgcatctttcggagaacagctctttatggatttagcccgccaagagcaactgaacatcatggctggcttggaagaagaaaagtcaagatatcgctgaggagaccaaaagccatgatgaagaaagacgatgaagtttctttgcctataaatggagaatacaacgaagaagagaatgatgatggagatattgaatctctgcttctcccaaagagatttggtaactcaaactctttcgttgcttcaatcccagttgctgaataccaagggagactcatacaagacttgcaaggcaaaggcaagaacagtagaccagctggctcacttgctgtcccacgtgaaccacttgatgcagccactgtagctgaagcaatcagtgtgatatcttgcttctatgaggacaaaactgaatggggtaaaagagttggatggatctatggatcagtgactgaagatgtagtcacgggatatcgaatgcacaacagaggatggagatcaatctactgcgtgacaaaaagagacgctttccgtggaacagctccgatcaatctaacggatagacttcaccaggttctgagatgggcaacaggatctgttgagatcttcttctcaaggaacaatgcaatttttgcaaccagaaggatgaagtttttgcagagagtggcttacttcaacgttggaatgtatccattcacatcgctattcctcatcgtctactgcattctccctgcgatttcgctcttctcgggtcaattcatagtccaatcactcgacataacgttcttgatctatctcctctcgataacactcacgctctgtatgctatcactccttgagatcaaatggtcaggcataactctccatgaatggtggagaaacgagcagttctgggtcataggaggtacaagcgcacaccctgcagctgttcttcagggtcttcttaaggtaattgcaggagttgatatctcatttaccttgacttccaagtcatctgcaccagaagatggagacgatgagtttgcggatctgtatgttgtgaaatggagctttttgatggttcctccattaactatcatgatggtgaatatgattgcaattgcggtggggctagcgaggactctgtacagtccgtttccacagtggagtaagcttgttggaggagtgttcttcagcttttgggtgctttgtcatctgtatccgtttgctaaaggattgatgggaagaagaggcagagttccgaccatagtgtttgtgtggtcaggtttgttgtcgattattgtgtcgttgctttgggtttatattaaccctccttcagggaaacaggactatatgcagtttcaattcccttgattcttaagagttttttttctttcgtggtacaaggcatgaaagttcttctttctaggcttcagccttcatgtttgtaatcagatattataattacgatttttcaaagtaaagtctcaatttcttactttgttgttaattaatggttcaagtcttgacgaggatagaattatttacacagtcggtatatcttcggttaagtcctcatgggtggtcaaaagtcaaaacaaacaactaatgggccactattatagaagcaagcaacttcggtttagtcctcatatgatctcattattcaaaccacaacactgtcttctttgacattagtatataagtcttgcatcttatttagagtgtttgtgtttggttccggttgatctgtaactgagtttatgtaatcacacaagtatgctgtttggttttagtcagagatagtgtaagaagacatcatacacatgaaattggagaattataaggtaaaatctttaaccatagatttctaaagacttttgagaaccaaagtaaggactagagtctgcacaaaattacttataggaccaatcataaacaacaaaaacgctttaacctgagctatgtgtgaatgacctaactatatttttattttttttcttcccacaagaacatatttaaccgccggtacaacacttaaaacgaagttcactcttctaaattgtgtctacggtctggttgaactgtccgaagcaacactactatagcactctgttccggcagggtttactcaatcttcaacatagttgtttccagttgaaaaccaccattgcaactctgctatcttcggtttagtccccatgactggttgaaacaaacaaacttaagatgagattgtgattctgaacaatgcaattagtcaaatgaatatgcaagaaaaagttcaaaaaccgttttggttcccacaaaagctgatgataaccaacaagtatcttatgcatagctgtttctcaatgcagaaacaaggtaaagattcgagatccttttagagtaacccaactacaatcatacgtgcaaattctctgaaacccttttgcctttataagctaaatgcactaagaaactacataagaaaaggttaaacaatcactgaatcagtggtgttccacaatgcatcaggtccagtacggaccaagaaatatgccctaccactaacccaatccccccactattacaatctccaccaattggccaacaatggagtatttaactataaaggaaatcataaagcttctatcttttttgtttatgtaatgttatgagtgccaaaaaaaagccatacccagaaatggtaaaaacttcacatctgcttaaaagagtaaaaaaggcaaccccaccacgaacacaaagaatgaagattcctattgcacctttattgatgaacaaacaaacacaaacatgacattgcaattgaacagagtttttgtatagagagtttacccatgaatatgtcgaactcgaaattggcatcaatgggagtgtttatacaaatcataaggtgcccacaatgtgtctaaaggacatggaagcttggaatcgagtcttaaccatggcttaccactacctgaccagtgaagcaaactcacaggaccagaatgcaaatcacggcaactacctctaacattatcaccaccaagcccatgttgattccaccgatgtgaaatcggagctacatgaccagcaaataccagaagaaacggaggaagagaaccaagctcataaatcctctctatcttctgaatctccatccatttctcaattcgtttcgtgaacctaaattgtctccacttcttcaaatcaatcaccattacaccagtattgaagtaacaagggttcctccctttgaacgtcccgttaaacctcttatctgaccaaaaacctccggtgaagtatttcgtgaaattcgcgtgacaatactccggagctccgattgttctctggcctaaacccgttttccaaagcttgacgatatcatcgacgacgacgagatccgaatccaagtagatgactcgcttaacgcaaggctcgagcagatccgccaagtaatttctggcgtaattcaacggttgctctagggcttgtctcacggaagatgaaatcaaagactgtacggtctcaggggcaaaatagtaaattttgagattcgtcaatttggggaaagtagaacgaatcagagattctaggttttgagactcggaggagacgaggaagtggaagaagacgctttgagggcacattgagtgctggaggatcgaattgacggctgcgattgagccacggaggtaatcgatgtcgagagtgatggctacgtggacgagattagggttacagacgccggaatcttcgccggaagatctgcattgttcggcgttacggaacattggagattctctgaaggaggagtaatcggagttttgttggggtttgaattc

SEQ ID NO: 4 - DNA, 78341 bp, Arabidopsis thaliana
actgtcacaaagaactagaaaaggcaagcaaaactcaactatgtcaaaagtgtcacttagattgattcttgaatagcgagacgaagtatctgggaaaatacggtactgaattaacatctccgtcagatcataggttcggattgaacagatgacacaattaaacaatgatgaagatcaagacactttaatcgactgaattctagttagaacttagactaaaagtatttaatacttgaagctcaccacttctcgaatatcttgttccaatcgttttgatgtggttccggcactcaagttctgtattgttttcaagctgactttatcagttttctgaagtaagtcatatgtgtctatgcccaattgcgtttttgaattgacatatgttggccatttgttttcgaatgatttcagagacagactcccttcacgggcagtatttgattgtagccattcagcatattttccaagcaattcctgcaaacagtgaaatgtaaagtcaatcaggtcacaacaagacattgttagacaatatttactttctgcatgaatagtgactatatctcagacctcatatatatgaccaacatgtccccagttaggccaatactcaaagaataaagcatcacacttactttcgcatttgtgagtgctggagcgagtatttcaccttgaactttggatgtagctgctactgaggccgatttttcccctttgaacacgtacgagatcgcaagatcaaggcttgatagtcgcagggtagttcctatcagatcaacaacttgtaatctggcattatcaatctgcgataaaagccagagtacaaaacacaaaaaagccaagttagaacaatccaatttcctccttcgtgattcaacaagataatatctaatagaatttataccaacgagagagcctgccttctccaagaaatgctctcatattccatcttaagcgcgtattctttagttcgactgataatcttgtctgctgaagccaagtcttccctagcagctaggcaatcttgtctcacaagagcttccacagaagaaaggagacgctcagcaatcgccatgggtgtctccaatttaagccttattctctccatcccggtagctgttgagctatccaagaagctataaagaaatttctcaagttcattgaagctctggactctccaattagaaccaggatctgcgatctcaagatcatctctgccaaccaaagaagctgttgaaagcttcgcctcaagagcagaccgtgcggacaccggatacaatatcacattttctgtattaagcaacttccgtgtattctctttaacaaatgaaatagcttcctcaagctgcagcagtaaaattaatctttagtcaagaaaaatccagcaattacagagactatcaaggaaaagacataaatattgtttctgataaacctcacgagcatcacgatagatatcagatttattcagaataaacacaaatttctttttccactgctgtgtgtaccggagaaacgcaacctgacaaacgcaatgagatgtaaatcagcctacagtaaaatcaagacagcaggaagctccagaggtagagatagaaatgacatgggtatgatgacattgagaagcttattccttcttttgaaactttttcagattttcaaaataagaaccaaatattcataaggttagtacttcgtagatgatcatttacatacaatttgccatggacgtaaaatcagttttgctgtaccaataacaactcacctctcaaatgtattggcctaagctttaccaaaatatggaccaacaggacatactggttccagcaatagctataacactcattactttgaaaataaattagtctagtttaaatttataatcaacaaaaccttgatatatgcattcaacctagtgacaactttcccttccctacacaaggtcttgatggtctatacatgacttaactaactactttcgtgaaaaatagatctaacaagctacttaggcagatacatattgagcaaaaacaacaacaactaacatgccaagtaaaacggtaacttctacctcactttcagttaaagggcggtcagcagaaagaacaaaaacaagcaaatctgcacgtggaacaaattcttctgtaagacgctgttgcctttgaaggatcacattggtcccaggtgtgtcaacaatatttatctgctcgaaaggagaacaacccaaatcaattcctccaaataattagtaaaaattcaggactgcgatggtagaattttgaattactcacatccttaagtattggtgcaggaagatagcatacatattggccatctggatgtgtttggcaacgttgttgctcttcggattccaagtcagagtagcacagaaacgtgatttcattggtagtggggactaccccttctttcaggtatctcttcccaagaagtgcattgataaccgttgattttccagagttaaattccccctagtaccagcaaattgtggattccaattaattatccatacaaaaactattttgaatcataaaggcaacttgtcccacttaaaacatcttccaagaacggcatactcacaagtcacaagaaagcgaaaaaactatgtacacaagcagatggtacagttaagaaatatgcagttcccttacaaccagatccataagcaaattaagaagagaagcatagacagaacaaaagaagaagcgaaacatcatagtcataggcgacgaaagaagatattgagaagcactaaaggacaagtgactagaagcatgcccattgtatctcaagctatctagtgctggcaaaagtgtgtaactaaaatgtttctggaatgaatatagagctaataccaatgcaaattcctggaatcacaatttgacggagttgagtgcagaattaccactataaccatcagaaacggctcatcgatccgagaaacagcatcaattagaagggagacttcctccatctgttaatgaaaaatagtcgaagaagtaaatgaaaccatattataaccacacaaaaacctacttagaaccatttcaaaaaattgacttcaactaccaaatgtttgaaataaaaatcaccagtggagccgccttgtggatgatttcaatcgtctctctcaacacagatttctccatttctactattagtttctgtttgtcctctaattttatgaagccagcagaattctttttctccggcagttcattcatattttgtgtctcatgattatttacaacataagctccatcaagactctggcgaagagctacatccctagaagaacgcaaatctttcaacgaaataacaaaaccagaaacacctgatttcagtaactgcaattcttctttagcttcttcattgcctctgcaagtcacatatatcggtattttcacgctcttcaacaaagaatccgccacttgcgtatcttcttcaccagatccaagtataaggaaatcagcaccctcggagcttgaggcaattagagcagaatcaacatccttcacaatccgagctaccagtggaagaagtaccgagtcggggttggatcccatcaatgtgtttctcgccacaatcgccggaagacctgtacatagcattgagagacaaaactcactctatgagaaattaaatgctaaaactgaatgaaatcagttgttaccttcgtcggagagagcaacaccactagcaccaacggcggaggcgatatcaacacgttcagcgatcaagaggtaagcacggcctttgacaagtgatttcagcaaacaagccgcctcgtagagcttaccagcggtggctccgccatcaatcacgacgatttgaaccgatttagctaaagcacggtcgaccaaatcaagagtctcttcacgattcccgctcataacctcgtcggcgtctagccggagaagtaaaccgggaacggcgagttcgggacgcttgtaaccaccaggataaagagttcgcggcctagaagaagaagtctgatcggcggattcatgcgaaatgtttctgatcgagagagaagaaaaacgcctatgacgtggaggagtaaaggaggataacttaaagcaccggccaggaaacggtggagatgcggcggagataagaaacggtgacgtcacacattgccggtgagagattagagttctcatggagagagaaagagagagagtgagataccttcgtctgtgtttctgattagttttcttatctcttaaatatcctattggcccatcccaaagctataagacggacggcgcgattaattacttttcaaacacatgaattaacgttttcacatatgtgttcatatccaaaaggtccaaagtataccacgaaaagggagaaaaacagatttaaattcgtgaaatccctctcccacaattaaatttacttcttccaaacaaagacaaacggcttgaaccagtcaagtaagtgatacggcaccactagatgttccagagcctccatcttttttaatacgaagaagatttgtcctttgtgtgtatgaatttaacaagttttaattatagatttgtgtgtgtatgaatttaaaaacctagtacgtagcatcagggaatgatatcatagctattttagttgagctttcaaataagagatgatcaaaatttagaacttctaagaacatgaacgaataaacaactattttcttttcaaaccaactaaggtagatggtcactgaaagtatatacatcagataaaagttgcttgttattccagatgaagttggaccgagaaaaaaaaaagttacttgttattcaatatgtttggatctttgtcttgcagattgctatatagggttgataatgggcttcgttgtaatgggtatacagtgtataagaatcggccttgtgcaaccaatcctaatatgtgtgtctcattaaggtaagtgcttaagattagaagagtaaaacacttgacttatcaactatgtcaactaagggttctatatttttattaaataaaaaataattgaatattttttagaatgatttaataaatttaatgctattgtttgatttaaatgtataattcaccgcgagaagaaattttataactcaaattttaaagttttaagttgtatttgtttattttgttaaatgtttaatattgtataattgtattttgattgttgtttctcggatttcacccgtagtacatcatcccatattaatatcgaatcaaacccgtcaattctaaaatttcacccgtggtagtatttaattgtataattatattttaattgtcattctaagatttcactcctaattctatcgcaaattattatcaacccaaaccagtcaattctaaaatatcacccgtagtacaccatcccatattaatatcgaatcaagcccgtcaattctaggatttcacccgtggtagtatttaattgtataattatattttaattgtcattctaggatttcactcctaattctatcgcaaattattatcaacccaaaccagtcaattctaaaatatcacccgtagtacaccatcccatattaatatcgattcaaactcgtcaattctaggatttcgctcgtggtagtatttaattgtataattatattttaattgtcattttaactcctagttctatcgcaaattcttatcaacccaaacagtcaattctaaaatttcacccgtagtataaagtttaaatatttataatatttaaatttcttataaaagaatcaaaatgtgttttaaaaaaattaaagttttaagttttttttttttaatattgttaattttgtttagtgtttaagattatataattacattatgattgtcattatatgtttttctccatagcatactatcccatgttattatccactcaaacctgtcacaccatataaccccgtcccgtgaaattaaacacaaatttgtcattttattataaatttcaaatatttataaaattagaaacttcaaaaaagattaatattgacccaaacttcatcattgaattttgagtgttatatctaagatttctctcgcaatatatcgtcccgtattaatatcttttatattgtttaaatttcttgtaaaatttaatttataattttttaaactttttaaagtttcaattttttaaaataaataaccctaggaaacaaaccattttaatttaaagataaactttataaaaagtttttaaaattataatatttaacttttgataaagttataatatttataatttcttgaaacattttaaagtttcaattctttaaaataataaatccgagtaaaatcagataactattttaattttggacgcttgataaatcaagcttcctgctcattcgtaatcagaatcattttggtccttttataatatgggtctgaaccattgtccaatttttctaagcgatgtgggacattgtacacatattatttcttcataggttgaataatatatgtccgtttaaaaaactttgaattacatcatattcagaaaaaaatataatattttattaactatatatattttatataaattcaaaataaataaagtataagatcaaataaaaatgaaagaagaattatatatttatgtttaaattaggtagaaatattttaggaaattggttaaggtaaataagaaatatggttagtttagagatattgtttatattaaatcattaattttcgtttttaattattagtttttaggtaacttttccaaaaattaatgttatccaatatcagaacagaattaaacatgttatccaggatccgaacagagttaaaccgggtaaaacccaaccatttgaattaattgttgaattatggctcaaatcttcaacattatcttcaaaaatctcctccaaaaatgtatatatagattaaagtttaatcaaaactaattataaatttgtgtggaagaaaacgaaacataatagttcaaatacgaaacaacaggaatagtaacatcatctaaaggctcttggagaaatttttaatgcagataacaattgtgaaccaagttagggtcttaatcatactctaattcatcaggtgtgataggtctcttgagaggaatcacagactttttctctacatctcttgataatgccttcctcatatctgtttttttagatcaaacgatttaagatttaaacaaaagaaaaagttaagcgcgaatcatagataaaaagaagttaatcaaagcctcacctaatccatcttcctctcctgaataatagcgtaaaacccgcctataaattatgtatccaagctgccagaaaaaggagaaacggtttgtttcatcaaaatggccatcaagaagaagcctatgaaggagatttgacactaataaatggaaatatgtaaaatgtgtgcatgtcccatttacaacttcttctttttttcctacaatgtcatcaacattatgaggcttctaatcaatttcataatcctaatatattaccttttcatacatcttgatggctggtgtgttggaagctcttacaaaaagatccacaaagtaggctttatcactgcaatcaataaccacaagtataataatcattagaagaccagaaattaccagataatatataaaatcaatgaggagaaattcaagattttcttcctttgaaacaatctaaatatatcggttttcaaataaataaatggtccactcgaaagccaatatcaatatattaaggctttcatattttatatcataacgatccatatcaaagagaacactaaaacttgagatgctttgtaattgttaagtcttacatcttatcacttatatcttccagaaggttcatcagtttctttgcaagttgctgcctgcggtattctggagagacagtgacggctgtcacatgaccatgccaagattcaccctgtccttcaactttacccataactgaaaccatgtagaatcttagttagacacatgcttttaaaattatatttataagaacaagttttacatatgtcacttacgttggattctcaagaatatcaaccataacatttcaactatacaaaagaacatttcagtgacactgcttaattttcaaatgtgttaatatccaaaagcttagttttactctcagttctttcaatggtttcactatacttccaaggtctctttccaaactataccacgaaaagggagaaaaacaggtatagtaatagggcaccacgagaacagaacgtcaataatgaagcatatatcgtacttgaagaaaataaagaaagataaagccttgtataaatcacatttcgaaccaatccaataaggtatagcatcattatactacaaacactgaaagacagaaaaatttgagccttgatataactcataactcattctctggacatttagaagttagcacaaacaatcttaagccatgcttcctatgcatcttctaccccatatcaagatttctaaaaccgctaactacagagactaggactaatacaagcagaatttgtttaaacacttatacatcctggtttgtgttaatcagttttcaaacagagtcactcttcctggttttaacaacattcaagctatctccatctgataaccaaaaaaaatcaatagtggcttttacactaacagtttatcatctaagtttcaaccctaaaagtaaacataatctccacgaatttcaaattcctaaaccaacgaagacataaagaaatcaaaacgaagagaacaagaggattacttactataacccatgacacgattgccgggaccttcagcaacatgaaaatagtcaggccatctcgctaaataggtcatgtagaaggacatattgaactgtttcacgaaacaaaattcgaacaaaaatcaacaaaatcgccatagcaaaacaaagcaataatcagacgaaaccagataataagaagaagaaacacgagattactgtttcagtgaggtggtccagattcacggaagtgaatcggagaaggtcattgcagctgaatctacgtatcgtcgtcatctcttctttttctcaaatcccttcgagcttcgtcagattctctggaaaaagaaagaggagacaacaacaaagcaatatacatggcccagttagaaaattaataaagcccatttatatttgggcctataacactgatgacgtcatgtaaaagatgatcaaatttcattatctcccgtcgtcgcgaccttctcagacaacagaaccaaatcctcggcggcgattgaagaaacctttccgatggatctgctcagggaagagattctgaagaaacgtaagagtctagctgaggaatctggtggtaagaagttcttcaagcggtctgagatcgagcagaagaaaatccagaagcttcgagaggaagaacgacgcgagcacgagcttaaggctcagcggagagccgccgccgccgcttccggtggagatggaaaatcatccggctctgctcctggttcttctaacgcagctacgtctgcgtcttccaaatcctctgcatcggacgctgctgctatcgccgattcaaaagccctaaccgacgaaaacctaattctcccgaggcaggaagtgattcgtcgtttgagattccttaagcagccgatgactctcttcggagaagatgatcaatcgcggctcgatcgactcaagtacgttttgaaggaaggattgttcgaggttgatagtgatatgactgaaggacagacgaatgatttcttgcgtgacatcgcagagcttaagaagaggcagaagagtggtatgatgggagataggaagaggaagagtagagatgagagaggaagagacgaaggtgatagaggtgaaacaagggaagatgaacttagtggtggtgaatcgagtgatgttgatgctgataaagatatgaaacgtttgaaagctaactttgaggatctatgcgatgaggataagatccttgtgttttataagaagctgttgattgaatggaaacaggagcttgatgcgatggagaacactgagaggagaactgcaaaagggaaacagatggtagccacttttaagcagtgtgctaggtatctagttcctctcttcaacttatgcaggaagaaggtaaagattcttgctttcgattgttaattaggtgtaaatcattgtttggcaagaaaattgttagggagattatctctgtttatgaaattggagatagattatctcagttctatctaataagcttagagaactatgtttattaagcatagtttgggtaggaagaccaatgtgcagtgtttaggttccattagtttgtgtacttttgattatatggcgacaaggacgagttttctaataagttctagtgctaggtagacaatgagaacgtagaatagcaagttggaatctgtatgcaccttgaatttgccattgaggcctctgttagttatctccatttagctgaagaaaaataggctggaatgttgaatgcagaaaaagtttctctctttctgtctttgtcttataagtgttaagaatgtatactttcttacactgaaattttatgaggtttcgtgaacttgatctttctagttatggcttaaaattgcagggtttaccagctgacattcgtcaagctttaatggtgatggttaaccactgcataaagcgagactaccttgctgcaatggaccactacatcaaactagctatcgggaacgcgccatggcctattggagtgactatggttggtattcacgaacgttcagctcgagagaagatttacaccaacagtgttgctcacatcatgaacgatgaaaccactcgcaagtatcttcagtcagttaaaagactgatgactttctgtcaaagacgttatccaactatgccttctaaagccgttgagttcaatagcttagccaacggaagcgacttacagtctttgctagccgaagagagattctttggtggtaatcgtgaacaggtctcagaggagagactccggctcatgccttctcagagcgaaagctagtcttactgtgttttctgctttgttgtgtttttatttttgtatcaaaacgttgactctgtattatcgtctatttaaaacgttgacctgattgtctagtcttatgtggcatgtgggaaacatatccaaactcataaaacgacatggcctaaagatctagtaagggtaagaggagaatcgaatcttggaaccttattggtccaaatggtatgatcaccttatcccaaaatgttcgattctcatctaccctctcgttgtcagattctattaagccatttcatctctatccatttactccacagagaaagattcagagaaaacagaagaaactatggcaactcaagccgccggaatcttcagccccgccataacaaccactacttccgccgtcaagaaactccacctcttctcatcaagccaccgtcccaagtctctctccttcaccaaaaccgccatccgcgccgagaaaacagagtcctcctctgctgccccagccgtgaaagaagctccagttggattcactcccccgcagctagacccaaacacaccatcaccaatcttcgccggaagcacaggaggtctcctccgtaaagcacaagtagaggaattttacgtgatcacatggaactcaccgaaagaacaaatctttgagatgccaacaggaggagctgcgataatgagagaaggaccgaatctattgaaactggcgaggaaagaacagtgtttggctttaggtacgaggttgaggtcaaagtacaagatcacttaccagttttacagagtgttccctaacggagaggttcaatatcttcacccgaaagatggagtttatccagagaaagcgaatccaggaagagaaggtgttggactaaacatgagatccatcggtaaaaatgttagtcccattgaggttaaattcactgggaaacaatcttatgatttgtaagattttaattcgtattttatataataatgctagacaaacaaaacaaatttaaaaagggatcacactacatgtaaaatcttgcggatgttataacaactctttgaacttttcaagcagctttgttttggttttgtcgatcgagtgataccatatcatgtggtaagtgaaattctctagtttgagaaagacaaaaaaaaagtccattacttgggacagggtttactaatggtcagccatttttatatcacgaagtaaaattcttgcaaccagagattatatgagttatctgagaatttctataaacatcataaaggagccacttgatagagaaaacacctctcttttattccttcatgtacaacttcattaatgtcccaagaaacttagctagagttgttgattgagccttgcccctgccgacatggaatctgcgacaccaccaggagttgtcttcatctctgaactgcttctaagttccgctccaaccactgcctccgcatcttcacttgtcaccaccttgtctccgggaagcctctccgccgcatcctacacaacccaacaatccgaatgcaccaatttattggacttttagaatgaaacactaatagaaacaaacaaaccaaaaactccatcatattgaatccatctcgatgttagcgatagaaatagtcacaaatcatttccaacaatatctgttgtacctagactagctactctgaaattttggaccggaacttaaactaatctatctaggctaatatgaaatttacaatcactacattgatttcaatatcccacaataatctctcctctaccttatgtttctgcagttatcgaaataaagcaaaattataaaaatgtcattactgtgagaatatctgctatattcactttgtcttcctccgacaccgtctgttcattagtagtagcagccgcctgagccgctactgcaagaccaccgggtcgacccttagactcaccggtggctctagtttcggcggcttgaatcgcagctgcgtctctacggtcgacaggcttatctccaagagacaaagctgtagcctccaaagcctccccaatcgtaaccgtgtctacggatcccatcgtcgcaaccgttgggtcaggttgagagaaactatcgccttgctttcttgccacgtcatcaccggagacgctgaaaacgatgccgtattgatcatgtggccgtgtgttgtcctgatctcttggcctttgaggagaatgctgatgctgtgccattgctttgttttgtttttattcgaggcttcggagcttctttggtttgttattaatgggattttggatcttgaaagtaggagcttctctgtttattttcgatgtctgtttgacacgtggatgtttaactccacacttgtctttgccgcatgttgatgacatggatcgacctttttggatttgaattaacaaaaaaggtatttttgattttgctaatttttcttttgattggttagttaaattgatgtggaccttaaaaaattatatgagccctacttaaattttattttgagattttttttttttaattaaacacaaaagtcatcaaattgtactagtacatgcttgaataaataaaaattttgaaatagtaacagagaaattataacggtaacataatgatcaagatacaacgagagagtcacagaaaaacagaagataataagcctaaaaaaaaaacaatttggcaaaatgcaatcatcgtgtggttttcttatcatttctggttctttttctgaactctctcttctcttcagagtattgcttcttcatcaaaaggctggacattgccgctctcacagcttctgccgcagcactcattacactctcttctattgtaactttaccttgtaattgctccaatagtttggtccctcctggaatctgctcgtcttcaagtattgaagatgattcggtctcaaggcaagagatgacccgaacccttgaaaaaccaggatggttcgaaccaggcaggtttgaggctcctgataccatccatagtaatcttgaagatgcacttacagctatacttgtaggaatgaaactttctccagggatttttatcacctacaagattatttacccggttatataattgttttgttgattttactggatttgctaacaggattcatacctttgtgatagagagagtatgtgctgtcaaatcacagcttaacaagaatattccttgaaagctgcatttacattaatagaggatcaaacatctgatttaaacgaaacgtatgtgggctaaaatattagacttgcctttgaattgccactgctgcaagagacgaattcgggatagcgcatatgtcagtaactgtgacttgggtcggcgactcattttcattagactctgcatgtcctgccttcaaatacgcacaaacagaaatcactaacgctaaaaagatacacaaccagatatataaagataaatttgcagatgaatgtaataaggatcgaaatttctaccactgtactaacttcacatgtgtcgagaagagacccagatgtaatgtcccacagtcgaacctgaaattaacaacattagcaaggagtcaagcatcactcactggtcgtaagaactggagatatagactttaagatcacttacagttgaatctccacttccagacatgaggtatccctgagtaagctctggagtgctgacaaatgctgtgcaggtaatgaacctattaaggtttaagataatgttaatggaactgttcaatactctcagctttgtttacaatcttccattttgtaaacaacactctgataaatatcgtagaaaccaaacattaagaatgcaaacagaatatttgggatcagattagatgttgctttaaactctaacttactctgaatgtccaagacaaaaactctgtatttcatgagccccttctagaggcttcttgggaaaaacagtcacctgtgatggcaaacagaatcactataagaccaatctgagcaagaaaggtatgacattgtgcattagtggattagactagcttacccttatcttaaagtcccggtctgcactaagaatatatctaccatctggggaaaactcctatgaacaagaacagatcagaatgagtgacatagtaagttaaaacttcagcttttcatcatgcaaaaaaaacgagacaacatataagaaaggcctattgacaaaactttatcttaccaggctagtaataatactacaataatgggaaagcagcagcgcacccttcttactaggtaaagttttaccgtcattgatcccatccagctcaatcacccatacaacaccaaacttgtccgcatagcaaacatgtgagtcatcactacttatagcaactgcgctaactcttttctcagaacatctgccattaatatgatattataagcttaagaaacatgagataagcatagagtctgttttggataaagagggaattgcaatgctagaaacacaatgcgtgaaaactaaaactaaaaatggaccaccaattaatcatagtaattattacgatatgtagtaactaacttacactgtgttaagacagcgccaagaatctgcggaccaaatcttgacaagcttgtcatcgcctgcggacacaaagagcttgccacttgtactgtaccgaatagctctaatggattccttacggataggcccatcagattcatccaccaaactaactgggcaattctctctgtcaatttaaacatttaaagcaatcggttaactagataaactaaacattcctctattccaagtttaacacatttgtattggtgattaaaattcaattgaatcagctttaaagcaccataacaaaattcgtcaaaaacttgttaaatttcacaaagccacacgaagagaagtttcaaggttccgatgtctgaacccaagtcaatagcaagtctaattatcctttcaaaacaaaccaatctatgaagagacatgttcgaatttgattatgaaggaggcaatgaacttacataagatcgaaaatacgaagatccgagccgacagcgacagcgacagatttctgagatggatgaacggaaatcaatgcaggagcaacttcgagtttgttttggatttcaacttcttcgatgtgagattcttcctgcattgttgttgttgttgttacacagagaacaaaggttggagtttttagggtttaaagcagttcgtgaaaaaaagccgccacaaaagcacaaacaacaaaatcgattttatgtatttggattgtttggatgttagtctaatcgttttctcattagagttaagaaattgagcgtgttagtgtttgtttggtactactcgtaagactgggtttcaaccatagttgggccggaagtcgaaaccttatgggcccattggactatatttcctgctttcgatttattccaataaagattctgttttcgtatgttttaatctttataaccaagtaggaaattcgaaactcgattggttggttgacttctctctcttctctccctaatatttttcagagagagaggttcttatatgttatctccgtccggtttgtttttaccggagtttatactcggatgaagtccggttctgctgttagttagccgtcaacacgacttctccgttgtcgtgttcttgccgtcaacacagctttttcgttgctgtgttcttaccgttaacatggctttctattgccatgtccttttgctcatacaaaagcttgatgttgaagactatggcttctaggattgttgaatcgggagagtttcgtatgcgccaaatctattctcttttgccataatatacttcatccattgagattttgcttttggatctgatggttttctaacgatgtgtggttttcacttccacacaaaaacgttggatccatcggatttacgacagcttatgttacctgcgtctaaggtttggttaaaaactcatttccatcttaaatttcgattcccttttgctgcttataaaaatattcagagattcacttatattatcaagggtggattacttcaatctctacatcttatttcatgattacgatggttttcttatgaatctatcaatcatttgagattagtagattgatttgttctgtaatccattattatcattatcagtgagaaaaaaagaagaattcgtaatcggttgtagttccggcaacgtattctgattcactggatttggaatctctgcatgcggtgaaggatgtgaaataaacacgtatcctcaacttatccccatcgatgagacacgttcttgagtttatcctttcttgggcctcttgtttgggcttcgttgaaagttgtctttgatgtttatgtaattgggtgtgatgttatgtattattatttcaataaaactgcagtttcagaggaaaaaaaaaaaaaaaaacaagtatgaaagactttcaacgtacaatatgaattttatgaatttcaaatacattgaggaagcactacaaatattacatggagacataaattggttaaaaaaaagtaaaataaaaagaagatctgagattcatattatagcgaggaccagagctatggatacgaaagacaagatgatcacattgctcttggacgagctttcattactcaatggaaacttcttcgatcctgtttacaagtttcatcgattaaacacaaaatatgaattttattgttttctaacagtctattttccaaaagcacaattcttaagaagataaatatattatgaagtgtgtattgaggtatttgtggtgaacctgatggtgtattcgccggagacgtggtacctgacggtgaaggagcacttcgaggtgaacctacaggagtattcgccggcaacgtggttggtacgttaccaccggctataccattatattataaaccacaaaaaatttggatcaacaaacatatatttttgaagtgtatattgttagaataattaagtttcttactgttacacaggctaggtgatggagtttgaacattgcaagcggtagggagattgagagccaaagtccggttaaatttgaacccataaaatgagctttcgttgctattaaccactgagcacaaacattccggtgaagattgaaccaccgtggaaaattgacgacaacaactccaagaaggtgacgatgagccaccgttgaggtaataaagacaaggggaaaggctggtcagagtgtctctgcatccagcttggaccgtggtggctccaccgtatagaaaggtggctattacaagggctaatattgcaagaatcatttggggttatctttaagctttgggattttgtatgggatattattagtagtcatgtggtgatatacttatagaaaggtttgagggggctaatttgttaagaaggattatggataaacctgaatttttgcattaggttttggatgaaattgtgtgtttattcgtatttgttaccaaaaatgttactatatagaatttaatgaaaccaaccctattgataaatctgaaactatgcattgcattttggattaacttatgtttatgcgtattgttaaaccaaaaatgctatcatagaatttaatgaaaccaacccaagattagtaaaaagcttaatcttatgaaatgttataaataagcatggtttggttctaactaacaataaattttttgctagataaggaccatttactatgacagtatatgatatagtgatactcaatttgacaaattccttagaatattattactttacttatttttcttttctctttttgtcaacacttgatatttttcggttaagcaaaatttacaagtttcttctggctatagtgattagtgaatagtgattagggtttagtggttcttcgcacctgccatcatcaacggtcaaagacccatcgtcttctcaagaaagcttttgtctttttctcctaatctcacgttagtgctcaaagcttgctggttcagttcacgcaccaagtgttcgacgaaatgtctaaatgaaactgggaaacagttttcatcaaatcctcataccagccgaggagcttcaaattggtcttaacgaattgacgaagaaaaataagatctttcaatgttttcattgaggaaaactaagcttcagcctgtttcactccaccagtgtcgtttgagttctttgtttcgtggagttcttattcacgccattgaagttacaggtactcaatctcaagcttctttacaacatggtttggcgggtaaagctgttctgtctaatgcaaaatacctcagtgtgttaactaggtttcgtactagtaccagattcgatgtatggtctatccatagaagagaagcaatttcaagcatttctggatctatactgcttcaagccagagatcctgctaaactcaatgaagaaattcaaattgcagttgatgaacatagatgtgatgaagcttggagattgtttgaacaacatatgcaaatggaagggtttccgcgaaaatctgttgttaacaatgttgtggtttgttttgctgagagtcttgattccaactggctacaaaagggttacagtttagtggaacaagcctatgaggagggtaaacagaatttgctggagaaggaacctcttctatatctctccttggctcttgccaagtcaggtatggctgttcctgcatcaacgatcttgaggaagctagttgagacagaagagtatcctcatgtgagtgcttggtctgcggttttggctcatatgtctcttgcgggatcaggaagttatctttctgctgagttggttcttgagattggttatttgtttcataataacagagttgatccacggaagaagagcaacgcacctttgcttgcgatgaagcctaatactcaggtgttgaacgttgctttggcgggttgtttgttgtttgggacaacccgaaaagctgaacagcttcttgatatgataccgaagatcggtgttaaagctgatgctaacttgttagtaataatggctcatatatacgaaagaaatgggcggagagaggaactaaggaagcttcaaaggcatatagatgaagcttgcaacttgaatgagtctcagttttggcaattctataactgcttgcttatgtgtcacttaaaattcggggatcttgaatctgcttcgaaaatggttttggaaatgctaagaagaggaaaggtagcaaggaactcacttggagccgccattcttgaatttgatactgcagatgatggtagattatacaccaaaagagtatctggaaaaggatcagaggttaaagaacacgataatcccgaaactcgagtggtttctattcacagtatgattccctatgatgagttctctagagacaggaagtttttgaaacttgaagctgaggcaaaggatgttcttggtgcattgttggctaagttgcatgtacaagtcgaattgattacctcggaacgcggtgttctgcagccgacggaagagatttatgtgaaattagcaaaggcattcctggaaagtggaaagatgaaggagttagcaaagtttctgttgaaggcagaacatgaagactctcctgtttctagtgataactcgatgctgattaatgttatcaacgcatgtatttctctaggcatgttggatcaggcgcatgatctactcgacgagatgcgtatggctggggtaagaactggttcttcggtttattcttcgctcctcaaagcttactgcaacacaaaccaaactagagaagtgacatcactccttagagatgctcaaaaggcagggattcaattagactcaagctgttatgaagctttaatccagtctcaagtaattcagaacgatactcatggagctctcaatgtgtttaaggaaatgaaagaggcgaagatactacgaggcggaaatcagaaatttgagaagctcttaaagggatgtgaaggaaacgcagaggcgggactcatgtcaaaactcttgagagaaatcagagaagtgcagagtttggatgctggtgttcatgattggaacaatgtgatccatttttttagcaagaaaggtttgatgcaggatgcagagaaggcattaaagaggatgagaagtcttgggcattcgccaaatgctcaaacttttcattctatggtcacaggatatgcagccattgggagtaaatacacagaggtcactgagttatggggagaaatgaaatccatagctgcagctacttcatcgatgaagtttgatcaggagttgcttgatgcggtgctttatacatttgttagaggcgggtttttttcccgggctaatgaagttgtggagatgatggagaaaaaaaatatgtttgttgataagtacaagtatcggatgctcttcttgaagtatcacaagactgcttataaaggcaaagctccaaaagttcagagcgagtctcagctcaagaagagagaagctggtttagtattcaagaaatggctcggactatcttgattattaatgtaatcaccattttgtatactaagaagttaccttcaatctctagccgcacagatctatatagaggcagtaaaaacatttataaagctttggatttatttatcttttgtaagatttcggtttatatacacacccaaatgcttattagttcaggtttcgcgtaagccagcgaatggttgatcaatcgcaaatcgtgttatttaccctgcaaagatattgaaattggtggagttggatgaaattttcaaaaggatgatatgaaatgtataaaggaaaaaatgctggtactaaattaccactaacctttgatcctgaatagagcactgccatctgaaacctgttggcctgctttaactttgaggtcctgtatgcttccagaggatggtgctttcacaacgtgctgaacgagaataaaacgataattacttaaatgtttcttatattatggtatatgaagatgtttatatactaacctccatcttcattgcctctaggactaatataggttgaccttgatctactttggcttcgttttcgacaaggaccttgactaccaaaccagccatgggggccacaatggttcctggagggtgtgatgatgtttcggagctggttctgtgttggacaccttcttcatcttcagagaattcgattcctaccttctgcttgaactgatggtgttctgaaccatgccatatatggatatgcttataaccatcctgtaaccaaacatacatcataagcagcaattacgagagagacagaaagagtatgagagctgttaagagttgcttgaacataatgctaatgatttaccttcaagtacgcagctagactaacattcatgctcaatccggccgcttcaactctaaaatcgcactttcctgctcgtgttactctgagttctaaacttggagaatcattgccttcctgtctcgtggaatgttgacaaaccataagaattccaattataagactcataaatgaagtatatgagtctaaaagtgaatctaaaaggaggatgtgaagttttaaacctcaatgagatagcttccatctggttgatatcttacaccgagtgatatgaggttagagccagttccctcgcattcattattccattctagctcaatggtttgtttggcttcatgatggaccctaaaaggaggattcgaataccatatcgatggaactttccctggatgagtttacacataataaattaagacatgctcgggaatcatgtaagttgtgaagaagagactagacccatgcgaactgaccatgattactttcattccaagtagaatgctcgattgtggagatacaagcagccaccaatgctgcactatgcttgactgccttgtatgccacttctgttgcagctggattgctttcgtcagcaaatagatcacttttatggtgctcaataaaatgagtttctacattgcccactgcaaactccttatgactagcaagtttttgaaggaaatttatgttcgtaggtacacctgctacctgtcaacaacataccatgtaattactgaactattgtggtaactaagaagcgatgtgcgagaaactcaaaaaggtttctcaagaaattcacaatggaaccataaggccttgaagatttatagttatgctgaggtataattaaaattgcagagagctccaaaatacaggttctcagggaatctacctgaaagttagacaagcaatccttcagtttcactaaagcttcgccacgattacctccccagacaacaagctttgcaatcataggatcatagtgcatgctaacagtgtctccttgctcaactccagtttcaacccgaactgtttcagacaaattccaacatgagagaggtaaacaacaggacaaaaacagggtcagatatatacgagagaaaaaaaaactttctataagataggaaaaaacagttgtatacacaattttgtacttcacctgatggtgagactgcaacagggcgataatgattgaggaccccagttgcaggaagaaatccttttggaacgttttcagcatatatcctggcctcaaaggcatgacctgccaagaagatacatatgtgggtcatgttgttcagatttttttctgccacaagtaacatcttgaaaaatcatggattcagtacggaatagcgaatgagagtaaaccaaaccactattttccatttatttttaggaggaagagccatacctgacattggcacctcggattggcttaaggggagaggttccccattggcaacccgaatttgccattccacaagatcttgaccaacaatcatctcagttacaggatgttcgacctaagaaggatcatcagtgttcctttggaaagccaaatgtttatcgagttaaatttaataaacatatagatcaaagaagcacctgtagacgggtgttcatttccataaaataaaattgatcagactcggtgtcaactataaattccaccgtcccagcattataatatccaactgcctttaaatatcagaaggtaacagaatataagcgcttcttgtggaagttgaagtgaaagatagcctagcaagaagaggtttcaaaagactacatatcaattgaactaaacattaacaatagtaaactttgatcaaataactcatgatcaatattagtaatgcactatataaaatagagacacccggagcatactatgaatgaatgcaatatacagagcattgtaatgaaacattttcggctaagctttctcactgaagaccatgaaatctgtaaaagatgaaagcaggatttaaagggatacccgtgccgcagagacagcagcttggcctaagtttgcgcggaacttttcagatatattaggctgcaccagtattcaatcagacccacatccatttatgctagaaaagatatgaatcaataacagaaagaaatatggtcattaccgcaggagcttcttcaataatcttttggtgtcttctttgcacactgcaatccctttcgtatagatgaagaacatttccatgtttgtcaccaaatatctaaaagcagtggaaacaccgaagcaaaattagttaaaatgctagaaaaaaaggagaaaagccagaaatggttactcaatgagtacgccaaaaatgaaatacaagttaaggttaacatttgtcctctttctatatacaataactgggtttcaatgcgccataaccagcctttcatgaaaaaaaaaacaacatgaaatttcacgactcactacctggacttctatatgcctcggtcgagtaatgtatttctcgagaagaatagtgttaacgccaaaagaagcagcagcttcacgttgggcacccaaaaacgagtcagcaaaatccttcccactttgcactatcctcattccctaaaaaacaagagcttactttgcttcgaaaccaatagattttaaaagggtatcaaactttgactattacaaaaagccatctattggaaaaaatcaatgccgtatatcataacataccttccccccacctccatgtgttggcttgattattatagggtatccaatcttttcagcttctgacttcatatgatcaatatcttgctcatggccatgatatccaggcacgagaggaactccagcagctcccataattctcttggatgcacttcataaatacacatgagggacatgtcctcagaaactattcaagagagaataaaataacaacttgtgcaaagaagaagcaagtcgtaataggaggcctgtaatggtaccttttatcacccatgtctctaatagcagatgctggaggtccaatgaatgttagacccgaatcctcacagagttgggcaaagtcagaactttctgacaagaacccatagccagggtgtattgcctagttatataattcaaagaagacatcagctacaagaacacgattattctttttcggggatcaaaactcatacctgtgcaccagtccgagccgctgcctccatgatagtcacaccgctgaggtaactaagtctagccgagggcgggccaatccgtaccgcttcgtctgcagatttcacatggagcgaatctctatcagcgtcactgtaaaccgcaacggtctgaatccctaaacgcttcgccgttctcatgatccggcaagcaatctcgcctctgttcgccaccaaaatcttctcaatacattgctccttaggcttcatcgatgcggagccggaaatatatctcacgagcatcgagtgatttttccgacgaacattccgtcgaagtgcccacaccgtcatcatcgacatttgatctcgattttcgaattttccgagtgaagaaaacaagtgtgactcagcaactgcgttgtagataaaaccaaacaacgagggtatgttggtcaatttcgtaaaaactaatcgacgatgaatagtgacgtggcatatactttatcatggtttggtcggaatggatatgtgtctgatgtgccgcttgcgttgcgtctttacctgattttacaagtatgggctttattgttttattaatgggcctatctgcacgaagcattaagaaaggctgcaaggccttgtttcagttttgaaatataaatacttttgaatcatccatataaatcgcattgatgtaattttaaaattcacttggtcttactatatagagtttttaatataagatcaatttgactattaaagacatgtggagggatagttataaatgattttgaaaatcataattaatctttggaggcatgaaaaacgatacgagctggaactattaaaagtgtttgttaggtagtggctgttgagtgttgactcctctattcatttctttttgttttgcatttctataaccgacaaaaaaaacaatacaattaaggaaaatatacacaatccttttaattaattcaatattggcaacaaactgaacaagaatatatgttagtaataaacttataagaagacaatttgatttgaagtcacgctgttgattatttagtttacaattaaatgaatcttaacacactcgaaacgtttatgtaaaatagtatataaccgtttgtgatgcttaaaagtcagacaacctatttgttcccaataggtggatagtttatttgtccgtttcgtgaatcttcgtttgagtaacaaataaaggatgatatataagttgtgtcaaacaagtaatgcataccaaacaccaaaaacattctcagtcaattaaatttgaatttatcgtttttaatcttaattataatattattttttaaattataaattttagaaagctgaatgaaatgatacataacgataagccaccatatatcgtatatacttttttcttgcaaagtttaaataaaagttatgaacaacgtaactctaactccgactcaacttttagatgattggaaaaagtttgacacgcaagatcgcaataagtcgaatctaaaagcgaacgtggagaaaaaaacaaagggtgacgaaagtggaccgagagctcaccgtccaagacctccctgtctttgtcacttatctcttgtcagcctccttatcattactagtatttaatactttttttttttttttaaatcatctttcgtgatttaatactttgttattccggataataaaatgtattaaaattacaaaatcattttagttcttgagcagacaggtatagaaaaagaaaaagtgaactgcagacttgatataaatcaggggtaaatgggaagtatcagattgaaaaataaagaaatcaaataaaatgtcatactgtatttagttgtagttcgataaaagaatattttctttcggacatgaaagtcgtgtttttttttaagttggcagcgaaggcgatcccaaggaggcaaagtcacgcaacaagtgaattaaaataatgaaacagaacatctgtgagaactgtactggagggtaatatcgtcatttaaaagcttacctaaacaattcttcttcttcacaacgtaaaaagtaggaaccagagctgaaaaacgcctggagagagaaagagagagagatctagatgaagaaaatgagatgagaagaagaagaagaagaagaagtgaaagcgaaagctgatccgaagatttctgatttttgtagtacaagtattatttccggtaagcctcacagaattcttgcttttggacctgatttcactagtgttagattcgctttgtagatttaacctgtgtagctaatttcagtttccgactaagtgcgttactataacctctaattcctgtaagatcatgtggtttcacttgctattcttccctaggattctcgtctaatttccaaagacgaattgatttatgctgatccaatttttcatctgtaatgaattgtttgatatgttttctgaccaggttactactggatttggctagttaattatttttgtctcgaatttggccttcattgacttagtggtaattcgtttctattttttcttttgttttcttctgtatttgtcttttatatgactgttgaacttgttcattattatcaaagcttaacccttgctattttcttcttcttcttcgtcttcttaagttaggatttttttacagaggaatttggtgtacttggctttgagagagacttggttccggagtgttctaatatcctcataatttttgtgtgattttgccgggaaaaatgactgctgttgtgaatggtaactctaaacgctattcttggtggtgggatagtcacataagccccaagaactcgaaatggcttcaggagaatcttacaggtatgtgattttcttgttttaacgtcccttgtatttcccacgggaaaggtcatttccatcgtgacaaatttcttttacttttagttcagttttgtgtcatgcaagatactttgtatgcgatctgcttacatgtttctatttttgttgacagatatggatagtaaagtcaagcaaatgatcaaggttattgaagaagatgctgactcttttgctaggcgagcggaaatgtattacaagaagcggcctgagcttatgaaactggttgaggagttttatcgagcatatcgtgctttggctgaaagatacgatcatgccaccggtgttattcgtcatgctcagcagactatggctgaagccttcccaaaccaagaccctatgatgtttggtgaggagtcacctctcggttcttccaccgatggttttgatccacaaacgcctgacagttatccacctatccgagctcctgtttacccagatgatttacgaaaaggtgcttttgggatttcttcctctcatttgagtaccgttaagcgcaatatagccttcatggaagaccctcagtctgtgagtagcgggaaaggttttaaaactgcaaaggcaaggaaaggactgaatttcaataatgttgatggaaaagaaataaatgctaaggttctttcagaatctgaacgcgcaagcaaagctgaggctgaaattgtggctttaaaagatgctctttctaaagtgcaggctgaaaaggaagctagcttagctcagtttgatcagaatttggagaaactgtctaatttggagtctgaggtatctcgtgcacaagaggactctagggtgcttattgaacgagccacaagagccgaagctgaggtcgaaacgctcagagaatccctcagcaaagtagaggttgaaaaggagtccagccttcttcagtatcagcaatgtctgcaaaacatagctgatttggaggatcgcatttctctagcccagaaggaggctggagaagtagatgagcgagccaacagagccgaagctgaaactctagcactgaagcaaagccttgttagttccgaaactgacaaggaagctgctcttgttcaatatcaacaatgcttgaaaaccatatctaacctggaagagaggttgcacaaggctgaggaagattcaaggttaaccaatcagcgggcagaaaatgctgagggtgaagttgaaagcttgaagcaaaaggtttccaaattaattgaagagaatgaagcttacgaactccaataccaacaatgtctggacacaattgcagatttaaagctcaagctgtttcatgctcaagaagaaactcaaaggctcagccgtgaaatagaggatggagttgctaagttaaaatttgcagaggaaaaatgtgttgtgcttgagagatcaaatcaaaatcttcactctgaactggatggtctactagagaaactggggaatcaaagtcatgagctcacggagaaacagaaagagttgggaagattgtggacttgtgtacaagaagaaaacttgcgttttatggaagctgagactgcctttcaaaccctacaacagttacactctcagtctcaggaggaactaagcactttggcattggaactgcaaaacaggtctcaaatcctgaaagatatggaagcccgtaacaatggtttacaggaggaagttcaggaagccaaagaccagagcaaaagcctcaatgagctcaatctctcctcggctgcatcaattaaaagtttgcaggaggaggtctcaaaattacgagagacaatacagaaacttgaggcagaagttgaactaagagtggaccaaagaaatgctttgcagcaagaaatatactgtcttaaagaggaattaagtcagatagggaagaaacaccagtccatggtagaacaggtggaattggttggtttacatccagaaagctttgggtcttctgtcaaggagttacaggaggagaactcaaagctaaaggaaatccgggaaagagaaagtattgaaaagacggccctgattgagaagttagaaatgatggaaaagcttgttcagaaaaaccttcttctggagaactccatatcagatttgaatgctgagctggaaacaatcagaggaaagctgaaaacattggaggaagcttctatgtcacttgctgaagagaaatcaggccttcattctgagaaggacatgttgatttcccgtctgcagagtgctacagaaaacagcaagaaactctctgaggaaaacatggtactggagaattctctttttaatgccaatgtagaacttgaagaactcaagtcgaaattgaaaagcctagaagaatcatgccacctgctgaatgatgacaagaccactttaactagtgaaagagaaagcctactctctcatattgatacaatgagaaaaagaattgaagatctggagaaagaacatgcagaattaaaagtgaaagttttggaattagcgactgagagggagtcttctcttcagaaaattgaagagttgggagtgtctttaaatgccaaggactgtgagtatgctagttttgtgcaattttcagagagtcggatgaatggcatggaatcaacgatccatcaccttcaagatgaaaatcaatgccgggtgagagaatatcaagtggaactggatcgagctcatgatgctcacattgagattattgttctgcagaaatgtttgcaggactggcttgagaagagttcctctttgattgctgagaatcaggatattaaagaggcttctaaactgttagagaagctagtttctgaactagaagaggaaaatattgggaaacaagtgcagattgactcctcgattaactgcattaaaatactgagaacagggatctaccaggtattgatgaagcttgaaataattccaggtataggttccggtgatgagaactcgcgagaccagagaaatatgcatgatatattgaatagacttgaagacatgcaaactatgcttttgagcattcgggatgaaaaccagcactctgccatagagaacctcgtccttattgaatttcttcggcaacttaaatcagaagctgtaggtattgaaacagagaagaaaatccttgaggaagaacttgaatctcagtgtcagcagctctcgttttcgcgggatgagacccagaaacttatcttcgtgaacggagaattgaccacaaaagttaatcaaggagtcaacagagaaaaggttttgatggtggaaattgaggattttcacaggcaggtgttgcagttacgagatgactacaccattctacagggagataataacaaaacgttggatgagaaagcatacttgacaaagtcaacattgcagttggaggaggagaaatgtaaactagaagatgatatctctttgcttctgtcggagactatatatcaaagcaatctcatcattctgttggaggatgtcatcttggaaaagctttcaggagcaatgaaactaaacgaggatctagacagactcagtattgtcaagtgtaagcttgaggaagaggtaagagagcttggtgataagttaaaatctgcagacattgcgaactttcagcttcaagttgtgctagagaaatcgaatgccgaactactctctgccagatcagccaatgttcatttggaacatgaaatagctaatgtgaaggttcagaaggagaaagagcttttagaagcaatgctgatgatctccatcatgcaaaatgaaaaatctgaattatctaaggcagtggagggtttagaatgtagatacaaggaagctaaagcgatagaagaggatagggataagcaggtcttgagactccgtggagattacgatgagcaggttaagaagaatagtcattcgaacgaagctaatctgaaattggaagctgacttgatgaacttactcatggaactcgaagaaatcaaagtggagaaggaaaatctgaaccaggagctttttacagaaaggaatgagattgaactatgggagtctcagtctgcaacattgtttggagagttgcagatttcggctgttcatgaaacattgcttgaagggttgaccaatgagctggtcgaagcatgtaagaaccttgaaagcagaagcacgttaaaagacagggagattgagcagcttaaaggaagagtgaacaacttagaagatgcgaacaaaggacaaaacgatcttatgtgcaaatacgcccaagctattttcctgttgaaggaaagcatacaatctctggaaaaacatgcaatgcttcacgaattcgagaatggaccagccacagtaagttattttagaaaaatctgctcctaataatcaaattctttttagtaggtcgtaatgaagttgtagagagctttacccttgatctgacattttcccgttgaaccaatgttgcatctgttgcttgttaatttcaagtttttcttgttgtagactaaccaatcttttgtgggtatctcttatcaggaaactgcttcattggtggataacagcgatggcttcttagagatacaagaattgcatttgagaattaaagctattgaggaggcaataaccaaaaagcttgcaatggaagaactaaaaacttcctctgcccgaagaagcagaaggagaaatggaagcctccggaaacagaaccatgaaatctactccgaggaaaccgagatgatcacaaaagatatcgtactcgatcaggtttctgattgctcatcatatgggataagtacgagagacattttgaagatagaagatgatcacagtttagaggcaaagtcacaaaatcctccgaaaggtaaatccttgtctgaagagtcattggttgtggacaaactagagatctccgatagattcacggatccaaacaaagatgcaaacaagaggaaagttctcgagagacttaattcagatttacagaagctctcaaatcttcatgtcgccgttgaagatttgaaaatcaaagtggagacagaggagaaagacgagaaaggaaaagaaaacgagtacgagacgatcaagggacagatcaacgaagctgaagaagcattagagaaactgttaagcatcaacaggaaactggtgacgaaagttcaaaatggatttgaaagatcagatggaagcaaatcatcaatggatcttgatgagaatgagagtagcagaaggaggaggatatcagaacaggcgagaagaggatcagagaagattggtaggttacagttggagatacagagattacagtttctgttactgaaactggaaggagatagagaggatcgagcaaaagcaaagatatcggatagcaaaacgaggattcttcttcgggattatatctatagcggagtgagaggtgagcgacgaaagaggattaaaaagcggtttgcgttttgtgggtgcgtgcaaccgcctccatctccttgatagttagaactgttgttgcaagtaagctaaataatgttcatgtgaatggaaacgtattgaagtttgatatgaaagagaaacacttttgctaatatctgttttttgcttttccgtagggtttaaaagaaatttgtatattgctaatagtttaaattccaaatttgttctacgtttgcgtttcaattttcaaagcagacgtagctgtggtgtgtttaaacaacaaaatctaccgtctccaagccgcaaatttcaatactattcgattactttaaaagatacactgccaggttatgttttgtacatgagaatactacagagaaaataagtttcgttaacaaacaatattagagatttacacattttaaaaacatgataataacactgatcgagacttaaaaaaggagtaaagaagcttcactcggcagctctgaaaatggtaaggagagccaagaagaggttgataatatctaagtagagcgaaactgctgcccaaatatactcatcgtagctgtaacgtttgatgagattgtctgtatcgtaaactatgtacccgcagaatattatcgcagccaaacatccatagatcatcactgagatccgtcccaacgggaagaaaatctgcaaaaaaacaaatagaacccaaagcaccacgatcaggctcagttttaaacctgaatttcgaatgttaaaccaaaacaagcaattgtaagggacaggaacctgaataagggcaaagaccatgagaacgatgagagcaccaaacaagaatggaccgaggaagttaaagtcatatcctttctttgctgcccaaaaggtgtagacggttaaggaaagcaccactactgttgtcaaaatcgctgcctcaagaatcactttccctgttccaacaacaaagttccaaactctaatgaataaatttatactcccaaaactctatggttcgtttatcgaatttggattaaaacaatccaatgtttctatgcaaccatggaacatcaatcttcaatgaaccagttgtattgagtatgaggaaattcaaacccagctcaaatgtgttggaggtctcacagactaattttatattatatcttaagcgtgtgatttcaagcaattaataagaccgacccttgaaaggacagaaacgaataaagagaactagagtgtttcacaaggaaagccttaccgctggtgaaagcacatgttaatccgacggcgaaagccaaagctaccgtgaaaatccctagaagcaaataattcactggatgtttctggtggtaatagtacaaaggacacattactgcaacagcaaaacaataacaaattaaaccaaaaacctaaatcaaataatcatcgaattaatgattgataatttggttacctataagaggcgtgatgattaagacaatccagagagcgagaccggcactagtagtggcgaagaacacggcgatcggacggacaaaaaccaccgtggaggcgacggcgatggttgctaaaagctggaatgcgattatggaatatacctttctgatgaaaccccatcggagttcggggctctcaagcatagtcggatacagagatctctcaccgccttcacggccggtctccacgtcatcttttcggtaaggaagattccacttatacattctaaaaactgtaaatcgaagcaatggattctgatcagacgaatggggaaaaaaacgcgggaaaattctattcctaggttgtactacgaaccagagaaggagacgatcgagaattaacaagtaccggaatttgtttcgccggaggagaagttattttgtttgtttcgttacgattttcccgagaaaatgcgagaaatttgagatttgaaggttgagagaaaattaggatttttcaagttataaaagcagttgcggagagagtaaagtagaacgttcttgaaggcaccacgtggccgcgtgtgaagatgaaacgttaagtttgttgttaaccgtaaagaccggaagtctctagatgactccaaaggtttcaagtattctcttataagaatataccaaagcttccactacattattattttttaacgaaggacataaactatagcatcataaattcataatgtaagcagaatcgttatatcctccgcatcctccgccatgttcatcacaacccccaccgtgatgatcacgaaagcaacagtctttatctatttccatgtgtcatcgccggtagtgactgttcgagtttaattattctccgtcacgagacaacgataacagatgctacaacaaaatacagtaccaacgataacaaccaaactaacggttgcttacacgtacgacgacaataatataaacttccatcattgcttttatgttgttgtggaatttgttgcgacaacttttcccctaaatattctaagttctgagcatacaaatttagctcctctatccgtatttatactttttttctcctttcatttttttttttgttacttatggattaactgttagcgtaataatgtgtggtttgaggtgtttgaaattaaatatcttaacatatagtatgtaacaaaaatttaatatatgttagcattttacattagtgtgacacatgtttgaaattatcaaacaatttttaagataataagaaataatatatgtgatatattgtattagcagtataaaagaaatataataacttaaatgaaatatgcataactactaacaaagtaacatatatatatttctttatttatgataattattaaatagtaataatgtttgaggtgtgataataaattatcttaatatatacaaaaccatatgtttgaggtgttgatgacatttctagttaatcaaaatttgtgttactgtctcgtcgtcatatataaggtttatgtgggcctcatttgtaaaagaattacttaaaagtgggctttcacaaaaacataggacatgtttttagacttttaacctttaaaggtccattggaatttttttgttggcaactcctatattagaacttagtcctaaatgattatagtcgtcacatacaaatattggtgtttagatatgacatgaatcagacaaatgaaatactataataattgttggaaaattgttttagaagcagaattcggaccaagttctatctttaatttttttctgaaaatatatcgtctctttatcatcagatgttctacttttggttgatgactatttaccaccagtactataaggtttattgtttgtttaacatacgcgacctctgcattttgatagatagataaatatatgttagaattttctcacaatgacatagttatatttttaagaaattcatatataaattaaatatgaatttaaatatgtttcgtattattattaaaaagacataaaagttttggtccaaaaagtgtttaaattttgcaaagaggggatcacgtttcgcaatcgttcagcaaacctatacgaacacgtggcattctcgtcccgtgggctctacttgcgattgtagacgtgaacctagaaactacattggcccttgtttttcttaataattataatttaggtctcgtttgtttcaaaaccttcatccagatccatattgccgttaatttttctaatttctgttgatattgtgctcactagataataacttttcacaaatatggtttacaaattctttttatgttgtgttggctctcgtattacaaaaagaacctaaactgtatgctaaataaatttatttattattttggcatgaggtaaatatatatactatgtataggcttaaaagtaaaaactaagaaaggtaaaaattaactttaattttaagtatgagttaagtctattgtaaaaattcaaaagtagcaatgtttttttttccctatccatatggaatttattttattaaaaatataataaaacaaaataatatcctaatgtgtatctctaaaacatccttatttgaccatttgtatataaactaactcaaacaattatataaaatgatagagaagatagagtcaacctttgttactttcacgaacgaaatgtcaaaggtattcaagtgtccctagttgataattttatatgcgccattgttttggtctacaaaatttagctgtggggtttgcgatgcaagactaatttgggggtcaaaatggtaatgaaatattgtagtggttataaaatagtataaaacaaaatttcaagggctaataaagtaataaaattggaaataatttacgaaggagaaacaaacagtatcgtgttttagagagagaaagtgagacgacttgagcgagaaacaaggcgcggagagagacgacgccgtcaacaacaccagaacagaaaaaaaaaacaaagaaagaaggaagaaaaaagagagagaaggagatttgatttaatttaaattttctttaaggaaaaaaaaaacaaaaacaaaatcgcgtttttccgctaagctctttttcttccctttttgtcaaaatttgggtttttgctcattctcgtggaaggaaaaaaggggattttttcaagtgtttaggggttcacaaattgaaaattttggatcttagatctttcttcttgctacgaaaccctaattcgtcacattgtatcagctcaatttgatcttaaaaaaaaaagactatttttttcctttttgggtctccttcttctttctttctttaatttgaattcctcaatttaaggattgtgtgttttgtttccttcttgtgaacgaatgagagttttgggttgatcgcatttttagggttgattttatttatctgatcgacgactcggatctgaggtgggtcgtgtttggagaccgagtcagggtctggtctggtctggtgaggtcgtcgtcttcatcggatgaaagtttctgggatcgaaaagcacaacgatgaaatgggcaacattgcttaaggacatcaaggagaaggttggattagctcaatcctctgactccgacccctttcccgttgacctaactgctccgccctcttcttcttcttcttcctcttctccttcttttacttacccctcctcttcttctcttcatcacttcaacttctctccttcaaggtaatttcttcttcttttctcttctgcttttgcttcatcttgttccgatgttgcgcatcgttgctgctagttatagctttgcttttttatgtttgtttggggaccagagtttagattgctttattagtgatcgacaccaaccaagtttcttttagattgctttattgcaacatttgtggtgctacgttttttgtgataagattgataaatgagagtcaaaggctgctgctaactcaattgaaacaaaaatatagtctttgaagctgcaacacttttcaattggattctctaattttgttgactgatcgctcttgttgttgttgtaaaactattgttgatcctctctttactcctctccaaagcagagataaccatgagttggagctggacttcaagagattatgggaagagtttcgttcatctagttctgaaaaggtacttactttgataatccatactcttgcacatgcgttagtgaacgccttacctttattcttggaacaatatctcttcttgtattttctacactggatgggcttacaaaaggctagaaatttattagtgctaatcgttcatatgtcatgcaggagaaggaggccgccttgaatttgaccgtcgatatattttgtagattagtgaagcggcacgctaatgtagatcagttagttactatgtaagctattcctaactcgttttccctttttggttggatatacattgaattggcgtttgttgtcacatgatttggatttttatggtggaaaatgcgtttctcaacctgtatgttctcccctgtctagctagtcttcttccatacctcatattttatccttgtaggtcagacatggtataatcaccaatttgagaaatttattttaatcgcaggttagtagaaacacatatattctcctttgtcattgggagagcatttgtgacagatattgaaaagttgaagatcggcagcaagacaaggtcactgaatgtagagaaagtattaaggttcttttcagatgtcaccaaggtttgccttttctttctgaatgtgcatcttgacatgtcaccctctcttctctatttttaatccatggtttcttcctacaggagggatttagtcctggtgcaaacctcttaactgctgttgaagtacttgtatctggggtacattttcgactttttcctgtgtctttcatcttactcactccataaaatcttgcaaagctcaatttcttatcgtccaggatccttactctttgatggttttatgccttatattgtgttgcctcttatgtgttcttttcagcctatcgacaaacaatcactactggattctgggatattctgttgtctaatacacgttctcattgcacttctagcatatgatgaactaagcaaaagtaaaataactggtgacttagaagttgtatcagcggaaaaagatgctggatacatagttctccagactagacgacttgaggttctgtttcaattgttttttttccaaatcataatacgattagatatgttattcgacattgttttgagctacatatgacaaccaagtttatattacacaaatgctttatcagcttaataaataataaatactttgtgccccttcattcgtgtaggtggagggtagtgttgttcatatcatgaaagcattagcaagcaatccttctgctgctcagagtttgattgaagatgactctcttgagtcgcttttcaatatggttgccaatggctccattacagttttttctcagtataaagaaggtctagttcccctccataacatacaacttcacagacatgcaatgcaggtaatttttgcgcatctattttagagcatcatgctatgaaatggaaaaattccgtgaacggctttctagatggacaaattaaaactggattgaataatctgatgcttatactttcatttggcaccctttcgtgtctcttccagatccttggacttctactagtcaatgacaatgggagcacagcaagatacatacgcaagcaccatctggtacgccagtgaattatgcagactgcctgagtgtagtatattgagtctcatgcatacttttaagctgaccgtgggtatagtttattctttttgctaatgttgaaactatgtgagatttccgtgataaagaacgtggttatcaggaaacttatgttgatttcaggatagaagcaaattataattaaatgttgtatgcttatgttttagtttcatcagaagcatagtgttgcaaaatgataattgcaacaagtcattgaaaaatatattctaaatttttgagttctcgtgcagataaaggtgctcttgatggctgtcaaagaatttgatccaagttgtggtgactcagcctacactatgggcattgtggacttgttacttgaatgtgtagaactatcgtacagacctggtaaatgtagtctacatagctctaaatatgttatgtccgtatgaaagaatgctgcgtgagagtagaacattcagtagtcacattatatatgtggacatgtaagctaaagctgttctgattatggctactaatctttttcatatttgactttgtagaggctggtggtgttaggctccgggaggacatacgtaatgcacacggttaccactttcttgttcagtttgccctggttctatcttccttgccaaaaaatccgatttttgtgtccagtaatcatgatagtggttccgatgaccctgaagtgtttcatgatggagaaaatacaaacagtacggaaaatgctgatttttcatcacaaaactttgctccatcgttgtcaagattgcttgatgtcctcgtcaccctggctcagactggtccagctgagccatctgtagggagggcctcacggtcatcccaaacgaagccaactgggcatagcagaagtcgaacttcatctgttgacagtatatacgatgagacatgggaacagggaagtggtaaagttaaagacctggaagctgttcaaatgctgcaagatatcttcctgaaggcagagaataaggatcttcaggcagaagtattaaatagaatgttcaagatattctcgagccacgtggaaaactatagattatgtcaggaattaagaaccgttccattgcttgtcctcaatatggctggttttccttcctcgctgcaagatataattctcaaaattcttgaatatgctgtcacagttgtgaattgtgttccagagcaagaattgttgtcactttgttgcttattgcaacagccaattacatctcagttgaagcacaccatactttctttctttgtgaagctcatatcttttgatcaacaatataagaaagtcctacgtgaagttggtgttttggaagtcttacaggatgatttgaagcagcacaagcttcttattggtccagatcagtatagtggagtctctagtcattcagatcggaagcctagctcaggtagcttcagaaagaacttagatactaaagatgccatcatctcatcaccaaagttgatggaatctgggtcaggaaagttacctgtttttgaagttgacaacactattactgttggttgggattgtttgatctctttgttaaagaaagctgaggctaatcagtcatcttttcgtgcggccaatggggtggcgattattcttcctttcttgatatctgatgcccatcgaagtggcgttttgaggatcttatcatgtctaatcacagaagacactaaacaggtagcttctttttcttggatcaactacgccactgtcaattttattgcaaatttgatgtgttcgattacattgatgccatcataggtatttatttttcataattggcaaacatccctaatttactttttctttcaattactgtccaactaggtccatcatgacgaattaggagctgttgtcgatttgttaaagagtggaatggtcactggtatttctggccatcaatacaagcttcatgatgatgcgaaatgtgatacaatgggtgctctatggcgtattgttggtgttaatggctctgcccaaagagtctttggcgaagccactggtttctctcttttattgacgacccttcatacttttcaagggaaaagagagcacatggatgagtctgacttgacggtttacatcaaattgtttaaatatctgtttcgccttatgacagctgcagtctgtgagaatgctgttaataggatgaaactccacgctgttataacgtctcagacattttttgagcttttggcggagtctggattgctgtgtgttgagttggaaaggcaggttatacagctgttgttagaacttgcacttgaagtggtggttcccccgtttttaacatcagagtcaacggcccttgctactataccagaaaatgaaaacacaacttttgttgtaacaaccccatcgggccagttcaatcctgacaaggagagaatttacaatgcaggtgcggtcagagttctgatccgttctttgttgctttttagtccaaaaatgcagctagaatttttgagacttctggaaagtcttgcacgtgccagtccattcaatcaggaaaacctcacatcgattggtaagaaccagtccattcttcaatcaattttatgatccctatcgcttttggtctttccgttttatctctcaacttatctctttctcgtcatgaattgtaattgaacaggttgcgtggaactcttgttggagatcatttacccctttcttgcgggttcatctccatttctttcttatgctttgaagattgtggaaattcttggagcgtacaggtaaagaatgccctgcattattattaaaaaatttaaatatatttccaacgttactgctttcactttactatctgttttcttagtaaatagtttttttgtgtgtgtgtagattgtccccatctgagctccgaatgctgtttagatatgttttgcaaatgaggattatgaattcaggtcatgcaatagttggcatgatggaaaaactaattctcatggaagacacagccttggaacatctatctctggctccttttgtagaattggatatgagcaaaactgggcatgcttctgttcaggtgtccctgggagaaagatcttggccgcctgcggctggttattcatttgtttgttggttccagtttcgtaattttttgacaacccaaggaaaagaatcagaagcctctaaagctggcggttcatcaaagacgcgcatgacaagtgcccaacaacacgagcagaacattttccggatgttttctgttggtgctgtaagcaatgaaagtccattctatgcagaactttactttcaggaggatggtattctgacccttgccactagcaattcacattctttgtcgttttctggattggagattgaggagggcaggtggcatcaccttgctgttgttcatagtaaaccgaatgctcttgctggactcttccaagctagtgttgcatatgtctatcttgatggaaaactaaggcacacgggtaaattggggtactctccttcgcctgttggaaaatctttgcaggtaacagttggaactccggctacttgtgccagagttagtgatctgacatggaaaacacgctcatgttatctttttgaggaggtgctcacatcaggttgcattggtttcatgtacattcttggtagggggtacaaaggtcttttccaggatgcagacctcttacgctttgtgcctaatcaggcttgtggtgggggcagcatggctatcctggactcattagacactgacatgacttcatcgtcgaatggacaaaagtttgatggaagcaatagacaaggtgactccaaggcagatggcagtggaattgtctgggatcttgagaggttgggaaatcttgcctttcagttacctggcaagaaactgatatttgcatttgatggaacatgctcggagttcatccgtgcgtctggaaatttttcactcctcaatctggttgacccattgtctgctgctgcttctccaattggaggtatatagtagtcttaaaaactcttcttcattttgtacatattcatctgaatcgatttcataatttgattcattcttctttttcaaatggttcaggaataccacgttttgggcgtctggtaggaaatgtatctatctgcagacaaagtgtgattggtgatactatccgacctgtgggaggaatgactgttgtacttgcgcttgttgaggctgccgaatctagaaatatgctacatatggctctttcattgcttgcatgtgcgcttcatcaaaaccctcaaaatgtgaaggatatgcaaaccataaggggatatcatttactagctctgtttttgcgtcccaaaatgaccctgtttgacatgcagtctttggagatattttttcaaattgcagcatgcgaagctttgttttcagagccaaaaaagttggagagtgtacagagtaatattactatgccacctacagagactatattcgaaaacagttacgaggatcttagtctttcgaggttccggtacgatagttcctcagttgggtctcatggggatatggatgacttttctgttcccaaggattcatttagccatctctctgagctagaaacagatatccctgttgaaacttcaaactgcattgtcttatccaacgccgatatggttgaacatgtccttctggactggaccctttgggtaacatcccctgtttccatccagattgctttacttggtttcctggaaaatttggtttcaatgcattggtacaggaatcacaatcttacaattctgcgcagaatcaatctggtagaacatttgttagtgacacttcagagaggtgatgtggaagttccggtcctagaaaaattagttgttctgctaggatgcatcttagaagacggattcctgacttctgagcttgaaaatgtcgttaggtttgtgattatgacatttaacccacctgaagtgaagtcacgaagctcattgttgcgcgaatcaatgggaaagcatgtaattgtgagaaatatgcttttggaaatgctcattgatcttcaggtaaccattaaagcagaggaccttctggagctgtggcataagatagtctcgtcaaaattgataacatacttcctcgatgaagctgtgcatcctactagtatgaggtggatcatgacccttcttggtgtctgtcttgcttcctctccgaacttttcccttaaatttcgaacaagtggaggttatcaggggctgctgcgggtacttcaaaacttttatgattccccagacatatattacatactgttctgcttgatctttgggaaacctgtttatccaagactaccggaagttcgaatgttagactttcatgctctagtgccaaatgatggaagctatgtggagttaaagttcatagaactgttggattcagtggtggcaatggctaaatctacttatgacaggttgatcatgcaatcaatgctagcccaccagtctggaaatctttctcaggtgagtgctagtcttgtggcagagcttatagagggggcagaaatgactggggagcttcagggggaagctttgatgcacaaaacatatgcggcacgcttgatgggtggcgaagcgtcagctcctgctgctgcaacgtctgttctccgtttcatggttgaccttgcaaagatgtgccctcaattttctactgcttgcagacgtgcagaatttgttgaaaattgtgctgatctttacttctcctgtgtcaggttggcattacagacctactgatatatgtttccaccgcctagtaaatattgacgatatttttaggtttttgaaaataaataaatttttctgcatagattttatctttcgttggacagactatgtgaacagtattttgttttagttatcatatcttgttcaatgtctgagggtcttagataagaccaggatattttcatgatgttggatttagtgtgaccctgcaagatgtttatttgcataacttgcgcctaaaggctattttgtgctgtagggctgcttatgctgtgaagatggcgaaacagctctctgtgaaggcggaagagaagcatataaatgatgctgacgatagcggctcacaaggaagcttgcctcatgatcaggatcagtccactaaaacctccatcagtgttggaagcttccctcaagggcaggtcagtcttggttccgaagacatgtctttacctgcaaattatgtggttaatgataagatggagaacattcttccaccaccaacacaggacacaagtaaatcattacaaggtgttgaagatgttaagaaacaagacgatcatcatgttggcccttcagcttccagtgaaagggactttcaagattttacaggtaatccagttcaagttcaggcaacagattctcagagctctgcatctttccctatgatcgagtctccccttttatctgaaaaatcaagtctcaaagtctcattcactccatcaccatctccggttgttgcacttgcatcctggctaggctccaactataacgaatctaaaagttctaccttgggttctccttcccttgaatcttatgtgtctgttaatgaagttgatgcatcttcagagcgaaagtcaggctcccaaggatcttcggctgccaatgcattcttcacagttagcccaaaacttctccttgaaacagatgaaactgggtatggtggcgggccttgttctgctggagcgagtgctgtattagattttatggcagaggcacttgctgacttagtgactgaacagattaaagcagtaccggttctggaaagcatattggaaatggttcctttctatgttgatcctgaaagtgtgctggtctttcaaggcttatgccttagcagggtcatgaactatcttgaaaggcgtctcttgcgtgatgatgaagaggacgagaaaaaactggacaaggccaaatggtctgtgaatttggatgcattttgctggatgatagtggatcgtgtttatatgggtgcattttctcaacccgctggtgttcttagggctctagagttcttgttatcgatgctccaattagctaacaaagatggtagggttgaagaagtcactccttcagggaaaggtcttttatcccttggaagagcaacacgacaacttgatgcttatgtgcactcaatcttgaaaaacacaaatagaatggtattatattgtttcctgccctcgtttttgataactatcggagaggaggatctactatcccaactgggtttgcttgttgaatctaagaagaggccatctccgaatccagctactgatgaatctgggattgacatctcaacagttttgcaattgttggtcgcaaacaggagaatcatattctgcccaagcaaccttgatactgatttgaattgctgtttgtgtgtgaatttaatctcccttctccttgaccaaagaaagagtgtgcaaaacatgtcacttgatattgtcaaatatttgctggtacaccgaagatctgcacttgaggatttgctcgtcactaaaccaaaccaaggacaaaactttgatgttctacatgggggttttgataagttgttgactggaaatctaccagaattctttaagtggcttgaaagctctgataagattattaacaaagtactggagcaatgtgctgcaattatgtgggtacagtacatagctggctcagcaaaatttcccggtgttaggataaaaggcatggaaggtcgtcggaagagagagatggggagaaaatcacgagatatgtcaaagttagacctaaaacattgggatcagttgaatgaacgaagatatgcgctagaagtattgcgtgatgccatgtctactgagcttagagtagttcggcaaaacaaatatggttggatacttcatgctgagagtgagtggcaaactcatctccagcagcttgtacatgagcgtgggatattcccaatgcgaaaatccaaagggactgaagatcctgaatggcagctctgtccgattgaaggtccatacagaatgcgcaaaaagcttgaacgatgtaagctaaaaattgatagcatccagaatgttcttgatggaaagttggaacttggagaaattgagcttcccaaagtcaaaaatgaagatggaccagttatttctgacacagattccgagccacctttcctactcagtgaactctatgatgagtcgtttttgaaagagtctgatgattttaaagatgtcgcttccgccagaaatggatggaatgatgatagagctagcagtacaaacgaagcaagtcttcattctgctcttgattttggtggaaaatctagtatagcttctgtgcccataacagacaccacacatgtgaaatctgagactggctctccaagacattcatcctctgctaaaatggatgaaactaatggccgggaggaaaaatcagagaaggaactgaatgatgatggtgaatatttgattagaccttatcttgagcatcttgaaaagattcggttcagatacaactgtgagagagttgttgatctcgacaagcatgatggaatcttcttaataggggaattctgtctgtatgtgatagaaaacttttacattgacgaagatgggtgtatttgtgagaaggaatgcgaagatgagttatccgttattgatcaagcgttgggtgtgaaaaaagatgtctctggaagctcggatttccattccaagtctagcacatcatggactacaacagtgaaaacaggagcagtagggggaagagcatgggcatatggtggtggtgcttggggaaaagaaaaaatgtgcatgactggtaacttgccgcatccttggcgtatgtggaagcttaataatgttcatgaaattttgaaacgtgattaccagctgcgtccggttgctattgagatatttagcatggatgggtgtaatgatctccttgtgttccacaagaaagagagggaagaagttttcaaaaatctggttgccatgaatcttccaaggaacagcatgtacggtaccatcgttcttttcatcttgtttctttttatcctctctactggattgaacacaatgcgtttgtttctttttttacattttattgctgtttatttttctctagtaaaatgaataaatctgtcaatctattcacatagttagcatgggtgggtctcttttttaaagcttagtttgagtagtgtttaaggtttctattctctattagtttgtttactagcatccttgaatggtgtttctatttctttgccgtagtactcatgtggattattatagatgagattttctgtcttcattgatctgcgaaagtgtaatttattcttttttattgttttcctaggctcgacacaaccatttcaggatcagctaaacaggaaagtaacgagggaggccggcttttcaaattaatggcgaagtctttctcgaaaagatggcaaaatggagaaatcagcaatttccaatacctaatgcatctcaataccttagcaggacgtggatacagtgatctcacacagtatcctgtatttccgtgggttctagcagattatgatagcgagagtcttgatttttcagatccaaaaacattccgcaagcttcacaaaccaatgggttgccagacacctgaaggagaagaagaatttagaaaacggtttgtgatgtgcatttaaactttgtatagtgaatgtgtccctcgtgttcattgtcatacatcaatttttttcttgttaattcgctatggtttcatgatatcatagttgtatctaatttttgcttttcctgctcgatttcagatatgagagctgggatgaccccgaggttccaaaatttcattatggttctcactattcaagtgctggaattgttctgttttaccttattcgcctcccaccattcagttctgaaaatcagaagctccagggcggtcagtttgatcatgctgatagactcttcaatagtattaaagatacttggctaagtgcagcaggaaagggaaatacttcagacgtgaaagaactaattcctgaattcttctacatgcccgagtttttggaaaatagattcagccttgatctgggtgaaaaacagtcaggagagaaggtttgtgccagttcaaagtcattcagtggtgtttaaatttacaactttcctctcatgttgacatgatacacatatatttgctgcataatttcaggttggtgatgtctttttacctccttgggctagaggtagtgttcgtgagttcatcctcaaacacagagaagcgttggagtcagactatgtctcagagaatttgcatcattggatagatctcatatttgggtacaaacagagaggaaaggtacattacacaatattttccctttgctgctagtcaagtagaatgcagaaatcaaagtattgttatgttatttacttttccttttccttttatgaaatgtttattctcaggctgcagaagaagctgtgaatgttttctatcattacacatacgaaggaaatgttgatattgatgcagttaccgaccccgcaatgaaagcttctatactagcgcagattaatcattttgggcaaactcctaaacaactattcccgaaagctcatgtcaaaagaagaacagacagaaaaattcctctccaccctctgaaacactcgatgcatctagttcctcacgaaatacgtaaatgctcatcttctataagccagatcattactttccacgacaaggtactcgttgctggagccaactgtttcctgaaacctagaggctataccaaatacataacatggggattcccagacaggagcttgagatttatgagctatgatcaggacaaactgctatcaacccatgaaaatctccatgaaagcaaccagattcagtgtgctggtgtaagtcacgatgggcgcattgtggtcactggagcagaggatggtttagtgtgcgtgtggagagtaagcaaggatggtccacgtggttcacggcgtttacggttagagaaagccctatgtgctcacacagctaaagtcacatgtctacgtgtaagccaaccgtacatgatgattgcaagtgggtcagacgactgtacagtcatcatatgggatctcagttcattgagttttgtgaggcagcttcctgacttcccagttcccatttcagcaatctacataaacgaccttactggggaaattgtaaccgctgctggaactgtccttgcggtttggagcatcaatggcgattgccttgctgtggctaacacatcgcagttaccatctgattcggtattatcagtaacaggctcaacatcttccgactggcttgagacaagctggtatgtaactggtcatcagagtggagcagttaaagtatggcggatgattcattgtactgatccggtgagtgccgagagcaaaacaagtagtagcaacagaacaggagggctgaatttgggtgatcaagtgccagaatacaagttgattctacacaaggtgttgaaattccacaagcaaccagtcaccgcgctccatctcacaagcgacctgaagcagttactaagcggtgattcagctggacagttactttcatggacagtaccagatgagacattaagagcttcaatgaaacaagcttcattaaaacaggcttcattaaaacaggcttcactgaaacaggcttcatcggtttagaatccaaagcagagaccagtaaatccccttttggtttctctgactagaatcgaaagagctggccagggaacttaaggacaggaccacgtaggaggaagcagaccaaagtctgaacatagtgttgtctccgaaagagagtatagcgagccactctcaactctgttttgttggtgagttttcaggtttgagaaggagaaggagaagaggtttggtttgagaatttgtgtaaatagatgaaaagattacaagctttttacagggaagtgtgtgtactgtgtacagtattgtatttttgcggcctctttttttgtattctttacgtaaaattatttcttcttgaaaacacattgaagaaatagcagaagctgggcatattagtatttacagagccccatctgaatctgtattttctcagatgcaattcttgcattatttttatagtttgtaacctttttgtattcttcatgttttgcttcaatgtcaatggtaatttttgttgttcttgagtgagaaagagagatggtttgttggaatctcatatatcaagtatatgatatatttagtagatcaacaagtaaacaaaagacaacataccacagagaagaaaagaaatacgacccgtaattatataattcaacgagattattttttgctgtcaaatgcttaaagaataattttttctaaatactacatcttaatttactagagtaatatgtgtttatcttgtattatatatgtgatatttatgtttcttcatataataatgattttatagctaattcaaattgatataaatgatattttaacttttgcagatttttaccggaaaaaataagattagataccattttaaacactttaaccattcagccttttgaaaagatctatgatcataaattgaaagagagagagagaacaatatcttccaaaagatagaaacatgagaattgtctaaattcttcattgttttctcgttttaactttcctagaaaggactgtctttaccggagaaaagggtctttttaataaaaagagaaagaaatatttttaataaaagatagagacaaaataaaatacaggcattcaaggccatatatatatatactttggagacgtcaattactggccttagaaaattaaaacagagaaacctgcaacaaaatttctgccaaaaactcttcttctacccaaaaaaaaaacaaaagatatgaacactaagctatcactttctcagaccaaaatcttcactttcacaacttggttcaacgatactcgaagtggcttagatagacgctcaagcatttccccgactctctgttcaaagcccgtctactccggaaaactcaaggctgcaaaagagacagcaagaatcgagacatcgaatacgaagaatgcgagtattgaggacagcttcttctcgaaaattgcaattaattatctatcaaagaatcttcaagacgcagctggttcgtagctctcatctattctttgatctttgcttgtttagtgcattaaaaagatttatacttattgagaaagaaatctgagaaatttctcatcagggattagtagtagcagtaagagtaccgattatgataggttagtggatacggcaactagggtttcgcgtaactttgacaccaagcaacaacatgagtttgttcttagctctttggacagagcattaccgacagtaataagctccttggtaagttcttatggattaatttagatcaagtagtcagcaaactatggacatatttaacatttctttctgaatttacagatcaaaatggcatttccaccttcaaaagtctcgagggagctcttcgctctattcacgacaatatctttcgcttggcttgttggaccttcagaggtaagagaccctagtagttttgtctttgtgagttgaaattatctcaaaattttcatggagaactttattgccaaggtgagggagactgaggttaatggaagaaaagagaagagtgttgtgtacatagagaagtgcaggttaagtgtaatctctctatttggtcccacctttgatcattaagcttcagacaaatatcaaacaatcattacattacaacaaccaccaaccggtaatttcactgttgagatttgtcacctatatcatgtacttgactgttgttcaatttgtaggtttcttgaacagtcaaattgtgttggcatgtgcactcatatttgtaaaattccatcccaaatcttcatcaaaaactcactgggaatgcctatctacatggagcccggtactacgctaaatctcattcgctttacttatactgtaaatcgcaatcactgaaactggaagatttgggctttaatagaacagttgatagtaaaacttaataatagtaatgaagaatatagtagcctgcacttctcaacttgtggaagcttaatgtgatctttaggggtcccattgattcaccactaaggacaccattaagtacaagtagacccacattaagtcttcaagctgaataatgatgtgtgatcattctttctaagaagtcaacgttttgacttaagacacaagcaatcattttcatttttctaatagagacaaatgtgacaacactaattagcatctgtattgagtttttgcagattttaatgatcttagctgtaaaatgatgtttggtcgggagcctccagagatcgaagatgatcctgctatgaaacaaccatgctttgaattctgtaagaatgaaacccttttgtgatcctctaatgtcaaatattcgacatcttcttaaacaagagatttgggaatcgttaccaatgaaaattctctgtttttgcaggcaaatcaaacaaaagctacggtgtgaagcattagaactagtactagagcgattagataaattgtgatatcaaaacatatttaagtttttcttttaaagtcataccagagattacaattacagaagcaaacctcacaaatgcctcaaatgaatatttgacccaagaacaaaaaaaagaaatttgcaaaaagattagtagatctattagaccaaactgtttggtagacaacaaaaaagctgtcacaactcaaggagagcttcttctatggggcacaatcaatattgaggtgtgtaagagtaaggttggttttggttttgccttagattcatatgtccttgtcttccgtctctagagtattgatcccacatcatctgttcttccatcaacatcctctgtttcttctccatatcattcatctgcacatatgctggcggcgcaacctccaatgacgctgcaaatggatccatgggaaccggactgttaatgtttccggcgtttccattagccgttgatggtgctggaagtgccagcatagttgctgtaatcaatagaatattcatgtcaaatcatcagaatgcaaactgaaacagagcaaaatttataactaaaaacagagcaaaaaattctaagaagtttaagaacagagcaaagtaatgtttgtttaaaacctgctggtcttcctgcagaaccaaatgccatactgctcgcgcttccgctggctccataagccgtcgatgttttcacggcagcgtttacagcgccgtgctgatacattccgttaagcaacaacatatcaaagcctcctccgagttctgacttttgtcctgacaagtttgtagctgtttgcaccaaagctgtttcccaatccgcagaatcatccttaaacgcttcccatcctggaccagactctgaaccagaaccgcttgcgtatggcccgtcaaataaagccaacgctaagctatctccagcttgtcctgcttcaccgccgtttgtattcccaagatcaagtaaatcacccatttcttcttgtttcttctctatgatcacttcttcctttgcttcttcctcaggttttacgtcatcttcttcttttggtggaggttcaggtaaggcctttattgcgttcatatcttcttgctcttcatttacttcctctgttctcgcttcatcatcatcttcatcggcttcagatttaacagattttgattgcttggtgtgttctaaagcagatttgtctcttataaactcatccatgagatcaagcttcttctgtgtgatcttctctatctctggatactcagaagaccgtgcgatccccatgttcttacaccaagagtagaactgatcgagctcttcgaattgtttcgagacccggcagaaaatgtcatagaccttgatcgaatcaggaatatctaactccatgaatcgttcaatcaaaatccccattatctctgttacatcgtaatatatctgaaaactctccttcactatcggatacagagccacaatcacaactctgttgttcctcgcattacctgttaacaaaataacattggtccttatataaatttttatccaagaaacaaacacacacagagaaagaaatcttgagacgcaagttattacctgttgggcgacaagccaagaaacggtcaagaagttgctgcaaatgttggattctgatgaaaatctgctctgttttcatctcggcgatcggttgtgacctgaccacgatagccgtggagagatctgccgcagcttgatcctgttcttcttcgtcagcttctcctccaacgcagtaaactccacgtttcccgtgtctcgcttgcatcctcaaaaattgcaatgaaaaaaaaaaaaaaaccgcatatcttagatatcattcaaattacataaataacttgaaatcccgaatcggaacctggatcaagcacaagaactcttacctgaaatcaagcctttcgtcaaggtacaatgcgtaagtcctgacaaacgcagagtagtcccaagaattagacctcgaaacatccctaaaatcagacatattgagaagccttgttccacggcgagtggcgaagaagatctcttgctcgtaggcttgatctccttctcctaagagcctttggatcaaaatcaaggttttgagggcaacggtccagcatttggttttattaaggcgtctcgaaagcgtgctaacgcaagcgttgatgtaactgcgtgagtaagaagttaggctaagaatctctctaatgtatttctcttctgctggaaactcttcgtgacgagtggctttgacgatggctacgtcaagttcagataaagaagcgcttcgaccattgactttggctagaccgacgctggtttggtcctttacggctcctatggctcgtttaaacttactcgaacccatttttattctgattagttagtaaatttgtattaaagacaaaaaaaagaaaagaaaatatgtaaaagaaaagatttgaagagagaaaagggaagaacgaggcttgtttttattttgtttttgtttttcctcgtcgtttccttttttctcctctgtttcttgtttagttttgttttgtttcttcttcttcttcttctatgtttttgtttgtttgtttcgtcaatgtagtttctttgttgttcgtcgattattcaccatctaaagtcgccgaggttattggaggctttgtccggtgagaaatatggccacgtggcaaaaaattaacttattgtttgacgggtcaactgaaatttagtttgcatttgccattaatgggtaaggagaagagtactgattaaagaggaaaaaactttcttctaatttgtaaaaaaaaatacaccaagcttttttcttatggattggaagcccaagattgaattatggaatccaacaaatcaaaatcgatccaagcccatttctgctgacatattttttactcgtattatattcagaaatgccacaattttgttttgtgaaaaatagaaaaacccttgtctctcaaaatggaaaacgagtcggacaacggttcagcactaaggagaagcaagttgtaataccatatggcaaaatgaaacgtgtcatttttatattggatattagaaactttactccatgagtgctaaatttcggaaaaaacgacaaagacagatttttttaaaaaaatcttattttctaccactaacgagatgacgacgaccccgacaatgcgtagaatttttcccatatcatttatatattttaaaaaaagaaagttatattggtttttaacattctactaaaaagagtttggtaaaagacctttttcttaatttgatatgaataaattgaagaaagtcaaaacaaaaagcccacttcaaaacaaataaagcccacttcaagtttctggaaggtatataagaacaagggcaaaaccgaaaataaaccacaaagtaaggtccttttaacaaaaataaaatgaaagagagcataaagtgagtctttttgtcatatcctttctcgtctgtgtctcttcgtcctcattagcttaagcatcatcattctctcacctaacaactccacacaagattcttcgcatggaaagttgttcttcgacttctcttctctaactcgctatcttttaactcacccagctccactgagtcgaaaatttcaaacctttactcgtttccttcatggctaataacaacaacatcccacatgatagcatctccgatccatctcctaccgacgatttcttcgagcagatcctcgggctttccaacttctccggttcttcaggttctggtctctctggaatcggcggcgtgggtccacctccgatgatgcttcagcttggttcaggcaacgaagggaatcataatcatatgggtgccattggaggaggtggacctgtagggtttcataatcagatgtttccgttgggattaagtctcgatcaagggaaaggacatggctttcttaaacctgatgaaactggtaaacgtttccaagacgatgttcttgataatcgatgttcctctatgaaacctgtaagtttctcttcagaatcttcactttgtctttttcttttgtgttctcgagaaaataaagtgaaattcaaatctttagggtttcaaaatggtgtcgtttttgagaaaacccagcttaggtctaaatttgatagttaccgagagtttttggctcagattggtgagatttgatgtttttgaagaaacccaagttgaagattttgatgtgttttaaagtcataacactaaaattagttttgcaagaaactttagtataaaagagtgttcttttatgtccaaattatattgtaagaaaatttgctctttagtttcttttctcatgtggataattccgtcatagtttgaattgttgctataactactctagtggcgaccgttcttgtgagaagcggtttttaagcttttcttaatgttattacggcattgttttgtgttttgttgaagattttccatgggcagccaatgtcacagccagctccaccaatgccgcatcaacagtctactattcggcctagagttagggctaggcgaggtcaagctaccgatccacatagcatcgctgagagggtaagatgtttgatacactttttttatcttctggtctcttttttcgatttttatgtgataatgtttgatcaaagctttaattatagcttttggttgagaaagttcgattagttcttacttactaagaacggtaagacctaacctgaatgtatttgctttgcaacagctccgaagggaaagaatagcagaacggatcaggtcgttgcaggaacttgtacctaccgttaacaaggttggtatctttttctctagagcttcagctactgttttcatgtcgcgaagagagcttgaaagagattttaaaagtagggagaaaactagagttgtcaatgagagaaaagttttgtgattggcatatagaaactgcggtattcacatctgtttcttttgctttccttttgcagacagatagggctgctatgatcgacgagattgtcgattatgtaaagtttctcaggctccaagttaaggtaaacacccaagtcattttcagttttctattctctggtttttgaaaatgctatcattaaaagtttgtagaaagattatttaaaacagccagaaggatttagtggtgtaaatccttggtccccaccaccacctactctcttaaaccaaacttccaatcttaataaaagattataattgtttaatctggcaataaagagtaatcaaagagtacatgattgtgtgttttttggcattagtgtctttcactttttgcttgcttccctcccatggagaatcatcacaattgaggactattgtaataaagctaatgagaacattgaagaatattttatgcaatgatgggctttgataatatttttccttcataagctttatctctggtcaactatggcaggtcctgagcatgagccgtcttggtggagccggtgctgtcgcaccactagtcactgaaatgccattatcttcatcagttgaggttagactagagagagatacttcattaaaaaaagaacagaactttggtaatggtttttcttgcactgacttgtggtgtaaaaactttcttcaggatgagacgcaggccgtgtgggagaaatggtcaaacgatgggacagagaggcaagtggctaagctgatggaagaaaacgttggagcagcgatgcaacttttgcaatcaaaggctctttgcataatgccgatctcattggcaatggcgatttaccattctcagccaccagacacatcttcttcaatcgtcaaaccagagatgaatcctccaccgtagatttttgttcatccaacggtccccagctgatgattgacattttgctctgtttcccactactagacttttgtgactcatgaaaggtaagtaaaaaggcattggagatggaatctaagtaggatttgtgcagtaaagaagtaaaacgggatctgtcaaaagaaggaaaaagctctcgcttgcttggctagtatttatcattttgatgaaagtaactcttttttgttcaaagactttagtgtgattttcaggaccaagggctttgagggtagtgctagctgtagtaatagtaatgaaggtgtgggatcgtgtttctgaattatgtaaaaaaggaagaaaaaacaaatgttggtattatattatggttttgcctctcttttttttcttgcactaatttggatagaccatttaactattcaaaatgatatagttgggagctggactgattataattaggtaatttcccgcgcattcaaacactttatgcattagaacttctaatttagaagtataaaacacattgtctgaacaaaatccgtgagtatgcagagaacactagcatacacagtttactgcgaacaaattgcttattggaagtttccgttgcaagaaaaagacattgtagaccaaaggcaatcttcccttgaagcgcaacattgtcttttgttattcatcttattctgtttcgtccaatagcccccttgaaagtagattcaaatgttcatagatctgatcagtagatcagcgtttgtctttgactttattatcagctctgcgttgggtcggtcattataatccacctgccatccaaatttgaaaaaaagaagcagctagctaccttgaacaaaccattgaaaccatgtaactgaatattaagtagagtagagccagagcttttacccgccatttagcaacatctgggggtttacctgtaattcacaaagggaaaacggattaaacaaaagcgagattctctgaggtcattgcgggttctcaagaatcgaaataagagaaattgtacacaccagttgagatatgccggttttcaacacgttgcattgctgtatcgagattcacatcgatgaaccttgaattgaagatggaaagacatcaattggtaaaaccgaactcaaataccacgagtgagtgagaaaaggaaaaaacacttttgattagtctttaccatttctcatcaaacatatctgagatgtctttccaagacccttcttctaacaagatgtagtttccttctacaattaccactttatgcctaagaagaggacataagttagctgactgtctccggaataggcaaacaaaaccatttcatattacactagattcggatttgacagatttaggaagctactgactacttactggaggctaacaaagatatcatcttcaactggatccccaactccatgatcaaatgatggcacataaactgagccctggaaagcttgaaaactaatcagagtctattgtaagtctcccaacttcaagatcctaaggtcaacaagattttgtaaccacctctttacctcgtttttcagcttctttaaacagttaagcagtagtgcaggatcaaaagtccacggagctgattagtggatagaagggtcaaaccaagtttgaacatttcgaaaaaatctttgaataagacaattataacagatctcaccccctcttctcgcatgggcttctttgggatcctagagtgacaaaacaaaatacagaattcctcttaaacaacaaagagaaagagacataataagagaaatataactcagcaaaatattatgagctcaacctccatagcatcgagttgcgaacgatacaaatggaaaccatccatgggaagtactatagcaacatccggtggattaacctcagcatcaaaagaagcagctttctgaggccatagcttatttacacgacgcacaacttcatttgctactgtacttttcccggcaccaggaggaccagccaaaccgaccaaacgtctacacgagtcaacacacaattcataggagttatctaaaaactcgggtgcagctaacagaacagaacaacatttaaagagtagcaaacttacttaagattggggctaaacattgccgctgctgtagggacaagacgttccgccaacttatcatagatctcatccatacaacttccaagaagcaaaaaaagaatgcatcaatactttggtagaagcaatgagaagagaagtgaacaaaaccacatatgagattttaccttccatcaacaacagtgacatctttcttctgactgcaagaaatctgcaagagtcgattaatttcaagttgaacacagaagagattaagcaaacagaagagagagtcaatatgaatttaaaattgtttgatttcgaaaacccaccaaataacgaggggtgttctttcgttttcgaatgctgaaatgaagaggaacaagagattggtcccataagtgaactttgaatcccctgaaacgagacaattctgcaatatgaatcgcgaaaaggggagattaattaatatctgtagcaagctcttaatcataatccgataaggaaaaacagagaattgtgaaacctggaacaaaggagcgtgagttacagtatctgggtacagtggagaaagaagaaacctccattgatgaacgcacagatcaataactgaaattatcactcaagaaatgaaaatttgaaatcacaacagttccgactcaaatgtccgatttaagcgaagcggtgctgtgttctctcgatcgaggaagaagagtttggcatcgccggataatgacgaaagacacgtgtcatgctccttcgctttaaaaggccgttgactaccgcttctaggcgttgaatttttcacctgcaatgagtccaaaaacttactagcggcccactgggccaggatctggccagctcgattgatttaactctctacatatataattcccgtgtgcatgtgtatacaataaattattgatgcaattgccaaatgctttacatgacgacactttactatcatatataatccatcacaattatagacgcgacaaaaggcaaaataggaactgactagtagaatcttctaacataatcagcacttctagttctatggatgtgcatcagatgttaacatcattcgccaaaccgctttgctagtataatgtttgaataataataatttaacagaatcaaatcatatatatgtgagaaaaatctaaaagtgaatttgttaatcgaaacaatatggcttatatatttctgcgagttgacatgaattgtttttttccccatacatgtgtttctacaaaactgcattgtttaagtaatttttgtcttccgatttttaatagtaatttacctgcaaaagacttactgatttatataaaaattgtgttacaaaatagaattgatgtattgattctatttatggattaagatagagcttcatcataaaactcattcacccacacaaaaacataattggctaattagatcaaaattcatgtgtgacctcgtgtaaataagcggcctttcgagttttgatggagccaatttactttatataccacaaggatcttgaaatatatacgaatgaactaggggaaaaaagaagattattattcatccatacaaaagcatcgaattcaaatatgaataaatgtgtaaactcatttatatgagagagagatacgtggcctatcatgttcttgccttattggaatattaaacagcttaccagtgctttttcattttctcctcatatacgcataatttctttggatattatttgatacattacatgagacttgagataaataaaaatagaaataaatttccgaaaaacaaaagcaagttgggtccaattgtaatctcttcttcatatcgaatatgttctcgtaagtgttggatcgaacgagaccttcttctaccgacgacacgttcctcactatctggtttggactttttgttcatatattttgttcataatttgtctcgtgaaaaacatagtgcattcgcatttctacacctttgttcaatgaaaatgcaatttacctttttattaaccgaaaaaaagaaaagaatcttctaggtatcaattcagccaatgaaagatctgttagttacgctgatattgttggtttccaaaatcgtctcttgttggaaaatatatatattgtgtttcaagaacactatgaacaaatgtgtgtacgaaaaaaaaaaaaactacaaattggtgtgtacgaaacacactcgagttatttagttatttcgtaactctcctaataaggaaaataaaaataaaaatctcgtaactaataataaaatctctagattcgaagtcctaaatcatcgtacgttagatgatcgtgcgaaataaagtctaaaaacttgagaagtacatatatgaaggttatgtatcaaaccagttttagggcaaagtacagatatatgaagttatgaaccaaaccattttcagggcaaagttcatatgggagctatatgtgaaagatagaatctttaaaatacatcaacttgaagcagcaagtacatgtatgaatcattatccttttgtaatactctaaagaatatatgttgtgattgatatcaaactggaccgatgaagttgtgaattagttaattacgtagagcgctgaacaaaaaaatcacgtgaacgaatacagaatgtcggaattgactacttctcatatatatatttgaaaaattaaaaatgaaattcacatgaaattctttattaattagctagagcctaatctttcaaactcgtattgaaagcgtcaatataactaaattatgtgtagttacgtttaatagagtacatattgagggaaatatatacacgactcaaatctgagtacagaatcaatcaaaattaagtttccattatcagttaagtcgcataattacatgctaatagcatatattaacgtgcgtaagataaaccctaatattatagattgcgattgttgggagagtatatagattggttctcttttatttgtcggtcgaataatccgaacgtacaaaggggagcatcttcctcgtgatcttctccagcttgtacggcttaaacgacaatggcggctctttcgtggtatatatatagttatataccgtcattctaatgtattttgagaagcttttcttataataattaaaatgaatttcttcaaaatcgaaaacgagatagaatctttgttgattctggttctctttctgataggctccaatgttcctctacttttctctcgttctgtcatttcaataatctattttgcaaactagtcccaagaacccgaaaaataaatattaaaacccccaatggtttttatgagaatattacaccgaatatttttttattgaacttagaaataaagcacatgcttgttaaaaatccaaattctccaaattaatcaactcaagaattgcaatttgttattaacaaagggttgtcttattaatttgatctcatatggaggttagattatgtaccaatctgaacaaaatcaaaagtataaagcattaatttaaaataatattgggtttaacaagcaaatcatgtaaaataagagggcctatcaataatttttcccaaacaaaaatttctatataaattaccaatgactttccttgaaccagactcaaacaaaccagatctccttattacttacaccaatatatatacacacagagtttcttgacacacacattcagataatatcaaaatggagaagatatcaaatttgttagaagacaagcccgtggtgatattcagcaagacgtcctgctgtatgagtcactcgatcaagtcgcttatatctggttacggtgcgaattcaacagtgtatgagctagacgaaatgtctaatggaccagagatcgaacgagcacttgtagagcttgggtgcaaaccgactgtgccagctgtctttatagggcaagagctcgtaggtggtgcaaatcaacttatgtctcttcaagtcaggaaccaactagcttcgttgctccgaagagctggagccatatggatttaagacttcaattcccaaacgcgtaatgtttctatttccatatatatcttttagtatagcgtgattgaaatatatgtatatgcttcaaacactgtgagatgatcaatgtttgtagcatatatattaatacataggagtaagtacaagaataagaagaagaaacaatttctcttttgtgttttaaatgcaatcgcaaatgcttaggaataaaatcgtatttgcatattatgtatttacccgaggacgtttatcatcagtttttgtttatttatatataatgattatttcttataagttataaacaatatatatgtgcaaaattttatattgtaccatgtgattattgacttatttggttgaataagtattctaattaatattaacgttagcactaaacattcaagaagaaacaagaaatattcaagaaaaacaataagttttgctacatatgtatagagtatagtaatagtatctcaagattcatgtcatacaaaattagtaatcatggactggtagaagcaatctgagtcttcttctgttcttcatctattgcgttttcaagttaacaagaattctttagctttttgtgggtttataggatttacttacaaaaaaagggtactgatgaagagatgaataagtttcaattttgtgaattgttcaaaaaatttcttcctatagaattttttagtgtaatactgtactcttatcgaagttcagtgcaataatttatctagttcctgcaaattctgatataaatttgtgagaatgctgaaagcaacaaaagctttaaaaaaaacagatgaaattacttcatatggatctgaaaggctcaatctacatatacatttttgcagccattttagcaaataaatcttagagttggacttatttacaacccaataccattagcattaaatctttttccaaaataattaattttactttaaatttttaatttaaattgtcaatcacattatcaatcaaatttaatccaaacaaacttcacatcaatcccttaaaattagcataaacttattttgttaacaatattttaaaacaaagttttttgtttaaataaatattgttcttactaaacgttttttgtttaaataaatagatcatgtatttgaacttatttacaatgtcatgttactacattaattatttaggaataaaaatatttaattaaagatttaaatcttctaaatttttgcttttagagttattatatcattacctaaaaggcaaaaaatatttttttttaaatattattttttaaaatattattatttatatatttaaacttcataaaacattattaatatttaaatttataaaaattttaatatatcaaaaatatttaacatcattatataatatatagagttttaaaaaatctcaaaaaaaagttggtcatattttgtgattcgaaattttaaaaatgaacatatattaaccaattgacgaaaaatgtgtggatacaacgtcccggaacgactaaaatattttgacaatgattcataaacatattataaataagatcaacattaaaataaatagtttttttggtggacggatttagcgggacgggtttggcaggacgttacttagtaacaattgtaaactataaaataaaaatattatataattagatataatttacaaagttttatatatatattaattttaaaaaatgaattgtctccgcggtgtaccgcgggttaaaatctagtgcgtatgattaacgaagaaaaaaatagaagaggtcaaaacggtgtcgttgtaggacgccaaattgaaaccgtgtcgtatcaaagttctagagaaatggaacatgcaacttttatacaagtctttagcaaaagaccgacaaaacacatcatcgctcacattcacaaacacgactgtatagagctatacatgcacactcaatcacaaatcaaaccctccaacgataaaaacccattcactacacaaagtgaataaaaaaggtgaagattctattctttctttaaagatcaagaaacagagtgtcgtctttttctctgaaacaagaaacggctttcagaacttgccttgccactcaaggaaggtttaagactactgaaactgaaaagagaattgagtttgcttatctttttagcaaatgacttgaaaagcttagtccctggattagatttcacgagttcttgtttaatcgagatatgatctttctctagatcagttaatctcatcctcatcctcgcaacctcaagctttagctctctgttttctctcctcactgacgcatagttatctctaggagatattgctccacttccttgtgatccaaacaaacaaaaagtgtttcagacaacatcagatgatgttactagaagaggtttgacataggtttgcttaatgctgagtttacctgctccacttcctgaccgttgaggaaactgatgacagttactgttgaatagaaactgagtaggacctatgctactgctcattgcgtttctgagtctgatctgctcaaagtacaacacttgtacggccatttgcacaggtaatctctcgttttgagctgcgtggctacaagcttcttgtgatagtttttgtgagtctatcgtcttacagagacgataacgctctgaatcctttatattcggatgaacctgtcaaaaaataaaaacttttaatgagttttgacagtttctagaatatgagattgatgatttttcttactttgaggtaaatgtcaacggctcgatagagtccatcactgatgatacgagcatgatctggtaagagttctgctaaagctatgaactttgaggttgtgagattcggatccatagctatctcagctagatagttatccattagcttcgatactttcaagatagagctctgttttggagacccggggctgtcaaaatcgtagatcatctctgtttcatctctaaattgaagatgatgatgttcttcttcttcgtcgtcttcatcgaggttcaagaatatagagaagattctcaagattgaatcgatgtcgtacatggtgttgtttgttccattgagatttatcggaatcaagacatcttcgaggatggcttggtctaattgcagaccgattcttcgttctagatctgatctacatgatcctgtagaagcagatgacgatgttgcgatgaccattttgagaagacttgaaagaaacgccattggaacagagcttcttcttccttgtgtaggaagtaacctcacaattgtttccacaatcaatcgctgtttcttcttaccttctgaatcaagaaccctttctttctccagtttcggatcgcgaacaatgagcccttgaagagacttattcgtgtagcttatcagaatcttgctgatcacgtcttgtattaaccctttagacttaaccgcagagataaccctctgaaagaaatcgaggttcagaacagctagtgacttcccccaccagtctaatggagtttgtggttcgatatttgtacccgagaacgaataatcgagctttaaaagacccgatgttagctgttctttgcaggcattgttggcaacagctatgattaaccgattaaccaagttgagatcttcagagactgggattaaggtttcgcaatgatgtagaacgatgatggaattcaaaatactggggaagattgtctctttcaagaaatgttctgttttggaagcgagattctcctctgagaaatcctctgtcatctctagataatgagatgcacaacggagcttagctatattaagaaggttgatttcaatgttgattccataacagaacttagctgcgagctcaaaagcctctgatcctccaggagcatttgagagacaaacattcgatatttttggatccgcgagaagctttcggatttttccactccgagacacaagaggaaactgagaaatcaaaacaacaagtaacagttgaaaactttcaatacaactcaagaacagaggatactctgttttaatgttcttaaatttgctttttaccttatgaagacagaaactcgaagatccaacttgaactgtcagatcactagagacatcggatatcggcctgcgaaaacagataaaaaaaccatcaagattaagcgaaaggatttctgaattatgaatcaaaagatcttttgtgtacttgaattccatgactccgacgctaagattctaggataacgaaacagtgaatttatcgccaaaaatagtgttatttattcctggttttagagacatttaaagattcacaggggacatgtaaaagattatgtctacatcaagctttttcaaatgaagacagaactagaaccagatgaagtgttaatgtacggatatgttccacatatatacaaaataagatggagaaattattggtttcgatgaacagtaagactttaacaagaaatgacttttggctacagattcacatcacatacaagattgctataattcttcagaaagaacaaattttttagtctttttctgacagttttatcaaaaacaaagatgtgaatgcaaaaaaaaaaacaagaatcgttgttactaaatttggatttcatttggtgataatagttacaaaactggtttttgaaacagagtatatattaccattcagaggcatgtctgatggttgaattcagacgaaaccctctctttcctgtgaaagctggcttcaattctccgactgtaacaagtcccatctctctctattctcgtagcagaagaagaaggagaagaagaagaagaagaagaagaagaagaagagctcttgcggttgtaatggcagtgaatgtacgtagttaatggatgtaaaaaggtagagaaaaaagatttggttaaaattaatctgctaagtacgtgtaaagctgagatcattattatcacagataaaattaacttaaggaataacaaacaatacatgcaatgtacctacattaagttgctagctagtatcctttgaggcatttccatccattattatgggataagtgaggtttcttctatcatcattatgtctactctcttgtttttcaattttcgtttcaatttaacaaaagtttaagatgatcaatcatttaatttttctacatactgctttgtccactaaaatttatatggaatatatatctaatgcaaagttttctaaatataacgatacataaagaatatattaagtgtcaagtgaataattttggtgagaccaagctttaagatcactccatgcttttagtttttgaaaatgtatatttgttagtggtccaaacaaaattagggcctttacttgctttggttagaaaaatagaaaagcagtagtgattacaccgattgagatttatattttagctttaaggctgtttatgtaatgatgttaggctgatcgaaaattctcgagcccctcgaaacctataatttgtttttttaaaatatttatgctaattatgattccaggttaattttactaaacagattatagtaaaactttgattaggaggaacaaatagtacaaaaaaacaataatcagaaaatataataatataaatacgaaaaaatccttaagtggggccagtaccatctgatcctcttcagtcttcatcggttcgcgtactgtgaattttcttcaacggaacttgaatcttctgatggaaaattagggtttttgtttttatactttttttctgactcttttgagttttgagtaattgggaattcgatttgattccgttgcaatggtggagagacggaatcctctggttctatcatccacaagaagtactctccgttcagtgctcaattcgtcacaacccagctctgccgacggcgaccgagttctgaataaagacggtgacttgttacgagggaacgctaggttgtctgcgggcattctccggtggcggaaggacggagaaaatgtttccgatgcaaaattggattctttagatgactctgcattggttggactctccactcaattgcttaagagactatctatcaactctggttctttggtatgtccttctcatcttgttcagtcaacaaagctggatcttttctggataattttgttgcttttgatgttaacaattgagtttttaaaatgcaaggttgttgtcaagaacattgagataggcattcaaagggttgcgcaagttgttgtacttgatcctcccaagacgacgctggaagatgcatctctcactcaagtacctgtttcggactctcttcatacgatgcttgtctttcccacttatgatttgatgggccagcagttattagatcaagaggttgcttacttgtccccaatgttagcttttaatcttagcttgcacatatcttgcctgaaatccctcgtacatcgagggaacggggtcttagagaagtattttgaagctaagtgtgatgaggagtttatcggaaaatctgcagaagatgggtcgaagattggtttggatttggaacccgtgtcccaagttccaggctatgcatcacatctgagagtttcttttgttaaaatcccagagtgtggtaccatcccatccctgaaagtcaattcgtcatttgaagctgaagagcgacaagggttaatagattctgcattacagaagtattttggaactgatagacagctatcaagaggcgatatatttcgcatttacattgactggaattgtggttcaagcatttgtaatccatgtagtcaaaggttgtgctccgaaagcgacgactatatatattttaaggtaatattggttttcatttttgccagaaaaatgctcattttggccagagcttactgaaaacttagttcatctgctcaggttattgcgatggaaccttctaatgagaggtttcttcgagtgaatcactcccaaaccgcccttgtccttggaggaactgtatcttctggtcttccaccagatttactggtgtatagatcaaaggttcctatgccattgcaggaggagacagtaaatattttggcatcggtgctttcaccacctctctgcccatcagcactcgcctcaaaactcagggttgctgttttactgcatggtataccaggtacatttgcttcggtttcatcaagaaaatacttcactttcatatatgttcttaagggttaaactatttctggaaacaatgttaaggaaagactagtaagagactatgtttctgtgtttacagattatggtaatttgggagaagtcataattcgacctttatgctctatgcatataactgaatcacgtgctaatagctttttgtatctattgcttgtttaagggtgtgggaagagaactgttgttaaatatgttgctaggaggttggggctgcatgtagttgaatttagctgccacagtttattagcatcatctgagaggaaaacatctactgctttggcccagacttttaatatggcacgaaggtaaaatggtatactttttttcttttctttcatgtattcattatgaactgcattcagtaaatggccgtgttttaatgaagtgcaaaattacttacatttttgtaaatattgagctcttctttctggaatagtatttttatccacaacttggtgaatgccttgttttcattgtcacaggtattcaccaacgatacttttgcttcgccatttcgatgtttttaaaaatctgggctctcaggatggttcactgggtgaccgagttggtgtgtcctttgagattgcatcggttattagggaactcactgagccagtttctaatggggacagttccatggaagaaaaatcgaatagcaatttcgtaagattttcatttctttccttggttctccattgcgcgttgcacagtttcacttaagttcacttttccgttttccaaatcgttgtcgcataatccattttagctaagctctcaaacaactcatgatggttttagacctcgtactctataaagtaaagaaaagagaaaatattgctcttcgaaacccttttccatgatgctttatctgtatatgtgctaatgcagtctgaaaatgaagttggaaagtttaggggacatcaagtgctgctaatcgcatctgctgaaagtactgagggtatctctccaacaatcaggcgttgctttagccatgaaatacgtatgggttctttgaatgacgaacagagatctgaaatgctgtctcagtccctccaaggcgtttctcaattccttaatgtatgtgagtacaatgctccaaaacttcaagtatttgttttatgatataatttgaactaaattaaattacctctcattgaaatcttagagatactagatccatttattcttccattttcaaactaaagttaacaacttcaggcttgatggatagatattttcacattgtagattagctcagatgaatttatgaaaggattggtgggacagacttctggcttccttccccgggacttgcaagctcttgtagctgatgctggtgccaacttatacatcagtcaagagtccgagaccaagaaaattaactctctgtcagatgatcttcatggagttgatatacaccaggcaagccaaatagataacagcactgagaaattaacagctaaggaagactttaccaaagctttggatcgatcaaagaagagaaatgcatcagcccttggtgctcctaaggtaacattcacagttttcttgctgtggtgttttctcgtttgtttgtctatttatgagacaagtttgcatatttttttgttactggagatgcacataacttaaaggtttatttgtattcgtaggttccaaatgtgaaatgggatgatgttggtgggcttgaggatgtgaagacatcgatattggacacagttcaactacctctcctgcataaagatttattttcgtccggattgcgtaaacgttctggtgtacttctctatggccctccaggaacagggaaagtaagtaagccattttttctttcacttttagcatctcttaatagtctgttttttggcagttatatttttgagtttttgaattaaatttacagactttactggcaaaagctgtggcgacagagtgctccttaaatttcctcagtgtaaagggtccagaattaatcaacatgtatattggagagtcagagaaaaatgttcgagatatatttgaaaaggtaagttatatttcttcttccctaggagaagcatattgagtctttggttctgattcttaaactagtgtgttttcttcaattgcaggcaaggtcagcgcgaccttgtgtgatcttctttgatgagcttgattctcttgctccagctcgaggtgcttctggtgattctggaggagtcatggatcgagtggtatctcagatgcttgcagagatcgatggactcagcgactcttcccaggatctgtttattataggagcaagcaacagacctgacttgattgatccagctcttttacggcctggcagattcgacaaacttctatatgttggagtcaacgctgatgcgtcttacagggaaaggttaggcatttaaacaatcaaaagcatgtccaaagacaaaaaaaattagaagcttcctgattcttgtttttgacagggtacttaaagcactgactcggaaatttaagttaagcgaagatgtatctctttattcagtagcaaagaagtgtccctctacattcaccggcgctgatatgtacgccttgtgtgctgatgcttggtttcaggcagctaagcgaaaggtgagagggatagggttgaaatttaagactatataagtctctgtaaaagcttttattgaaatcgctttgtatctgcatacttggcaaatgcaggtgtcaaaatcggattcaggggatatgcctacagaagaagatgatcccgattcagtcgttgtagagtatgtggattttataaaggttaaaactcttttccttcatctactcatcaaaaagagttgccattttcatggttgagtagaaatgttaatttgttatggttcggttttatcagtcgagagttataatagtttcccactttgtcttctttgtaggcaatggatcagctctcgccatcactctccataactgagcttaagaagtatgagatgcttcgagatcaatttcaaggccgttcgagctaaacccctctcagtacataaaaattagcttataatgaagacatttcatatttttttcccagactattttctctgaacagttctgttgatttggttagtcaattgatagtaaaattaaagaatcaataatgtaaaataattttcttggtttgaattacctttgattggttacgcacaagtgattcttcgcttccatagttccatgtaataatataacacacaagtgaagcagattattcaatggtaaaaggttttcttaaaaaaatttccacaacggttcataaaagaattctgtttttggtttgggtaggaaataaaatcatcagtttgttatattaggtttgtgttttatattatctgtttgattatggtgttgttagtaatttcagaatattttctccaaacaattatttcaattggcattccaaaaatagcgtttttgttttccacacgtgactaaattccattaattacgtgaagcatagaatccatatggcgaaagttttttaaattacagtaaaaatttttatgattaaggagattttacttgcaaaaaaaagacaaatctttgaagactgaaatgacgaacttgaccactatgacatcacttgtcacgtgggatttgctttgtttgggcgagctggtccgaaatcaatttttttttttaggaaattatttttgttgagttaattttttttcctctttttcgtttgttcgagaaaacagagaatgaggaatcaaaaaacggaattttgaatttgcaacgtgaggaacctcctctgtcgtttcgatcttcaagtttttttttaaagctttctctcttcaaagctcttcacgtgagctctcccaaatctgggcgttattcgctttctggattctgaatcgcattatccaacgaattc

SEQ ID NO: 5 - DNA, 71097 bp, Arabidopsis thaliana
aaatccaacacggtacacagaacaaaagcaagtatcaaacagtaactgcaaaacaaaatcaagggacctgatccttatcatcttcagcagcggaaattgaagcagcaacggaggcaccagcggaacgaacagacgacgcaacgttggtggcgttagccgatacagttttaaggcaagaagatataatcttaaaggaattcggtaacaagccactgttctttcctttccccttcttcatcatcttctactaccaaaacacctaagagacaaactcaaaacgaaacaaataagaaaacacgctttctaattttgtcgatcatcaaccgccaccatcatcaccatctgcctcaccggccactaacacccccgaaccaaccacggagcatatcctccgataaccaccgacgaacagatataacatccgatgatagaatccgatggatctctctcgataccgatgagaaaacttctgagtagtgtttgacttgaatcaaaagatctctctctctctctctcaaatttttgttgttgtcttctcgtctactacttctctcttactcgttcgtctttgattttcagagaaagcgattttcaccttaatccaattttttccgccattttttttttttacagacttatcatttgatttaaataatatatggataatcatcattctcttgttactttattttattcagttttatacggcctgactttccaacttctttttttttcaattttactttttttttttctctttaaaaaaaagttaacagataattttggatcggatttagttaaaaattttaataatctcaccttaaaccaaaagattaacttgtagaacctatggctcgccagatataaaaagttacaaatatatttgtaatggtcaaatttgggttacctatactcacatactactactttattgctctccacataaagcaaatttcgatacgaccaaacgatacaaacctcatatgtcaatttatggtgttgttcatgataaatgaagaaaaacatttagaaataaatctaaaacaagtagtttctttcatcaacaaaaccaatgtctctcatctagcaattttataagaatgctagagagcatcatcagtttctataagagttttaggcagtagcagagcatattaacataatcacaaaactctgctcctttcactacagacaaatcatacaataaagaagcagtgaatgcagataaaaataaagaatcaacaaagttgcactagcagagcaaacctccattcacactctctcgtcttcacatgactacttgtgtgcatacatacaagagcaaacctccgtttttcaagctggaacgagttgcttcgagccctccatttttagaccaaaggctatgtatgtatgtatattatgttacttgttgttgctgttgtctgctgctatattccttttccaagaatccaaatgtcatcttcagacgatcttgcagatttactaggatgtttttcgtcacccttttctgatgtctagtgctctttagccattcaatcccaaagtatactcgcacatatgtcgtctttggttttgaagttgattcttccatttggtatcttagatggagattaaaatagtcacccagtggaactccatggagggtcatgacctcttcgacaagccacccattcttctctggcactagggacttttgctgtgtacttgttacttctcctctgtaacgtgatatccgcttatctctgtagtatgtctgcctctcatacacatcatccttctctgactcccatggactgcatgaatagctctggcaacccgctctctccatagccttacgatccacttcacctccaccaaacaactccataaagaaacttacctagagagttatcataatgatgcgtaagacaatttcaaaactcatacacatttccacaacacagttgctttacaaatgaaagataagaactcaccgggacagggagagtcaaagagaaaacctcagagaatcgcacatcatcaacacccaagaacagaccactctcttcactttggagtttctgctctgattcctcttcaacagcttgcactttctgctctggagtcaaagattttgctttccacagagccattattgtcctataaacgcaaaaacaagtacaaaaagtctatatagatattatcgtaacaaatgttcatttctactaagggtgtatgtaactcttgatagttagtcaagaggcatccaagtctaaattcatctaacaaaagcagttgatactacaggaatgaaccaattttcagattcagatgagaaaatggcatatccaaattaaactaagcaatattgattggggtacataaattcttagtaggacgttgataggagcaagcacacaaatagcaaataaaacattggaaagactcatcacttacttttgtgccacattgaaagacacaaatgagtggaaatggaacttaagcctgccttcctcatcatgtgtctttgcacctatcctcgcgtccagtcctctatttggtctgagagtcatgacgacaatgggactccccattgaggcaagagtgggaggaagcacttgaatttcctctatatcttcccacaggaaaaagaattttgttttgttaccaaaaatgcttgcataaaagccaacaattcttgcagacaggaaaagacgaccctgcataagtaaaacttaattacatgtgttatatactctctatatttctaaggaacaaagctgatgataagagaatgcggttgaatacaaaaaaaaatgtgatgtacatcaagggctcgttacctgcaaaggcattttccgctttaagtgacatgtaaagtcattgattagaaattcttcttgtgggagaccaaagagcttctgaaaagctgaatttgtttgaggagaccgcacattaatctgaaatttccattcagcagataagaacgcgcaacaacactaccagtttatatgttgattgagagaacaaagtcgtagccacataccttcttgcccacctctttctccatcttatttaaatagtctctgacaacatctccacctcctgtatgatccaagaaaatcctcaagtgaagtttggattgacaagcctgagctagtttcccttgaagtggaacccaaacatccgctaaatcagatatattagatctcacaaagttgacttcagcatgccccaatgaaacagcctcgtcaaaaggtccatcgaaatcaaaaacttcaacattcagtacagaaggaggatcagccattgcatcgaattcaaatatttctgcacaaacaaaattccaccctcaaaaaaacaaagagttgaaacattcaagaattgacgaaaacaagtggatgaaaagtcagcttgaggataagaccatgctaccactaagataactagacataaaaaccatagagtaaccatttaccgttccactgaggattagatttctggaacttgatggagctggttcttgtcttcccattggaagtaaatacaatatacggatcacaatgcccgcttggatctacagctgctagatcgaccccctcaattagagcaacagttagcaaccaaccatctccatgcgctttgatgccatgatcactgcctataattggatttgacatgtaatgatcagtcggataaacacaccacgctaacaatgagagaccgcaagaaagaatatgaaatggtcgatgctgtatcttcatggatgttacctttctgttttcttgcctgcatgaaacgggaaatcagttgcaatactctttcacattgaagaacgagaaccccactaacaacaaactccccaattgaatccggtaaatcaaggccattaaactcaagcccttggattgcactgggtatggcaaacacaatgtggacaaatacataaataccaatcaagaaagtggataacacggtgaaattggcaaaatactgtacagccaatttccagtctgattgaggctcagcttgcaaggaagagagagcttgctccttgttcagcccaatatccttagaatctacaggctttacactttgagccaacaaattggcatactgttcgaagttgtcttttagaccttgtcgagctccattctctatcaaacctctcatcatggtgctctgaagaaaattcaatctccatgaaactaccaaacgtgaacactgctcaccagatggcagctcaggcccaggagagatgcagtaaagcacttcaactttgaaggtacctccgaatgggacatctggagtggcaacacttgctaaaactgcgtaaacctctccgtccgctttgagatatgtctgctcctctgtgcctttgacagccttaataagtttggttgcagccttgaggtaacttacaacacgcttaacactctcgccatcattttctgctttccatggtccaatttgaacttccgtggtcccttgcagttcagtcaatgatgcatagaaacttgaatccgatgcgaaaagcacaatgttaagatctgatggggaaatcataaataactggtccacaacgacacctcctgatagattactaggaggttcactaccctgatctttcgactccattgccttcaataattcctcaaaggaagtagaagatgattcatcttcagacagctcaagggaaaagacaggtttggagatctcagataggtcagatgcatcaatgctcctactactggattgtgtaggtgtagcggtgatagcattcttctgaaaaatctgagtgaatcgacccgcaaaggttgtctgggggatagatgaagcatcatctgatctagaaggagaggcacaagtagagggatcaataggtgattctagtctcaagtcaggactcctcgaagcagaggtttgatccccactagaagtcaaatcaagaaccgagttcttctgactgaaacatatcttcaaaagtatctcacctggacaagatggatcaaacatgaaaatgaaaatgaaaatgaaaatgaaatttcaaaacttgcgtcaatgtagtgaaagacaaaatatagaggaaggaggacgtaccacaatcctttttggaacctttcttctttggattaagaggataccaaacagtgccaagagattgattctctgcatcgaaaacaagggaaacagaaactctaacctgcccaacgaagtcatcgttgaagtatttatcttcatcaagaacagagacgacgagttcgtcgttcaaatcgtcgacgccaaaactgaaatcttcagtccatttggggttcaagttcttcttcactactttggtccgtgacctttgctttcccagctgcaatctaacgtaagggtcgctaaacccattgagatccatagccggtagattcctcgcttccacgactcggacctgaagcttcatctcgccgacgctgatgaactcccgcagagggagactcacaaagtcgaattgacgatggcgagtatagggaagaacggtcccagaaatacgacgaatggagaagaaaactttgaaaaatcagcaatggagaaagccagacaaatcgggagaaaattcaaaattggagatgagagagataactttgaaatggggggaaattgatcattgagcatgagaaaaggagattttggatggaaataaaccctaatttgcttcaaatcggaagaggtaaacattaacaacaacaacgataaatccagaaagtcgtcggcgacgaagtcttcgttaatgtcttcctcttctttcttttttttgtttggtcaacgttaatgtcttttttgacttttcatacgcggaactttcataagtgtagttctatctgtatttttttaaaacattgcattgacacccttcatagtttataaatctttgctttacgccccacattattgaatctttgattgtgaccaagatatttctatcttggcgtcgatttattcaccaaaattaactttttttttgcagtttatggtgatatgaatacattaattaataaagaaaattagaagggcaaaaatgaaaataagtaccataaggtagccacgtgtagtctaattggcttggtagttaaaatcattcaaaaagccaagatgggattattaaccaaaagttgttgtgttcttcatagatagaagagagactgttgtttctacaagtttaaactgttaagaaagctttcacccggagcgagcgaaacgagcttgaatcctcctatggattgttccacgacaagacggacaatccatcattccttctttctcgtgaagctgattgcatttaaagcaaagaacttggtgagcacaaggcaagaaaatcacactcatctcttcagataaacacatcacacattctctttctcttttcactttcggcatcccaagactctctctttttgttgcctttgactcactgctgcctttcttcagtgcaatgattctcgagtagtctgatttaagtttcagctctgagatctctctttcaagtctcttgatgttatctatgtaatatttcacgtcggtttctgctttccctttgatccgctcttcttccacttttccaagcgcttcaagttcctttgtttctttccttatcaatgaagcctgagcactgagtttccctttggctgttctttcttgcttcaaagcagcctgcagaggaattttcgttagatgtcttcatcaactcctataactaaaaacaaccctttctcaaacttacaacatcgaccaaacctagatagatacaaaaaacatcaattgcaattaacaacactcttgatattactacacttcagttctagagctactttaaagcagaaggatgcagtagactaaaaacacctgatacaacatcgaccaaacctagatagataaaaaacatcaattgcaatcaacaacactcttgatattactacacttcatttctagagctactttaaagcagaaggatgcagtagactaaaaacacctgatactgacattttttcttcctttactttatcgcattccttagatatagcaatgtacaaggtgatatatatgtatccaaaagaataaaatcgttaccagagatacgaatatgaaaggaagggacgttagcagatgagacatatggtgaattgcgggtacctatcgataatcgtcataagacaagaagacctaacgtatgtctacaaaagtggctaacctcgatttgattctggcgattttttgctttggtaacttctttctgtagcactgtcaccttttccctttgacccttgagctcttcctgcaacataattttttgcccttcccacgagtgaatatccttcagtgatctttcccctctctcttttgcttctctaaagctctcagcagactcgacggcttttatcttagcagcttccatctctttcttcagtatagattgttccagctcgagcctgtgagcagtattgaatgctttttccaactggctggtcgcatttttcaacgcaaaatccatctcagatagccttttcctagtgttttcttccaataactgcttctcttttttatactgttctgcctcttccctctctttccttagtgccttaagctctggttggtccttaagtagtctaccagttgcctcttttactttctgattagcccagtcagtccagacctgcagttcattctgcagatcattcactcgaggaacaagctttagaatcaattcatctttcttatcccggggaacatatatacccagagctgcatcatatgggatcccagcatagtaatctggtgctagctttgcagacacagatgccttctcttcagactcagaaccagacttcttttctgaagttgatggtatcgaagaatcagacttcttttctgaagctgatggtatcagagttacagactcagaaccagtctttttttttgaagcagattttaccgacctagcaggtaaggcagttatatagccctttgcatctaccactaccacaggtgaatccaacttactgttctttcttacaaaacagccgctatcctcagctaatgaaactttcactccaatctctgctgttatctttgatgaagaatttcttggcacaaattcagaagatgatttgactcttttctctaaaaggaagctgccaactgatgcaaactttgccgccttatagccactgcctttgctgtaagtcctaattttttccacacatgatttttgccgaagcattgctatctcttttttagtacggccttttcgacaagataccaatttttcatcagagactagagtaaatgatgtacttctcatgccttgacaagaaacagtgctacccgagcatacttcttttcctggtgttgttccactagactgagtttttttggagttcggtgtatttgggaagtttccaaatttgagtggctcattccgattgctttgaggatcggattggggaggctttgggttatctgggtcactagattttggaggattagattcagcaccaagagattccgaatcagataatttacttgaactcaccaatccatcgccttcagcttcaaaggcttgcaagacattcaagtcgcacatcaaaagcctccacatagcttcaactgttgatagggacggcctgacctccttaataagacttatcatttctaccaacgtataggaaacaagctgttgtaaatcctcaaacacatagtctcctgaaccagcaccttcgtctccagtcttgagagcactcaaggtgttattgacaatgtttgacaaaagattattgcctccacagtacagcctacagcgtgatacagctttcagaacttcgtcatcggtgtagcctaaatcaataagctgcttcattgtatcaaggaagagcgtgagcaaatttgacgacaacaattcttcaagatgacaggcaaatgggtcatcccattcgacagattcagacacttcaacttgcagctgattagaaacttccccaaccgatccatttccgctcaaatggttctgaggtttcaacgaaggtaactcatatggagggaattcagtgagggaagaagcatttggttgagaaggatcagctaactttctcttgtttttccttcctttttcctgaggtgacactgtaaaggcttctactttgtcaacattgagaccacatccattcatctcttcttgcttttgaactatactcatcacctttttaatccattacacatgaacgacttaagttaaacacacacaaaaaagcgtagaacatagatacgaaattgtttcatatgcaaaaaccattaaagtatcaaagatgttagaccaaaatcatctaaattatctgtatacatgcaaaagagagatgatttcatctcctagttgtagctttcagaaacgtgattcaatcgcctaactaatgcaatcccagaaatacgccaaaaaaaaaaagtaaactttttgcctagtaaatgtacagagattcctcaaatctaaagcgtactactttctgattaagtgcttaatcgcaatgcaattcagaaccgttactgaatcgaaattaattaaaaaccccaaataatcgcacgatcattcaacccacaaacaatcacgaatacaccaaaatggatttaaaaaaggccgtaaactgaccttcaacgaagacaatagcgactttaaggagaacggcgccggaacaaaaatagcgggaaataagatcggtagcgacaaacagagagtgagaaatcgaagaagaagaatattgttttgggagtgtggagcgagcgagagaaattggccgtagaacactgtttcgtgaatgagagaagaggtttggtaatcgctgttattacttggattctcatgagggtattttagtcatttcccaattatcccttctccgagctaaaaagggcagcgaatcttttctatgttgtttctgcaactgtagatcctttcacaaaacgaatttcagctacaaaagtcgaaaccgataaattcatgaatgaaagaagaaagccgtctccaaaagacataactcgactaatctaatctgatgtacagttaatagtatcaaacacatccatcatactacatatctcaatcagattaaaattcgaactttcaatagaagctgagtaacaaacaagaccgaatgatctaatacacgttacaagtctctgatacatcagtgacaaaaaggggtagttttcactttttcctctttgtacgtcttctttcagcttcattctctgctaccacaacgtgaaactctgatccaagcatatcatgtatgtcaatattctttgagttactgaggttaacagtctccatgattacttctagtgtcacggtgaagcctagattagacaagacacgtatcgcattcccgattctgcatatggtttgtcgagtctcgagtggaatatggctttgctcttttcctgtggaggaggatgagatcatttcctcatctttctgatcatctattgccataggatctctcacttcgacatgttctccaacccatatgaaaccattgcagccaataatcaaatcaatcccaagactttctacgtaatgaaagtgatgtttgcttctcttaaccaagtaaggatcgaccttcagaagttgtcccttctcgagctgtagcgattcatggattaatcaatgttcagaggaagagactagcgaaaggtataactacatgagcatgtgaccaaatgagaaccaaccttgccatacttctgacttctggcttgtaactgcaagctaccatcatgctgaaagttgcgtacttcagcctaagagtttgaacaaaccaaagagggaacccttttagtcaggttgacgtaactgttaagatatgtaaagattggaacattactaatcacaggacttacacatacgacatcatgctctacaaagatattccgcatattgagttcatccacagaggttcttcgcctctggcaacaacaataaacttatatcattgaagccaaaagcaatcatccaaatggcaaaatatcaagaatcaaactgtacctgaataccatcaggcatgttcatggaagaaagcatcagtactccatcctgattgaagttgagctccactctccaacgtttttgagcaacctgaataagtaaagatcaatccagtaactgtgcaatgtgattgaaacctttatgttactcactcaatccgatttcaaaaatccaaacaccaaaacaaaaatctacctcaatgacacggcctaccacaatatccccaacttcaggcttgtacctaaaacgtagatcatcaaaaccatcagttctacttaatctcagagtagagagtccattctattcacattttctgggaaactaaacaaattcaaagatcaatcacagacctggctcgcaaggtgcgtacatagacaagcttatccacacgctccactactccacagaccgtcgcgagcaactcaccatcgacctcggaagttccatgtcccctttaatgaaaaaaccaatcgtgaaaacgcaatttgacaaaaatttcaatccagaagggagaatgagatgaaattacttgaggaaggcatcgtcatggttgacgggaatagagtcggtgacgataacagaagcgtcagagttagccgacgacgacagtgattgaagccgctcgattgctctctcaaacctaaccttctgcgtctggctcaacggtaactgtagctttctcatcaccatcacagacactctctctctttctctctatttagctccagcaacacaacaatggcgatgcaaaacgagtttgggacttgggagagaagaagagcaaaaaccttgacgttagttcccttgaatgaattctagggttttgtgttatttgttggactaacatatccaacttctggcccatttataaaacttctggcccattaatctgataattgacgccaaataaagtattatttatcttcattaaaaaaatgggaaaaaaattagacgtctctgcagcgacaagcttcaagtcttttgtgatcttcctatttctgacgctaattcgaatccttcactcttcaaattgattctttcacggatcaaacaaattatctgagagtaccgattggtaagatctgagctttacgctatgaatttcttcaaatccgtcttcacggaagacctagatcctccagaaaccgaatccgaatccgattcaccgaaacacagcgaagagcatgaacatccagagcaagaacatccagagcaatctgaatctaacgacgacggtggatggagcttcggtggtctgatgaaaactctagccaccagatccgaatccgtgattgaaacctaccgacgagatctcgaagaatttggcacaggtttgaagaaagagatcgaggtggctcagggatcgcttggtacggtgggacatgcgattgatgagcttgggaacacggtgctaaaaggtacggctgagattattgctcaaggtaaggaagcgattttagccgctggtaatgaatctgattcttctgataacaatagtagtcagagttttggtcgtcgtgatagcttcagttcgaaaccatatagtcgtttcgatgctcagattcgtgctgttcaaggagatctcaacacttactgtgaagagcctgaggattcagatgattacaaaaagtgggaatctgcgttttctctggatggaaaagctgaggagatggagaaattgttggaggaaaatggtgatatgaaaggagtgtataaaagggtcgttccgagtatggttgatcacgagaccttctggtttaggtatttctatagggttaacaagctcaagcaagctgaggatttaagggctaatcttgtgaaacgagccatctctctggatgatgaagaagaattgagctgggatattgatgatgaagaggagagcagcgagaaagttgttgaagctaccaaagatgtttcaaggttgaaacttgaagggaatgatggtatgggtggtggagatgtgagtgaaactgtgaaagatgaagtggaaagtacatattcagtggctaaagtgagcacgcaagatgaagtgacaagtgcagattcagtgactgaagtgagcaatgttggtttgaagacagataaagattctgaggaaaagaaggagactgatagtgaggaagttccagaagaaaaatcatttgttgatgctgctcctcctgcgtctgatgaggctccaatccaagattctgtcaaaccaacatctgatgaggctccaatccaagattctgtcaaaccaaaatctgatgaggctgctccatcccaagactcagctaaaccagatgtggctgcttcttcatcaactcaacaaccatctgaagaggatttgggatgggacgagatcgaggatatgagtagcatagatggtaaggaaacgagtcggtctggtggtagtccaaacagagctgagctgcgtaaacgtctgagtgctgcagaggaagatgaagatttaagttgggacattgatgaagatgacgaagaagaatcatcatcatccaaagcttaatgttagttttaaagtggtgtgctttcttacttttgccaatccttttacttgtttttacaagtttctggcgctttgcccccattcttcagttgtttttctcttcaacgtttctattttacattgatttgaaaatatgtttttaaattttacttgagaaggtggtttgaggaaagtttgaatatattcatcttgcgatagtcattctctccagttattttgagtatatcaatcaactgacccctgcgaattcggagctttaattgtgtcaaaattaatctcaatttctgtcctttgtgaagaaccaaaaaagttaaatattacaaattgtaaaacttttaaaattaaaacttcttaaaacgttttaatatttataattttaaaactcttatgaagttttatataatatatatatttaaaaatatattaatacgggacgatataatacaatatatttaaaacttttttgaagtttcaaatattatatagatttgaactttataagaaaatgacaaaatgatgtttaatttcacagaactaggatatatggtgagacggtttggatcaatattaatacggaatgatatactatggtaaaattctaaaattaaacaaaatttacaatattaatacaaaaaataacttaaaatttcagaaatttagttatataaatcatttcgagatgtatcatacataaaaaaaagcaatagcatatatctataaatcatctttaaaacaaaaaaataaaaatttttgagaaaaatataggctcgttgtgtacttcttaatatgtttatcatttataaatactattaactaaaataaaatctttaacttgttaacaaaaatataaatacgttgtgtacccggatgaatatctagttattaacaaaactgtaccatttgttttgtagaattttacttattattttattttttggaccaaaccaacttattatttattggcatgtctagttagggaaaatgtttcaattgaacatgtaccgtatgtgtgcatgtataaatagaaattttatgattggattttaataatgcaacgaatcgatgtgaaactattagtgtaaaaccacaatcgacgtcctttgagaatttactggtaagaagaacacagaaaaggatagaaaaggatctggatggatccaagagaaaccctcgcgtgagtaattaaccctcacttaaaccccaatcaccatttcaaggcgagaaagcaagttgtttcttgagtaatccaagttgtttctattttgcgattttaacgggtcaaagatttgctctaagggaaggaggtagaacagttggagccggtgtggtatcaaaagtgatgagctaagtcgctatagcagatttaaaagttcttcaaacgaaaaaacacaactgttctctagtatctaaagattcatctctcatgagatttctactactttgagagtttatatcaaataaacgagagattagtgttttaaaagaaaagcttctcccagtgtgatatcttcactttattctacaacctaacattgacaaattaacctttaagcaagccaaagaatggagttagaaactagactccaaatcatcagcattccaacattcaaccaaacctaagtgcaaccatggcaataactgtggcagctctgaagtaaacttctttgattcttctttccactttatttgagacttcttcttcgttgattgttttcctattgaaattaacaagggcttccctgagtctactcacagaccacgagagcaataccaaactcaaactcattgcaccctcgaagaattggtttgcgcaaaagggtacctgcctggaagcaacattacaaacgagaaagaagagcacagccataccagtgccagcaaagccaattgaacactgagtcaaaagctcgaagagttctccacgtgatttctttagagatagcattgtggtttttctatgttgttcattgcctatcatcagagagagaaggctctcacacgcatgaagacggtttcgttcgtagaggtcatattccttatctcttatcttcggattttgtttctttggtgaaggcttgagcctggttttcttcggactgttggaaatcgaaagaaacgttttttaaagatgcaaaagtaccaaaaactagttgatgatattagatacctctttggaggagctagtgtaactgcgtcctcgggtagctgcagagtgtctattggtacttcactgtcgaatctgcagaatgagaggagagcaaaaacttaatgttaaacccaaaaggatgagactcataggtatgaatcaaacttgcagtgaagaattaactaccgctgaaactgcgggacaagccgtgagagctttctccatcttgttgagttccttaatctatgaaactcagctgccgtagagaccaaatcattcaattcagctctgctacttgagaacagaatgttagcatccaccatgagatccaataacggctttgcatatggttgctgagaacttgatcttaaagcatctagacccatcaattcagataggagagacaaatcgaatccttcttctttgagttcttcttctgatctagacaaaaggaactctaacacctcctcttttcttgcatactgctgagtgatccccaagcttaaacacacagggtctggtccagtttctgttaaccacagttcatgtcagtcgaaaaaagggattacaatttggtgaattcaactgaaatttgatcaaagtcacataccatgaacatccatgagtctatgcttcatcatggttgaatcaaactccaaaaagtggttagacttactaaaagaagaaaaaggtttcaatggctccaagagttgtgatttcaggttaaaggagctctccggtaatatctcatattttcttcctccaggattcaccagataagcccggcttgtctgaatcattcatagacataagaaccaaacaaggagaagacagaaccaggacaagaattcaacgagagattctaaacccaagtgttttaaaacagagaaagtaaaaaactgaccttgatgatctcgttgcttcttagctcttgaaggagactaaacctaagtgttgaatagctatgagaagccattgagaaaaaactgacttcttatttttttttctcttcttcgtcacaaaaccatggaaacaaaacgaaaaagcttatcgtcagcaatctcgcctatatatgcgtcagatattataagatttgtgtaaatcttttctttattcagttttggctggtgaccaaaacacactttgagtttttaaatatttaccctttgaggcacttattacttaaattaccaagaacatacccaatcttttcaataattacataaatatacctttggtttcttatattctcgaaattaacccaaagatcattagggtacatacattctttactcgagagagagaagttctaaagtcctcaaatcccgcaaagctttttcagcttctttgttgaattgcgagcagaggtagaaatcagcaggaaacaaaaatggtaaatttgaatgctttcttcatcttcatgaacttgattgttggcagttgttttgtttgacctagaaaaggtttcttctttcttcgtaattattcatgggtttactcttttttagccaatggttctagggttcttggagatttcgagtttatggttttcgatgatgatttagggtttctcgtgatgggttttgattgtgtttgttctctggtgcagttgttcttttcttacttcaaggatttggttggacaagaagtgacggttgagctgaagaatgatttagccataagaggaactcttcactcagttgatcagtatctgaatatcaagctcgagaacactagggttgttgaccaggacaagtaccctcacatggtaaattttctttcttttaagcgatttctctaagaattgggaatttagggtttattggagcagcctattgttttttttttgttcacataggcaatattttctttgttgtgtgtgcttgaagtgctcttaagtgtttgacattatactggaattgatctcactcgctagtttcttgctatacttctttgtctcgtattgtaaaatatcacttatgaactgattgaaagcttaatccttggctcttgcaaatgtgtttaagccttcactcttttctttttccttgctttcatttactgtgaccaagcttgagaagctctaacgtgatattgattagatttacagacgcaaagggatgatttgaagtgattagtggttctggttcacatatttgattgagattgctgcttttgtactgcaatttgtcaagtctactcaggattacaaaagatttgcaatatgtttgcatgaccaatttcaatgcatttaggttttatggcgtttatattgttatatctttggcactgtatttctttatcttgtcagtgtcacactttagaaaccttgtcaaatagtacaatttcgctagaatcctcccgaagatgtttttagctgacggatttgtgtgtttgttctgtgtagctttcagtgagaaactgtttcatcagaggatctgtggtaaggtacgtgcagttacctaaagatggagtcgatgttgatttgcttcacgacgcagctagaagagaagctaggggtggctgattctgaaatatctttgtatctccaaaacttgaatacttttcattcggcgtaatggctttataatgaatatttccctgatgtagagccaatggtatggccatgaatcttgttccattttattaacaatggataatttaatttcttttcctcgttcaaatgaaaagcttattaaagcctacttagaaacaccttcactcttgtcaggctgtcactacttaagtttttccctttcttagatgaagcaagcagaggaaaaacatatagactcagtaagaaggaacttatataaagtaatatgagttcttgtttgcatagcagcaataggaccttaactcttgtcattaatttagtttcttatttctgagatgaagcaaacagaggaaaaacatagactcatgaataaaaataggagtaattttctgcataggtagtgtaacgcttcataggatttgcatccatgtacggtctggtttgccaataggggaaaggaccagctgcagccatatacggatatgctgcagccataggcggatattgtgaaatgtgaacaccatcgaacattctgggtcgaggcatggattggtatggatcaattggaccaccacaaggtccacaaccaccatatggtccatgcattgcccccatcgaaaacgggggataatggcttctcgaggctgcggatatgggccaccggtgtaaaggattgtgtccaccatggtacatcatcggttgagcggtgtaacaaggcggcggcgggttcacaccatttttctcgcttggcaagtttttaccaccattttcctcgcttgacaagtttttaccatcacccttctctttctttgtacttgagtcttgtggccatctgaggacgttcttattcttcttatccttctcatctgatcctttctccccattggaatcttttttcggattctcattctttgaaactttctgtttttgtttcacatcctcttcatcaggctcatctgtgcatcataaaggcaaaaactttaagatttgtgaagataaaagtaagaaatcttcaaataggttaaacaactcaccttcgtttttcttcgatttcttcttcttcgttgctttaacctgacactttgagcagcaaccatcgttcatttttcagatcacgttcctgctgctttcaaagaaaaaatatagctacagagaataacttgaagaacttttttgggttttacttatagaatttgcttaagattataaaccctaagcaatccatatcttatcctatctatacaaaataaataaagattatatcaatcttgaagaaaatcatctttccatatacatactcgtttgaatccataaaaggcatacgcgtatcagaacgaataataatcactgatttgaggagatacagtatcaagctttggatacaagcaaaaggcttaagtgatgttatatatatataagatattgtggaaatcattgatttaactgaatatattcttactggaaatgtaacaaaacagtaacatatacaaagatcataacttgagttctaagcggtagtattgatggtttcaaaaagggtacaactgtacggcttcatctcatacacaaccagttgctgcaacggttcttctgctacaacggtttctccttcgacagagaaaaaccccgggaaaggaagagctgtgtcgaccaatcttctccatttgcttccatcgggaagtgaaggtaagactacactctcaggatgatcactcgcattgaatccgatgaacagatcattgctctttggctcatttggctcagccaatgacgcagtttcctcttcctctgactctgatttgatctccaatgccaaaaacttagaagcaggatcttcccactttggagttgtttggtcatttgcataccaaacaatattttcaggtttcaaaaagtctctcctttgaaacacatcacttcttcttgctcttactgaagtcatgaaggagataaattgcgtgatctgtgtaccgaaagccgaagctagcaagttccaatcaaaaggtttccgtgattccaacaaaggcgagccccttgtcgagattccacattcatctcccatattaagcactggaactccaagtgatatgtactgtataaacaagaaattgcggatttgttttagccttctttgaagaacagctgatttattcgttgctccttcttccccacaattccaacttagctctgaagctagctcagggccactgaaactgactatgtcaacaagcgagagtcctgagtttcttgaaatgtagttgaaggagaaggccggacctcttccatcggtaaatacgtcaccacttccacaaattcttgtagccagatcactaagaacgcctcttccccttaaaaaatttcttacatttcgacaatatcttgtgttgagttctgcccatcgcttccaatgtgggaaccgtacttcttttggcatcatttcaagtggatcccagcaatcagctattagtttggtctccgcaagaagtggatcaaaagctattgcttcaaccaaaggaggacgagagagctgttcaccgtgaacgcctctcaagagagatgaagcatttataaaacaaaatccatctacatgaaactcggttacccaataacgcaagctctccaataccaactgctgaacaacaggatagttacagttcaagtaacttttagaatctagatcattggctcttcccttgtagtaataggaactgtcatcaattccacgaagagctccagaatcagcagtatgtgtaaaaactacttccaaaagtacctctattccctcactgtgcaatttcttcaccatcactttcattgagttaactgcggattcaaggctattggaaggtccatatatgtccattggtgaaaagaaatgaaatggaaaataaggacctttttgctcggagaatgagaatattggctccaaaagaacagcgttggttccaagggttttcaaatggctaactttctcagctacaccagaaaatgtccctgctacgttactaggcaacttgctggatctgtgttgtgtaaaacccttcacattcaaccggtaaacaagaagtttctccagaggtatgttcggagacacatcttctccccaatcaaaagaaggactcttagataaacttccaagatatttctgagagacagatttaccaacgactgtggcatatggatccaagacaattggctcaccttcaacatcgacatcttctttagagtgagctgtctccttgcaacggtagccatatctcacaaaatcccatgtattgtcaactgaagcatgccaaacatcacctgttcggttgacataaggatcaagatcaagttctaaagcaggtttatctgttgtgctatcatcatacaagcataaaaccacgttcgttgagcttcttgaaaagaacgaaaaattccaagaatcatcatctggcccggaagaaaggcctagcggcaatggatgaccagcagtaaaaccaaccgggatacagaagtcagtgtccctgtgagtcagcatttcttgaccgtccggatctctacctgacactaacttcaggtgaaatgataagtagaaaggagattctttcccatcaaattctagccctagcattaactcagacaaggagcttttcacaaatgtagtttctgttgtgtgggtttgtgagtcttgggaagagttttcgaaatccagaggcaaaaaacacgaagaatcagacctgtagacaccccaaaccatcaccagcctactcttgtcatcaccactaagttccaaagatgagacataaaccaaaatgctgtacttttctctcttcttttcaactttgactttaaccagagcacctgcttttgtcctgaatgaatatgatgttaccttcttcaggtcatcagcctcagctcttctactagacaatgcctctctcagctcgatggaagtctttgaagcacatatcttactaaactgataactttgcaacgcgcttgtaaccaaatcacccatgaaacgttttcgtgtaaacattagtgtctcggatccaagtttaatcttgttcttcctaccagtaaaaagccttgcagaaggaaacttccatgttctagtgatgccattattgagacaacaagatcctatcccaactgatggtgaccacgcagccattgtttaaacaaagcaccaaaaactttaatccaggttatgaatatccctgttaagaacacagatcaaaccccaaagctctttattaagattgaacgaaagaaaacagaaaccaaagcagaatttcgcaagggaaactatatccaataaacaactcgttgaataagctaaattcccatctcaaagctaaaatcaaaacagaacccacttagcaaagttttcctaccatcggcatttcaaatttccagaaattaagaaagatagtgtagtagaatcaacaagaacaagacgtctcgggatcatgattcatcggaacactaagaaataattgaaaaaaaaaaggaacacaagaaagcgtaaagaagagacaaacgtcgtcaaaaaagtcgagcttactgtcgcataagcatcatcaccgccattgaagcaaaaaaccaaacttggaaacagagaatttcacaatgattgaaacagagatatctaacactacccatctgatgatcgagtgagtgtatgtgtccatgagtttatgatttgattttttttgggtgaaactgaaatgttttgtcttcttccttcacgaactctccaccttcacctcacgcgcctacaaaacggtttttagcgattgtaacatagacacgcgcgtaaggtgcatgtgggggttgaaaaggagtgatcttatctgggccgagcccataggcccaataattttgaaagatacgacaaaagtacttttcagttttgaaagttcaagacagaagtgagctgagctgttttcacttcaagagtggatattgccgttttaaggtgtcacttcaagagtggatttttactacttttgtttttagggttttgtttttggagcctaaacattgttagtttctgtcaatggcgattttcaaagattgtgaagtagagatcttctctgaagaagatgggtttagaaacgcttggtacagagcaattctggaggaaaccccaacgaatccgacatcggaaagcaaaaagctacgatttagttacatgacgaagtcgctcaacaaagaaggttcttcgtctcctccaacggtcgaacagaggttcataagaccggttccgccggaaaacctttacaacggcgtcgtttttgaggaaggaacgatggttgatgctgattacaaacacagatggagaaccggcgttgtgataaataaaatggagaacgacagctatttggttctcttcgattgtccaccagacattattcagttcgagacaaagcatttgcgagcacatcttgactggacgggttcggaatgggtccaaccagaagtcagggaactgagtaagtccatgtttagccctgggacattagttgaagtaagttgtgtaatagataaagttgaagtttcctgggttacggcaatgatagttaaggagattgaggagagtggtgagaagaaatttatagtgaaggtatgcaataaacacttgagttgccgtgttgatgaggcaaaaccaaacatgacggttgattcatgctgtgttaggcctagaccgcctctttttttcgttgaagagtatgacttgcgtgattgtgtagaggtgtttcatggttcgagttggcgtcaaggggtggtgaagggagttcacattgagaaacagtacacggttactttagaggctaccaaggataagttggtcgtgaaacactcggatcttaggccttttaaggtgtgggaagatggggtttggcataacggaccacagcagaaacccgtaaaggaaagtccttccaacgccatcaaacagaagccaatgtgctcttcttctggtgctaggccaatgactcctaaaatggctacaaaacatgcgagaatatcttttaaccctgaggaaaatgtcgaggaactctctgtagctgaaactgttgctgccactggaaagttggaaaagatggggattggtctctgatgaatgacactactcctcctgtaataaccatagcagaagaatctgtttcatgtgtaacaccgttgaaacaaacagaggccaacgctgaaggaaacaaacttgagccgatgcggaatcagaattgcttgagaaatgattcaactcaacagatgttgcctgaggaggagaatagcaaagacgggagcacaaaaaggaagagagaagaaaaacacaactcagcttcttccgttatggatgaaattgatgggacttgtaatggttcagagtctgagattagtaatacaggtaaaagtatctgcaacaatgatgatgttgatgatcagccgctctctactgagctaccatattatcagagcttgagtgtggtgaacagttttgctgctgatgcagaggaaactccagcaaagagtgcacgaactatttctccttttgcaaagaagttaccgttttggaaaagctatgaaacagatgaattgtacaaatcattaccacaaagtcctcatttcagcccgttgttcaaggctaaagaagatatccgcgaatggtccgcggttggtatgatggtgactttctattgtttattaaaggaagtcaaagatctgcagctcgatgattcctcaagcaaactaagtagcctcagtagttctttggcggagctcgagaagcacggtttcaacgttacagatccattgtcacggatcagcaaagtgttgcccctccaagataagcgagcaaagaaagcggaggaaagaaaatgtcttgagaagaagattgaatgtgaagagatcgaaaggaagaggtttgaagaagagtttgctgactttgaacgcataattattgagaagaagagacaagcattggttgccaaggagaagaaagaagcggctgacaaaaggattggtgaaatgaagacatgtgcagaaaccattgatcaagagatcaaagatgaggagcttgagtttcagacaactgtctcgactccatggtaataataagatttagagtagctccatggtaataagatttagagtagatgtatgttaaaacaattatctacgatctttatttccgtttgtttattgttgattatgcattgaaccatcttttgaagagattagaataatctaacaggtttatggatcatttaacgtcccttttactaaaaaatttcttaaaacattggctttgtcaaacaaccacaaaaagactgagaaaatccataagttaaataaagctagaaccacatataaatcccaatccaagttttggtctaaaagagtaggaaaccaatccatttatttttagcatttaagtaccctatatgtacaataacttcattcttcagtaccaaacaacttgttcggtctccttgtcaaagatgtcccatccatcttcaagaagatctctacaatcatctttctctttgttcatgaagaaagctgctgcttctgggaacttgttgttgtttgaggtttcagtcactccattcaatcgctcagaagggttctcgagcaccaagcttttcatagatgatccgcatgaactagtgaagcttgaggagatcgatttggttaaaggcactcggttttcaaatttttctttcaacagcttcacatcttgacagatcacagaaatttctcctctgcgcaaagaaccaagagaggttaaaaattccatttaatatggccgatcattatgaatatccgcagaaaaaatttgctaaatgattcattgctgttataaaaaatggaccaatgtacggttagtgggacgagaatgggacttactgtaaggtatcaacaatctgaccacgatccataagaaaatctcgaagctgcaggccgagaagacgaagaaaaaaagatatgagattgagaagaattttgagtttagaggaaactcatcgctagtgtttgttacagtgatagtaccttggaattttcctctgcctcctgctgtagaagcttcgattcttggaccactttctccatgttggcttcttgctcagcaagtgccttaagtgcagaatcttctttgtctttcttttctttctcagcagtctttttcaactccagtgctgctgctagtcttatttcgagacttcctcgcatctacaaagaaacacaattagacaaatctctgtacagtgtgaaacagaggtagacatctcagtttcgttttaacaggaggaaaaaaaaaaacaagtcttcataatcagcagacagaaacatgcctcatcaaggatagcaagagatttgtttctttcttctgataagttgagcaaccggttttcaagctcttttacttcagtggccaaaattgacttctctccatatacttctccagcatgctgcaaaatcatggtaaattagttctaattacaaaatcaagaacctaaagcaaaatgaattagcccattacaggtaacaatcttgttaccatgtcatttgcttccttcgcatgttccagcatcttcttgagctcctcaaccttttgaagagtatctaaacctcccctagcagcttcctcctttgacttctctgcatctttctcctttagttcaacttctctcattatatttgtaaccgtttccatctcagtaagcaagtttttctatatcattgcacaaaaagaaatacaagaatattgggttccttccaatctactaaaatgcagataagtaactagaagttgtagcattgggtccagcttttcggacctcggcaccagtggacacaacttaatgtacgtaaacaaaagcaaaatattttcacacgcttaaagaatgctaagattatgtgtcataccttattacttttggcatcttcaataatatcttcaagttgatcaacgctgcatacatgcgttgatgtgctaaaagcatcacctatttcagtatcaccattttcagagaacaaagaacgatttgaagtctcgtccacaagatttgtactcccatggccaacttcaaaacatgaaccttgctgtgtagttgtcatagtatccccaggagttgaatcgaccagcttcgatacagcattttctgcttgattccatgtgatatcaaaaccaagatcttcccaaaaattgctagccaatttaacattatctagggaaaagagagagacgactgaggcaatatcatcctctggcacatccaaaccaatttttgcattgctcgtaacatcaaaacacctaccaaataaatcatagtttccattctcttttccacgagcctttttcactgattgaatttcctcactttcaaggtctttatggcaaacatcaggatcaacatttggttgcaaggttgttagctcgttcatgtttgagaccaaatcagtacttagagcacgggtattgtggtcacgggtaacaaccaggggaagagtttctgaagaagaagaagaagaagaagtgctggcctttgagccagaagctccaagaaaagggcggcacctagaagcaacatcttccaaaccatgttctactgcatattaaacaagcattttctcaacacatgctctcagaaaatagaaaaataagaatactcaagctgtgaatgtataagccagagcaacaaacagctcacaaaatggttattttccaagggctataaagttgtaccttcgcgctctgaaatgcttccagatgacttgtacgaagattgagtaaaattatggaacaaatttgaggaaaaggaaggaataatctctgaaagaaccacagcagcagcttcatcagcatcctttgggtgttctattgcaacagccctcaaaattcgtgcatcaatctgcaatggaacataatactgtatataatgcggtttcaataagactacaaaagacagaaattctttaagaaaacacaaaagaacagatgattcagccaaaaaatatataaaaaaaatggtgtcaaaatgcattctgagcacaagcatggtggatactttcacaatttcactgctaaagttggagtaatcaaataagagatcagttttttacctgaggaaatatttccgttagagatcgataaacagaaccgaaacccatcagtgaaagttaataaactctgcagaaaaaaaaaacaagcaaaatattagttttgatgcaaagaagactagcatacaagaaattctctggaaataatttatcatataaactagtaaagccacatcacaagcctcttgtgaaaaccctaatgttaaaaaccctgaagaaaaaatccgtgatatgaaaatagatgagagagacacactctcatacaagtgcagaagacaaaagagcaatgatccgaaaagtacaaactcagtatcacctaatcaagctttctaaaattgtagaattgtaaaacctaatcaaaaaaaaaagaaaagagaaaagagatatacctagccgtcataatcatcaacggatcatgaaaagatcaaactataatttttagaaacgatcacaaatcatcaaaaaaatacacacgggaaaatcaagtttcaaattcgacgattcaattaccagaggaaaacgaagagaatagaacaaaagctttagaaaattttcgatttctgtgcaagtaagagatcagaagcgagagctgtgaggaagatgaggaggaggaggaacgatttgtaactaaagttttgctccgtctcttatgttaacgacttgaggactaagtcgtgctgtgggtggtatcgtaattttgttgcgtatccgagggtatttgggtcaagttgttgactttcactgacgtggctttctcggctaggtccatgcaacaaccaatgggcaagggacaaatattattttctttattggattttgtcgaactgggaaagtaccttaaattatgattggcttgttgtttattttatttacaaaaataatactgaattaattagtttttccaatatttttctggatgaagcaaatgaacgttatgcgtgtgaatctatttctcaacagatttatctaatttacgaaagaaacaaaaattacaaaaagagagattaattcaaaaatacacttaaccacatgtcaaatatcgccataaatatttcccaacagaattataaacaacaacacttaacagtaacacccttgtaaattggacttttgtccaaaaccataaaaccatttttgtttcacagataaatcaacctttggtgtagatggtgagatactaaaagtcattaatcattatagtgtacatgagaattcacaatcgaccacttcattctatgatcaatggttgatccatttgtttttcagccttcttcccaatcgacgtcgtcttcctcttcttcttcttcaccacccgaagcttctgcttccacattcaagtccaccttatagtttccattagctgcaagagtcgtaaaatgttaagttaccaaatcgagcatatcataatctttttacatcatataaccatgacagacctgtgtaatctaacttaattatgagcatgtcttaacaagtttcttcttgttgaagctctgcgatttcaatatatactactaaacaaggttccttttattctaactaactagtgtgtcgtttcatttgatcaacgagtatgcgaaatggaaatgaagtaaataaactcaaactgaccagtaacaggagccttttcttcccattctacttcttcttcatcttcgtcttcatcctcttcacgtttggccttcatactaacctgacgacctgagtatacagtacccgactgaatgccagaagttggttcaccagcggattcttgttgatttcgccttgcagcaagctcttgctgcttcataagttcggcgtagtaagctttgagatactcatcctgaagcaaaatgaaaatactgtatcaagattcttgaaacatatccagaagtacgaagctactgtgggagtctaaatagatataaaggatttgtccccaaaagcatgccttcaaatccttctcatctccatttccaatggctgatttcttgtcatctgaaagttttgctgctgctcctgccccaccatcaacctttgcttcctgtctcatctctcctctttgttcctcggtcagattcattccttccttgatcatccatggaggcaagactttcagactggagtctccacctttagatttaacatcttcgtttccatcacctaggttaacctcaacctaaccatgtaagatttaagaaatcaacaaaccacaatgaaggaggaaaagtgcagggaaaatttgcagatgtatatgcgcaatgaaaaaagctttaacatgaactgactggacaaacaaatggaaatttcattacaataccactgcctcatcttccattataacattgaacttctatatacattgaaaagtgtaactagtgatcacctttgtctctccgagaaatggcattggtgttgaaccatacccgccctgtgacctcaaaggatcattagggttaagatcaccattctcgcgagcagccatcgctgcacgggcctcccatgccagaaaagatccaaattcaggtattggtaggtcttttactctatttaactgatccatcagaggtttcatttgaacctgcatttcatactcaaattctctcaacgcacaaattatataactaaagccagaataaaagaaaacacaatcaagcatattgaaccactaaaacagtatacagatacctccaatttctgaagcatattttttaggttttcccgccgccgtctccttgcattatcatctccatcaactacttcttcggaagttagcttgttgcattccacaacaagttcaccattgcaattttcacaatgaaaagaatcgtctaccatagaaattaatctcagagcatccagcgcattatatctacatcagaaatgaaaatctattcaactttagtgaacataatacaactcatccatgtaaagattttataaacacataaagagtaatgggctttacttcctttggcagttaggacagccatactcctgaacagtattcttatcttctagctcatctttgagcctttttttcatccgatgcagtctaaaacgaacaacgtcacatatctgtaaaaaagaagaactgcaagtttaacaaagtataaggtagtttgatagaaaaaaaaggcaaaaaaacgcaaactgaagaaaaaaaagtagggacatgaagcgtgcctgtgcataatcgagacagcaatacgagtgggtgtgaagcttaactttgtcctctgctcggccatcagttgtagcagccactgcagcactatacatctttgcaccctttgcagtctattgaaaagatttgagaaatcaataaagcaacaaagtaaagaagtggtaattggtaaaggattagagataagcaaacacttgaaccaaaaaatgtagaacatgtggtgaaaaattgcaaccacaaggttcacaaaggaaaaaagaaacttagaggaatgaatgagcatcaaccaatgaacgcaaaacctggaaaatatatcattctctcacactcatgttcttcaatcattgtcatactctagatattttatgacagtatgctatttatcattagactaaaagagtggttgagttgaaagcttagcaagagggatattgcgcaataactgctatacaacaatctgaaagagcatagtatctgcaccgacctctttccggtggtcacgcataatcaacttttcttcttcaaagagtcttattatttttcgaagttgcttggcgtgcaactgcaaatcttttgccaagtcttcttctctaacccattgccgcctagcagacatacaacaaatgaatgaaagtcagtgaaaacacagaaggtttatataggcaatctaagcaataacaaccttaaaaagccaataatcaagtctcaaaagttaatcttatcattatccataaaccccaggtgacagggagatgtgagccagttactcaacaaacctcataatgcagtggttacaagaagttgtctggaaactattgtgacaacttaaaatattatcatcaatattcagctaatagactcttaaggataaaaattgaagagatgcacacaaaccttgccagcgcgtctagcaccacagcggcaatccctctgttgtcacttctagcagatttctgctgattatcgcttttcgtagtataatcatcatagaaagccctcgctacaagcctcaccaacctaaaaatcatagtgaagcaacatagaaaatgcaaaaacaattgttaagggcactatgtgaacatatacacgaagattctcgacaaaaagtatcgctatgtctgtgattgaatagaaacaaaaaagttctgtggtatagagatttacttgacaaatggctggagaacaacggctttctgcaccgggcctgatttttccatggagttaacaacccaaatacttacattaccagtcaaggaagcagtattaggttcgtgtttgatacaaaatctgcattgatacagagaataaactgaaaacagatcaatcaccgtataagtaactaacagagattagctgttcaaaaacttaaacacactaaaagtaaccaacggagatgatatttgctcaaaaatcatagaaacaacgaactcaatttcaaaacccagagccatcgatgagaagaattgactcccaaatccatctttcaaatcaaattagtaacaagagagagctcaggaaattcagaaaatcaagaataagggttcggaaactgtgagagtgcacaaggaccacgaaattagggtttataaggcagatcaatcgactcaattcgaagtaacaatcagacccgactgagctataggtgaagtttctacaagaatggagatatctaggttaatcaaaactatctacttttacaatcacttgtccaacaggaaaatcgacgaagcttaccggaaagttcaagagagggggagagaacacgacggagaggtctctgtgttgttttttctctgtctacccttttttgtgtttttatctgtttttggtgttaacatttaccaattaccgtatatagatcaacctcattttaattttcatttcaatttccataattgattttatttgtatctgtaattagcaaaaaatttgcttttattttagttgattataattgaattaataacaagattttggttggataaatgaactcaaatcatcaaatccattaacattccacggaagaaaaatattaccagagattggattgacccatatgcattgcttaaacgacatgccattcacttactcatggccatgggattggccttttgagaagttgcttactacattacgtgaatacttacttaatggatttggtatcgagctatagatgatatctctcgtttgggcattaaggagaaagatggaaatacattttgagtcatcggccacttttgtgctcatacttcatatcgttcaagctgatgaaatcggtatgtaccattttattggttttgaaagaaacaaaactcttttcttctcttttttttgttcattatttcaactttatatatagacacacacaaacatacaacaaagtaagtgctactgaaccttaaacctttttaactactatctatctgattctgctaaaagaggctctgtgatttttgttgtgtaattctttgtacctcgtgcttctttcccaactagcttcttcaccgtttgtcctaccttgctttgaatctcctgtatcacacaaaataaccgttaacccctcacaagttttcaaatttattggttaagagatgccgaagatttgatcagccaatgttgcttgcttaccgctggtgaagcacgtgttatagatgatacagctgctgctgcagccgccgccacacgtaccctgaaataatagcaaaatatgatgcacttttactttttagtgagaaccttcctttggtaaacattagataagtgactcagaagtaataaataccactacaataccttttatgtacatcgatgtaaacatcagtttcatccacaatttctgcctgcattttcagtaaatcaccaaaggaaagctccgtaaagtgaaatgtatatagaaaaaaatatgcataaaagagagatttttgaggtcagaaaaggaaaaacgaaaagcataagatcgtacttgtagaagttcttcaaagacatcctctaaggtgatgatgccaatcacttctgcatcctcgttatcttccaacaaacacggtaagtctctcgtcacagtaccgttctgttggaagtttcttcccctatttttcacatgctttggtactttatcaatatcaacaactacatcatgggattcatgcttcaacaaaggagctgttaaattactactctggtaaaacttcatattttctttgggtgtttcgccattactcagtaactgcatgttattctttttatctttgtctttgactttgacaactgcagccatgtgactgcttcccttttgaaactcattgaggatatcatacaatggcatgtctgatggaaccctggaaaggcaatgtatgggaacttatacttctatctagaaacataatatgagtaggtcaacttatactcagggaagtcagatataccttgggatcttcctgatggaaacagagcttacaggtgcctctgtctctgctcgtacagttagaagactcttaacctagatgataccagcggatacagacgtatgtaatctagtaggatttagtaaaatgaagtaatgcaaaagtttgacaggtgtaccaatagaagcccaatgatatttttcggattccctaagtagaccgggattcggctatgaccccgtgacagtatttttccaattgtttccctgcatttaggaggtgaaaattcatgatttcaaaccatgcgttattactaagcagatagaccaaggaaaatagtttacttttcaaagacttgccagatagagaaaacaatttgtcgaaaaaaggccaactctaaccttaactcaccagtctaactttgtatttacatccagcgaaaatgttgattcaattggcgtcatagcctcctcagcagtctgaacttccagtaaacgaaagtatatgaattagatcattggaagtaatattgaagcagtatatgatatgttctgaactggaaggcgaaagaatcaaagtatatgcatcagttcaacaaagtaaactcatcctcgtgcaacaagttttcatggagaatctaaatccagatcaatggggaatagcaagtaaatcatttcatttacaacataacttgttcatcagcatgacctgtgtaggtttcagatacgcacatctaattcaaatacataccttctggctcaaatccagagctccgcttataatcattgtttcctcgtgtgtcagttcaccccccttaccagcctatgttggagagaaatagcatgtcaatgggagctggaaacaacaatacttttgataatcaagcaacgtaactaactacttcacaaatcagacaaggttacagcgtaatatctgtccttttcctattctggattcgccaggttagatcataaagggaaactacctcctggctgtgaattgagacaagggctttaagctgagctcgcctaaatagtgtgtcattatgcccaattacagcatcaagaacctgaggcatgtaaaacgttgataaaagtaaacatctacagctccataccactgtggcataataaatgtatcaacttgtgttgatgatataatcaatgcagttagctctaacaagtaccacttcttaaagacattgctagatttttcaacaaatttccaaatcttccatggttgtaacataacgttctgactattgtagcaactagtgaaacaaaaccatttattatgacatttagtgctctattaaagagtagtctacaacaacatcacctttccgatagggtaagcaatcggatagcagattatcatcaaaatgcgaaccaaccacaaaaagtttgcgccaacagcaagtccatatctagagcatatagcttgcggaattatctggttagaattgcaacaacatagtttgtatcagtcataactgaagagaacacaatttgataccaagaagatatgtaaagtaagttacctctccaaaagcaagaacaaaagtaactgagagtaaaacagccacaaaaggatggaatatcttatccaggcatataggaagagcctgagacaaaagatccaagaacaaaattcactgattctgaggtgcacaaagacagtaatttatcgttgtaaatcagaaaaactagggtaacaaatcaacaataattaacctccatagcagctgcattgcaaagaagtagagtcacaagaagttgatgctgcttctttaccactggtaagattgcagctgcaatatccaaaaacaattcaagtaactccgtcaagagtaaaaatagagactctatcactctgcttttaacaaaaattacagaataagaaattagaaatcaagttttaagaaattctatagccattacgaattgaacaagtcaggtatgtaattttgagccaacaacacacagatatcgaaagtcgaaaaaaattaaagaggcgtaccggcctgttttttctcggcggaggaaccactctgttggagaatctcgagctcaacgagaccaagggacattagtccgagtgtgagacccgacattattccggcgaagagtacgaggaaacacgcgacaccgacgacgacgaaccaccacggagaaccgaatcggatgtcctcggcttcaaagacgaaactgttgagcgagtaagcggctcttaccaacgccaaagtgctcagaacaaccattgccgcgcttcgatgagagacaaaatcaaacagagacggagctagagagagagagtgtgtgttttttttgttggtaaggaagaagacgacgatgaatacctttgatacggggatacatggaccacctgacacgtcagcatcctacatgcgttatttccttatttttctctctctttttttaactcatgcgtttttttgcgttattcttcttttaattgatttgttggattattgatgacttctgagttttgctaatcatcttatttattcagcgtccaccggttttaacgcccgagaacgatatacaccttacctgattacctctaatcacattattcttgagattatcgaaggtacatttggaccgctagcaaaaaaaaatatgtaaatacttatttttcaagttacaaagctaatgttattgacaaaagaaaaaggaaaaaaaaggatgaaatcttggaaagctacagcattttgttctgcccaacgcaaattgtaacactaaagatttcgtatggtcaacgtgaatgataatttaatcgtaaatattttcttaagtgtaaaccggtatttaaattcccttaattcatcggaaagattttggtataaaattgatttactttctttgggcttttgggggtcaaactatgagcctaataatggcccaaaaagacttggcggaaattactttttttttttatttgactagtgaaaccggaacgagcgagacgcaacagaatctgaagatcgaaggacagtgaaatcgaagaattgaagcacaagcttctccatctctgcaatctctctatccatctctcgtcatcgcatgtttcgcttcccaattcggaagaaagagagacgacgcgtctgaagcatatctccgtaatcggggtgaagaaaaacgcggcgagaagaagaggcagattttcgttttgggagggtagacaaatctggcgaaagtggagggcctaagggcgaggccgtggcttaagccaggagcttgtataaatggagatcaatatgactacgacggttcggaagacgaccattccaggccttggtggcgccgtcgtctcagatccttgtatatggcagccatgtcctttactccgtccacttttcgaatcgctatctcgttgctccttcttgttgctatcgtctccgccgtcatttttctcccggtcgaacaggcaatttctccctccctcctcattcgcgtgtagctttagtgataatgtagcaacgatagtttctgtatattctaagtttagaaattgatacaacggagtatttctggagctcgctagatcactagagaaactgtcctagatcaggcgaatggtactttatatatgatttagaatcatcattaatcatcattgttatgatccctttctgcagaaattgaaggacttcttgttatggattaaggaagatcttggaccttttggtccacttgcattgtaagtttttcatgtttgctactcatttttgtttctaccacttattggtttgttttggtgacactgttttctggctgccgtaaaaaatcttgtgatgagccttttttaccttattgaaatttttcagggctttggcttatattcctctcacaattgtggcggttcctgcttctgtactcacggtagttctggattcataactatgtagtgaaatttagggtgcttttctaagatgtttgtccaaagttttcattacaagataggatacttagacttttaatccggttctgatagtcttgattgtttctctctgcagctaggtggtggttacctttttggcctgccagtaggatttgtagccgactctcttggagctacattaggtgcaacagcggcatttctgcttggtagaacggtatgtctcttatggttccatctgttttaatatatttcgcttgcaattgtgttgcttgccataaccacagaagtactgattcctgttttgtgcgtcctcacatctaggcattttatctaagtgttgcatcttggctgtctcattgttgctaatgatatatcttttgtctttctggtatcatgcagattggtaaatcttatgtcacttcaaaaataaagcattacccaaagtttcaagctgtttccgttgcaattcaaaaatctggcttcaaggcatgaaaatctagtaacactctctataataattgacagtttgttttccttcagagatctactatgcgtatggcaaagtacctcaatttcctggctacatttaattgattgactactaactaaatgatgatattttcttcctgtgcagatagtcttgctgctacgcgttgtccccatactgcccttcaatatgttgaattacctcctatctgtaactcctgttcgcttaggggaatacatgctggccacttggttgggaatgatggtactgacatttctttaaaatccgcttgtatattggccatttatactttaataatggtggaagaagttagcatgcatgttaaagtgctgattgctaacattatacataatagtaattctaatcttctgaattgttttgatgtagcagcccattacatttgcgctagtatatgttggaactactctgaaagatctttctgatattacacatggatggcatgaggtgtcagtatttcgttgggtaagttttcgctcatttacttccacttgactagtagattggaaatgattgtagatgagcttgaatgaagtcagaagaatgaagatagttttgtgtttctgctgtaatgcataattacttatcacttatcatttatactgagattactaggtttagaagtttgtagtattagaaaaataacaacttgtctgaaatgaagtttgaagtatgccttattttatgaggtttattggaaacatcttggtgtatatccctcaatataatgtagagttgcttattttccataatatgatagacatttctgggatctgaaatattgagaatgtagcttaaaaatcctgaggatgaggatttataaccaagtccaaagcatcctatgtgtagggaagaacattgtgatagtctcgcatctgcatttatttagttggtattttgtagctttgattgaagtatctgagtgcccttgcattgtaagtctgatttctcgtttcttctgcattgtcatttgtggatgcaggtaattatgatggttggcgtagctctagctggtaagtctcttctgcagtcatgtccaaatatatatctagctagcttcactacattgtgagaagtggaatgacaccatgtggtctgtgttttaacccgtctttttttgggtttttgaatgatgtgggtgcagtaattctgataatatgcataacaagagtggcgaaatcatccttggacaaagcattggctgagaatggtactgaattagatgggaagaagaatgacgacgcttccgtactcccgatcgcagagccaccaccggatctacaagagcctctcgttatcagaatcgacccatccaatacttgaataatatagacaagaagaaacctcttgagtttgtaaatttcgcgaaattttcttaccgagtgagttattagaaacgttttgtatagcatcataataccatacttcacagtttaattcgtttgttctttagttgattattttggtatatacttgaggttttgaaatcttgtaacttgtaagaatgcccaaccggtggctacaataattaaccggaaattaatttgactcgagtccttatcagaccggttgaatcggtcgagtcaggtcgggttagaaaatatcaatattcgggcatattccttggccttcatacgtgtgcgtctgccattttttttctaaactccgaatcccaaaattgttgccttccttcgtctccgatcattttcgtggtgtctgtaaccccaattacaattcgaatccattagcgaaagaaagagacttcctttgaaagagaagagtctcgttggctcggttttctgttcaaatcagcggatttcctcacatttaattgttcaatcatggcggctaccaatgtcatgcggcgagacgagagccttcttattgatccccaaagaggtaattcgaagttcatttttgataggcccgtgtttagagaaatttatgtacaggggaattagggtttctgataacagaaattcttttttttttcgtttcctgggaatgaatttcttagggtttcacttgcaggagatacaagtgtttctcgtggcctctcgcttgagaagaaaattgaggcccttgagagcctggccggacaagtgagtgcctttttcactcttgtttgattttcttcattacattttctgggaaatgttgtctatcgtatcggacagccaaaattgtgattctgttagtcagtttttttctgattaatacttgagatgtgattttcctgtatttcttcatctaaaggttgcttatttaagacaatgagattgattttacttgagatgaataattgaggttgatatacttgtagctaatgagtttttttttgctaatgcaggttagtaacaggcgatctcggagatggttaaatgatcgtattctgatggaacttgttcctcgtttggatgcccaagaaatcagaggcttgtttgctccaccaccgtggggtaatatgacattccattcaaagttttactcttcttgtataatctcaaattgagtttttttgccatgttttcgtctttttgctattgttaacatataacatcgtttcactgagtccacaaatgttctacaggtgatgatgtcccaccctcagcattttctttgactaatgttggagaatgggacaaatttagaaacatagacatggacaaggaggtaacttacatgtcttttgggactgtttctcagagaagaagtgcacgttactatatttctctgaatataatttgtttgtagaatcagtgatgtcatttgtttgacatacttggtcttaactattgttaggaattgtgtttttttcaggccaacatcatggattccttgaataggtcatccgtaaggcagaaaggtagcgtggacggtgataaaatcgctgtcttaaatgcttggagaagaatagattgtaggacaagagatgctcttcgacgtagctttttaccagaactaatcgagggatatgaggtatagattcttcagatatgacaatgtaagtcatacatgtaaatatagaccctttgcttctagaattcagaatcgtttattatttccacagagctgtataagtcacttcatcgaggaaggtggtgaaggagatgttcttgagctcaaggttcaagacccattccatagattgcttttacacggtgtttgtgaggtatgagccacgacatcacttgcgctattttctgctaagatgttgaatgaagatatagagagtaacaacctaaaagaaactgttttctttggagcagtatcacaatttggtatcaacaactgcaacagaacagataggaaggatagcaatgaagacaacgagcatcaaatggaagaagagtggcgattcaggggagaaaccaagcatcagcctagcgcatttccttaggatgtcaaaggaaggagcttggtaacaacacatacactcctttgtagctgtggttttttatgaatatcagcgccaatttaaagggctatttatgcagcaaaaagatctcaagactctctctctctctctttggcctttgctacttccccctatgtggcctcttgtaagcttgtatttgtatcctcaatttatacggttttatgattaaagaacgagatagacaataaattttattgagtgctgattgtgaattttgaatctttaaagttatatttttgttattaacttgtcgaggcctttgagttacaaagcccaacagttggagttccagctcagccactaggcgttattacgttaacgaaatttccaacggtcaaaaatagtgtttccttttttcgatggggatatttatgtaatttcggctctctcggccgagttttccttttctgcaatggggtatttaggtaatttcgactctctcacagccaagttttcctttttctctaggttttatgttgggtttctgattcaacgtacataaaattgtttataagtataactccagcatcagagatccattcgatagcgacttctctctctctcttttctgatatcagaaaaactttctttgttttctctcttccttttctcatatagaaaaacgttcagagattcattcgatagcactacctatattagtcgtgaattttacagtgtttgattcatgaaacaaaagatacggtcgatttttgttttttggggatgacgatcagaagcaaaaaaagcaaaggctatcgtcaagagatcaaatcaacttgcgcggactccaacactttgttctcaaaaggtattttttttccttatctctgtttctgtttttttttgtttttttatctacgtcttgttggaattttcggccaaatcaacgtcttttttatatggtttgttaatctttagtatctaattattctggttgatcgcaaaaacaaagaattctcatgttcaaagtggttttcttcaaatccaatttgaattttaggtcttatattatttccctctaaccctaatcatatatttctcaaagtttttgatttttattcaagattccttctaatcaattatttcttctttgtatgtagatgtggttgcaacttcggagcttttttcatctgtgatatcgtagcgtgtgaaagacggataattctacagagacaatgtatcatcccattcggtcaggttaattttcatccctaccttgtttataatctataatcttatagataggttaattacaaaaaaggtttttatacttttgatttttcaaaacaaaatatatttctcaaaaaaaaaatttttaatggttttcaactctctcttttgttttttttttctataatattaaattaatatgacattgtgaaatctaaccggattttggatcccgccatttaaccgtggtcattagcgattccacaaatccaacatgtttttcacatcttcatatatatttagtttagtatttttttactttcttttcttaataagtattcaactcttgctttttggatttttttttaaaaacgttttataagtactaaattaatattacgttgtgaaatctaaccggattttggatctcgccatttaatcgtggtcattagcgattctacaaatccaacatgtttttcacatcttcatatatatttagcttaatattttttttactttcttttcttaaaaggttttcacctctttcttttttgattattttttaaaaaaagttctacaagtactaaattaatacaacgttgtgaaatataaccggattttggatcccgccatttaaccgtggtcattagcgattccacaaatccaacatgtttttcacatcttcatgtatatacatcttttaaaacaaactgaacttagtcaaaaaaatttcttctaattagtgtcaaaaagtttaacatgattttatatatttcaccgtagtataaattaagatttagctaaatttaaatttttaaaatcaaatactcactcattacataattattcagatcaagtgataaaaatgcttagaaatgattccattggctcctgatcaaattaaacataatacaatacatttatttagtgttactgaaacacatttattttggagaaagtgcatcaactaaatttaatcaagcagtggaagtgaaattaaagttggcgcagttagtttgacggcccaataacgtggaactaaacccaaatttgttactcgccaaatcaaattcgatcaaattatcctccaactggaaccctccgatcaccacagaggctcctgggttgactcctccgtcaacgaaacccaaacagatgacgtcatcactgacactcaccatcgagttagctccaaagattctccaaacgacgtctttgctatgaagcacgagctgaatctccggtacggcgtatcctaggcgcgtgacgccaacgttcttcgtgctgaaacacgcgccgaacggtttcaccgacgctactctcttgatgctcctcgccgctgcttgtctaataaactccgacgtaaaagctttgtagatcgatgactccaacaccgtgtaaggattgacggagctgattttggttcctcctattccagtacttgcgtttatcttcaaaagcgttggatcgattggaagtgttttctcgacgatcttaatcgccgtcacgccgataaaatactccggcgacttctcgccttttgaaaactcaaaaacagtggtccctggattgatgagaagcggtgtcttttgaagccttgagatctggatcccggggaggaaaacgtaaggtccgttgccgaagaaggcgacgcctctaccggaagtaagacacacggcgaatttgcggttgaagctaaacgcggcggcgaactgcaacggtaagccgatgttgtgacgtcccattccagccataccaacggctcctttagcgagtcctttaagaagagacgttgatccgcaactgaatattagattggggattttaacgaaccgacccggattggatccgttagtggactggatagacacaacgtctaaagcaaattcgcccgaggttgcccatccggtgatggagttatctggaaaagcgccgcaagtgttgttactacagccaggtctcggaggagagaagcatgtgccgcaggcgatggagccggcgcgtgagcagacagcggagttgcagcgaggagagcggtaagtggtggagacgtagccttggtcacagtcgacccagaattctcgaccaccgaggtcgaatacgacggaagcggggacgagaggtgtgcgttggttgatgacggttgtgtactggagggtagatgggtcttttgttactgggagaaggagagctttggggcggaaagatggttgggcagatgatgagagtgagaagatggagagaagaagaacggagaagatgatgattcgagaagacgccattgttagagatgaatgaggaatgatgagttttatgaagaggattggtgtgtgtgtgagtgttattatttatagagaagattttgtgtctcggctaatttgaataattggataatggtgtaggacgtttttgactttcattttttatgtgaaagtgaaacaaatcaaatctagttgtttcctctttaaaagatagcattttcttctttttttggcaccggtctttgtttactgtgttttagtttttcttttgttggcatctgtctttgtttaattactatgattactgtgcactaagtttttttgcattcgtctttgttaaatgaaataaatttagttttagttttagttcaatatttgtaggtatttgaaataaaatacatgtttatggaaatttagattttggattgattaagaataatagtgtgtaacactgtaacttagagcaactccaaccttggttcttagataattcttaactaattcttatctattaaactgattaaatataatacaaacaacaaatcttagctaagatttatatcttaattaagatgttttcttaatattaagaagaggacatgtgttgtgtattgagtgggtatccaagttattttttaagaacccaatagttcttaatcattggagtagaaataaattaagttttttctaattttttttaactttgtaaaaacaacattttaatataaaataaggttaaaaatgaaaattaaaaaccaattgattctaaaccatcggagttgctcttattaattgatcattaatactctacaaaaatatgaagagaggaggataaaagaaatgccatgtgggcgtgggagtgcctttcttgactattcttctgtctttctcgattgcttccattatcactatttcagaatttgtcagtctcgattgaataatactatattgcttcatggagaagacagcctttcttccacatggtctaatatttcccttaaatgaagaagatatcacttcaagaatgccaagatattttgaggttggtgaatcgtctagacgtcctagttcacacttgaataataggaaccaaatgcacaagctacaagctgaagagagaggaggaattctgaatctgaagcttcctaaaaagagataattaattgttcctattacaggtttacttaagtttgattagttgaataaggattctaaaacagataaagttttttctggattctgttttagtgattgtcacgctcctttttgataatcttgtcttctttagttcttaagttacccttttgtttgtgtggcttcttccactcttacactgactctgttttggcttaaataaacatttttgtgacaaaaaaaatacactcgaaacataaacaaaagttgggataaacaattcaatgtcttttccgatattttataaaccggatgactaatgtgaaatgatttggacattatattatagatgatcatatagatataattttaatcctgcgctaaagtttaaagatttatcaaataaaattcactcgttacataatttattcaaatcagttgataacaaatgccaaataatgattccattggctctttattaatcacatcaaacataatataataaccactaaaaaacagttttaaaaaaagaaaacggatcaactaatttaatcaagcagtggaagtgaaattgaagttggcgcagttagtttgacggcccaataacgtggaactaaacccaaatttgttactcgccaaatcaaattcgatcaaattatcctccaactgaaaccctccaatcacaacagaggttcttgcgttgactcctccgtcaacgaaacccaaacagatgacgtcatcactgacactcaccatcgagttggctccaaatatcctccaaacgacgtctttgctatgaagcacaagctcaatctccggcacggcgtatcctaggcgcgtcacgccgacgttcttcgtgctgaaacacgcgccgaacggtttcaccgacgctactctcttgatgctcctcgccgctgcttgtttaacgaactccgacgtaaaagcattgtagatcgatgactccaacaccgtgtaaggattgacggagctgattttggttcctccgataccggtacttgcgttaatcttcaatagcgttggattgatcggaactgttttctcgacgatttgaatcgccgtcacgccgataaagtactctgaggatttctcaccttgtgaaaacgcagaagcagtgctgaccggattgatgagaaggggcgtcgtttggagacttgagatctggattccgggaaggaaaacgtaaggtccgttgccgaagaaggcgacgcctttaccggaagttagacagacggcgaatttacggtggaagctaaacgcggcggcgaattgcgacggtaaaccgatgttgtgacgtcccattcccgccataccaacggttcctttagcgagtcctttaagaagaaacgttgctccacaatcgaagatcaaatttgggattttaacgaccctgcccggattggatccgttagtggactggatagacacaacgtctaaagcaaattcgccggaagttgcggtaccggtaacggtgttatccggaatgccgccgcaagtgttgttactacagccaggtctcggaggggagaagcatgtgccgcagcttgtggagccggcacgtgagcagacggcggagttgcagcgaggagactggtaagtggaggagacgtagcctttgtcgcagtcgacccagagttctcgaccaccgaggtcgaagacgacggaagcggggacgagaggtgtgcgttggttgatgacggttgtgtactggagggtagattggtcttttgttactgggagaaggagagctttgggacggaaaggtgtttgagcagatgatgagagtgagaagatgaagagaagaagaacggagaagatgatcggagaaggcgccattgttagagatgacgatgttgagtttgaagaagaggattgagtgtatttatagacaaggttttgagatttgtttagtttttttgtcggctaattttgaataattggataatggtgtgtgacgttattttgactttcaaaattcatacgacactcttatggtttcgtgattttgcttctcatttatgtgaaaatgacacaaagcagatctagtttctttcattcttttgggttagagataaagttattgtcttactatataaataacatgttcgtttgtgtttataaatttagatttccgtatgaaatatatcaggtaatcttaatcaacttatgtaacttttatatgtaagggttgattaagaatgatagtgtgttactgttaagtaactcaattgatgaatgaatcgttcgtacgtgattaattaaaataaataaagaggtcattaaagagtgggtcatagaatacccaggtgggcgtgggggtgcctttcttgacttttcttcttttttgtttgttttctggattgctttcatttaattaagaatttgtcagtctcgattgaatatattttttaccccgacacgtccgttgattccttcttttaacgatcatctttaatcttttttaatactaaagaaaatctttaatgtattgatatcatctctttatcaatatcgaaaaatccacggtttttgaatcctgtgttacccataccactctccttgaataagataaggggtcatgacagcatatataaaaaacttaaaaaaatacatactattatattcttttatcatcatttttcgaattactaatccagattataaaaatatatcggaatagacatggatttgtttatccgaatttttgtttatatgtttcatcccttattatttagactataatgttgaaatactagtagaaaccattaggataactatattttttggtcattattattcatatgaaatgaacagaattaacattatttaagatacttaaagataaagcggtagtatattttattgattggtgtagaaggggtaatatcatgtgaataaactgacaaatacatttacacggagcactgattttggggtcgcattaataaatggatataaaggtgaaaaacataaacacgttattagcttatatcgtagtcacatagactattatattttgttttttgtctcttatttaacagtcaaacaatcaacatccgtttggttaatttctaaacgttttcaagataagcgtctcagatggaagaaacaagtggccggggttgttctcgaaatcgtggtcgaattttgcaattatgagatagttacaggcgttaaaataaatatctgataaatgaagcccatctacagaagaggctcatgaaaaagacccattatgatttaatatacaaaaaattacggcctatatcattacaaaagcccatgtttatccaatttcatcgctttgggttattttgtgatttgagttagtaatggggttttataactacatatataaaagttaggtcccttgatgttagattggcaatatagagaaaatttaaaacttaacatctatcctcatggttttttatggaggtcacgagaggaagtacctagaggatgccaagaagaaggaccgggtaacgacaaccagaatttttgggatgatatatgtttctttcgcttttataataatactatacagtaaaatctttataaattaatattcgataaattaataatttttataaattaataattttttttggtgcagagttgagaccaatataaaaattgatataaatcgataaactaataagataatatttttattgaaaatcttatataaatatatgctcccatcaatagtataaattaataattttataaatttactaatatatattataaatatcatatgtaaaatatggctgtactaattgttttcttcaatttttattaattttttatagtgttcaattctagtattttacaacataaaaaaaaattgtattgttttttaaatttaataattgctttttacttgtaattactattgattataaagaaaaaactacactttttatagaattttggtaagaatttacaaatttgtacaattttattagtttatcgataaattaatatctctctaaattaatcaatttttttggtctcaatactattaatttatagaggttttactgtactataaagtagcttttctttttatacaaaaatcttgatgggcgctagttaccggataactgctgagttttatcaaatagggtttattgaatcacaatcaataggctatttgttggatttcgaagtaggcatcatccatagtggtgagtcttatatatcaacgaactttttttgtttttgtttgcttacgttcttagagatatatatcaatcgatgtggttaacttgcctggtgaatgcaagaagagcaaatccgcaatctacgacattgtgatacacatccttgtgatagcctcgaatgttgcaacgttcatgtatgtgagaaactacagaatcctcatagctggagataaaatctatatgatcgagctcgtagttttctacttccttagaggcattttgggtgtgtttgaatgggtcgacatcttcaaatactttccggatatggagttcgcaggaggctttatgggtcgcattagccatatctttggtccgatatggacaacaagaaattaggtaacgttttcttttaaattttggattactcctcaagcgtgaaaatatgaaactatccgttacttaaaaaacgagtatttattaatggatacaattatatatatccgagaatatatggaatcttttattaatttcatcgtttacaagagcctgaattttcatcatagccaaaatcacactaagacataaccttccataacagtgactgctttgcctctcagtagaaccctctgcttctctttgtccaggtgcaccttcaacgttcctcctctgcttgaagcctaaacacattccaataataaccaaatctttcttcaggtaactttatacgaatcacttcagaatttgtcttttaagtgtctgcgtggagagaaagagagagagaacctggtaggcgaagaaatcacacttgttcatcctgaggctccagtaatgagctaaagcacaatgagcacttccagtaacagggtcctgaagagccacacagtaaaaagaaagcaaaagaggtcacgtttttgctgttttgaccactcgctcttaatcttctaagagcaaaagactaaatgataacctcattgattccgaatctcggggcaaagtagcgactacagaaatcataagtagatccatcagaagcagcggcagtcaccatcattccttcacaagggcatttcgatatctcatctaatcttggcttcaaatcaataacagcttcccaagatgaaagcacaacctgcaaaccattcgaaaagaatcgagattttggttcccatagcaagaataggaaaaatggagacagttggtgaaatatagttacgaggaggtctttctttgtggctttgacatcaagaatggtagctccattcaaggctttggagaacaaagagagatcatcatcaatgtagttgacttcatatgttggaacaacagggaaatccaattcgatacttgattcttctccatcatcatcatttttgagatgtttagctgttagaatccctgataatgtgtcgaactcaactgtctctgaaccaaccaaaccagttgagaagagaacgtgagcagatgctaaagttgcatgaccacacaaatccacctgcacaataacagcaaagcaaagagagattcacaagagccagtgaatgagtacaagttctagttatcaggatctatcaagtcaatgataacaagtcaaccgaacaattccgaattccaaaaccaaaagaaaacacggaaacctcagcgactggagtgaaccaacggagacggaagcgaggcaagtctccgatgatcggagtgaggaaacaagtctcggagatattgaactcggtggcaagagactgaagccacgcgtcgtctctctcgttatcgtcttctagaaagcaaacagcagctggattccctttgaaggcagattcagcgaatgcatcaacaatgaagtacttgactctctttttctccgccatttttgtttgactttattttcttctgcttgaatctctttattatcagtctcactcaaatttgaacaaatattaattgaataataataaaaaagcataataaagataaatgaaagactaatataaaacataccatgatctttaattaatcataagtgttttaggtgtttctagtcctatcacctatgtactaaaaaacgtgaatatccataatgatcaaaattcaaatcatataatcaaaacttctgctagttttttttttctttaaaatttttctttttagaattattactttaattagtaatataaaaatataatttcaaaacatttttttaaaaagaaaaacaagtgttcaaatttaaaattatgtgtaaaccatacacaaaatttaaaaatttaaaacttatccaaaaaaatctagtcttaatagtaatataaaaatataattttaaaatcatttttaataaaataaaataagggttacaaatttaacatctaaaccatattgaacctatgacacatcttaagggttaggatgttatgtccaatttgtttacacaaaatttaaaatgttaacacttatccaaaaaaaccttatagtttaatagcaatatatatatatatatatataattttaaaaataacttttagaaaaataaaaacaattgttaaaaatttaaattatatgtaaactatattgaaccgaggacatctcttaggagttttgatgttgcgtccaatttgtttaaatgaaatcaaaaaatttaacacttatccaaatatatacaatatgaatatataattttaaaatcgtataaaaataaatacattttttagtaattttaaataatttgtttttagtttactaaattatatgtaagctatattgaaccaaggacacttcttaggggtttggatgttgtgtcttatttgtttacaccaaaatctaaaaatttaacaatttattcgttaaatatacatgaagatgtgaaaacatgttggatttatggaatcactaatgaccacggttaaatggtaggatccaaaatccggttagatttcacaacgtcatattaatttagtatttataaaaccttaaaacaaaaaaaaagagttgaaaaccttttaagaaaagaaaataaaaaataaatgctaaatatatatgaaaatatgaaaaacatgttggatttgtggaatcgctaataaccacggttcaatggcgggatccaaaatccggttagatttcacgacatcatattaatttaatatttatataaccctttaaaaaaagagttgaatttttaaaaaaataaataaatgttaaatatacatgaagatgtgaaaaacatgttggatttgtgaaatcgctaatgaccaaggttaaatggcgggatccaaaatccggttagatttcacaacgtcatattaatttagtatttataaaactttaaaaaaaaaaaaaaaagagttgaaaactttttaagaaaaataaatgctaaatatacatgaagatgtgaaaaacttgttggatttgtggaatcgctaatgaccaaggttaaatggcgggatccaaaatccggttagatttcaaaatgtcatattaatttagtatttataaaaaaaaagaaaaataaaaaagagttgaaaacttttaaaaatcaaaactttgagaaatatattttgttttgaaaaatcaaaagtataaaaaccttttttgtaattaaactatctataagattatagattataaacaaaatagggatgaaaattgacctgaccgaatgggatgatgcattgtctctgtagaattatccgtctttcacacgctacgatatcacagatgaaaaaagctccgaagttgcaaccacatctacatacaaagaagaaataattgattagaaggaatcttgaataaaaatcaaaaactttgagaaatatatgattagggttagagctagggaaataatataagacctaaaattcaaattggattagacgaaacccactttaaacatgagaattctttgttttgcgatcaaccagaatacagtaattagataccatataaaaaaaagacgttatttggccaaaaattccaacaagacgaaaagtaccttttgagaacagagtgttggagtcggtgcaagttgatttgatctcttgacgatagcctttgcttttgcttctgatcttcatccccaaaaaaaaacaaaaatcgatcgtttgttttgttttatgaattaaacacagtaaaattgatgaaagagtagagtaaaattcacggttgatcagtgatctgggtagaagaaagagacgagagaaatagaaaaaacgaagaacggttttacgatgagagaaagagaggaaagtgctatcgaatggatctctgactctggatttgtatttataaacagtatttctgaacttctaatggaaacctacaaaaagaatgaaagctttattacggaggaacggaaaaaggaaacttggccgagagagacgaaaatacctaaataccccccttgggaaaaaggaaaatttggctcaagagaggaaattccctaaatagtcttcgggaaaaaggaaatctggtttctcgcacgttgaaaaattagcctgcgtaataacggctagtgggtgagctggaactccaactgttgggctttgcaagtgcccaatgggcttcgacagtttttgaggcggttattggagacaggtgattgggtcgtcgcactaactctgccaatttcaattccacttctactgcttggttaaatttatttaatcattctttaagattttttttttttagtggtatgtttgatagatttaacaaggagccgacgaagtatttcttgatctaaaatgatgtaatgagtgaatatgataatctagttatcttaacattaagcataaattttgctaatttcaatagatttaaaaccaaaacgaaacttttacgagccttaaatttcaattcgattcttgaaaatcatcaagaaaaagaacaaaatacctacagtgaaaatttttgctacaacaatttttgattgacctaaaccaaaaaataacaaacaaactgatttactaataagccatgtcttgcacaccagtctcagccatcttctccaaatcttcttgtgtcaacagagttttccttcccattgtacccgccttatcatacggttgagccattttccgaagaaactgcaaaaaaaacaaaaaccaggaaaattgttgattctttatgccttgttgtttgtttcactgtgagttataaaaaagcagcgagttataggtttacctctcgagcaatgtgaatagccatatcagtgcttagattcaagtgtgcatcacgcagatgcgaaagtatccaaccaggtagtttggaccgcttatcatgacggctgtatctgcaagttttaccatcaattgcagtgtattgttagaccatagaaatgtgacattataaaccaacataagcatatatctgtgtctctcttctgtcctacgaatattttcccattcctaaggaacagtgtgaactctgttacaatcttctattctcgaggtgatctcagatacttgcgcatatacttattatcatactagatagattatagagagaatcccatttagtaaaatagcaagaatctaaatgaccagactcagagagagaaaacttaaggcgggcatgtaccttttgtctgcaaatatcatcatcccataatcagcctttgaccggattactcgccctacacattgagctgcttgcctctgtgttaaagccaaaaagagttaacaacagtcacaaacaggtaaaagagttgcacaccaaaatctaataagatcataaaataagaatcataccaaggcatcaaaagttaggaaatcgccttcttttatttgaaatgtatcgtgcaaatactccaatcttgctcgtaatatcctgaaatttttcccgtttccatcttatcatctcccaagtacgatgaaatataaaagcagaaaaccggaaattgaaatgataaacattcatttgagtacaacttacttgcttaatgtatactggaatggtactccgtacattacaaccagtcttccataatgacgatcaaaatcgataccttcagcaactttccccctgcagttcaaatacaaaatttgatcactttctttgaaatttctcaaaagtgaaacctctttaatatttgttaaccaaccaagaataggagagaagagacaattccagtattataatacagaaacaaagaagcagaaccaaagacgcattgcaatgaattcccaaaccatctaccattcaaaaataaaaattttacctggccacagagaagaaaactgcacctcttccgcaatcgcaagccctgcgataattatccagtgccaatgttgtttctacaacatcttgtgtttcaatgaaaacaagcttctgttgcattatttcctacaaacattaagagaattggtaatatcagtaaacaaatatacattaatgcctgaagcaactaaaaatattttgaggtatcataaaaattccaattcatgcaaaactctgaaaaaattactggcatggtaaagcgatgaagaagaccttaccttcagaattccagtttcattccatgtagcaataatgccatccatatatgagtaactaacaaagaagcagacaactccatcaggaacaatagataccatctctaccaaaagctttccgtaattcctcacaacaccaggatcacttctcatgtcaaatttggtgctaacaggaagctgatcactgaaaaagaaaacaaccaataatgtcaagacatataaaattaaaaaataagttaagtgttcaggattctttttatataccacataccttccccgagttagaaccatagggcagatgcagtctcgtgtcattgacatcttaaagcttcgactaacaacaggagtgaaattaagaagacgggggtaaagatcaattgggctcaatgtgcctgatgtaatcacgactgactggaaacgatcaaacaccggtttgatcgccagagacgcatcatgacagctcaactaagatacaaaaggatatatgtttcagatacaattctcaattattcaaacggtagcatttacgtgtgagtcataatcccttaaaatcccagtgacaatactcaaaagaaagtaggtcaacaccatatttacctgcaatataggatctggaatatggggcattctctcgtcataaggctcgatgatgatggaaaatccccgggcatatgtcccaacaagagttgcaaagtcgcacactgtctggataggcaaaaactcatctgtatctgtaatttcaagggttagcatgagagactggagccggtcataacagaacttcagtgttttctgctcaattccagcctgagaattcagtgacgatacaaagctaacagggctttctttctctacattctcagtgtccagccgtacccccaagtactgaagtaatcggcgtaaaacatgcacaaaatgctcagcccgtctaatattccccgggacagcctcctttagaatatcatgaggcagtgcagggtttgcaagccattgatcacctcctgcaaaaaaaaaattgttgcgtcaagttcatagaattagaaaatttactgtgtgctttcaatcaaatcacagatcaccttcctgaacacatacttaccagataagtcccctctcagtgctaaaccctcaaccagccggttgtattcagctcgcaatcttcctgcatcagtagccttgaaccttcctaccagttggacaatttcaataatgtaataagaacttaaaaataagcatcagcaaataaccaggtcacttcctgtattgaaccaagaaaattatgcttcatgtgtttaagatgatgacaaaagcgtttgtaaatttttgttccccttacagttctttgacaaaaagcagtctcataaaaccagattattttcttactaacttaaacttccttaagaaaaccaacaattagcaactggagtgagcagacacccagatggcattcaagaacaatcaggaaattcaattgaaaaagaaaagaccctatcactgtgtttattgttgtattaagagtggcacgttcaagagaacttaaggagtatcagctatataggaaaaaattagcgtacctatcaatttcttgccttatcttattaagatttcgattagctccttcaagtgtaaccctcctcacactgacgctgagtgcttcaatacacacgttatcgatattatgggcctcgtcaaacactacaactgactctttttgtaactcctttgatatgaacccagcaaccttaggatccagtaggtattggtagctgtaaacaataacgttggcgaactgaatcatatgcctcgcgagaaagtaagggcaccatccacgattcttaccaaacgcccttagatcctaaaaatcgaaacacacatataccatcaggcaaaatgtgcaagtaacctcgaaataagcattccaactaaaacataaacttgatcaaacaacaaatgtgaaaaaccttaacttttttaatcttacctctaaagtataaacaccaggaggcaacaacgcattctcagcagccttttcatagttctcaaagaagtcacagagttctacatttggattctccgtggacaaagccctaacccagctagcagttcgtttcctacaggccgcatcaacagaatcacgattctcggctgctaaaaccttagtattaacgcaaagattcttccgagaggaaagaccaagggcgaggatcttagcctgggtgccgagatggcgtacttggtagtcatgtagtagcttaagctcacctaacgttttctccatctcgtggacagtacgagtacagtaaacaagcttgatcggagaatcaggacgagagagtcgatagctggtgattagagagagaagagcaatggttttaccagttccggtaggcatctcgagaagacaatgtcccttagcgtctagggctcgcttcaattcaaccatgtattcatattgttctggatatatgttgtcataagggaagtagacagttacgtcttcgattttaaagatcatcttcttcctcctacctagaaatcgaaattggcattagaactaacaaaaccctaaaaaactcgaattcactttagcaaaacaagcgattcaagttggagtagataaacccgaacaacgagaaagaaggaacaattgagatcaagcgaagagaagataacaggagaaaacttacaggtgataatggaagcttcgatgtgttatcaacgactgagagaggaaccggtagcagcttcaaggtagaagaagaagaagaagaagaagaagaagaaaattttgcgtctgtgtttgccgaagtaaccagagcaaacagaagaggaggactcttattagaaaaacttaaagctttgtttctttttcattctgaccccctatttatttattttaatgcgtttgaccccctaactttatgtatattaaacttctcgacaaaattaggtttttaaatgttaacaattcgtccaaaaatataaaatagttgaacaatcctgattttgttaaaacaacagagtattagagtatgcagtagtagtagtacaatgtcatctcaagatttggaattgtttcaacaatgctggtttttttctaaaatttgcaacagggtttagttacaacaatagagagatacaaacaaactctaaagtcttattcttcaactggttgatggaaagctaatccctttatcacatgtcgacattgatacctgcaatgacacagtaaggcatggtcaagaacttgtttagtgtgtaactggagaattgtgaataagagaagtaccatattagatcatttgtgggaggagaatttgttgcattgtcttgcgttctgcacttgaatctcaactttgaaggcacaaactgcaataataaaagatgtttgcaggtgacggaaaatcggaatgttgtacatggatgtgtgaaatagaattagcagagaagtgtatacctttctgttgtatctgaagtcacgtttaggaaggaaatgttgtggaagattcaaagtaggtggagcatgaaccaatatgaagagcctcattggacctgcaactcagaagaagggaaaaaaatcattacaccataattcacaacaatgctaaagaagtttgcaatttatgcaaaagttacctgggtaggaagttgatccagcacccgtcgagatcagtgctcggatagtctgtaaagccaagagtgaagggctcaaccatttttgacttatcacagcagataaaattgaaaagagacaaatcacaagcaacatgaaaacagaggtaagaaaaagaataaaccttttttgaaagtgcttctgcagctttggatttagcaaagtcaccttcgtagcctagaacatggtctctgcgttgtgtgaataacaactcataagcattttgaggccgtaatggactaccaccaagaatcaacacaactttctgaatgccaggagcttcacggatcattaactgcagcgcacttcggagactagagatggttttcatcagtttctccagtttcttaatctcattcttcacctctctctttctactcatcagttttcttctaaccagtggtttcacttgaggttctgcaagattcgtctcctacaacctaagattcttagagtgtgaaaaagaccttagaccttaaagtgaaaatggcgtctgtaggactaacataccaaatccataaattcagtttgcaatccttcaaattcaaggctcatgtcttgtaataccctgcacagatgtaaataaccaacaacagtcatattggtagaaggagctttgtgtagccaaaaccaaagctgcaaattgaagtttctggttttcagtaaaacactcatagtggatacaacagacttaattctaaaaccaaaaggaagtagtgtgcacaattgcgtagagcttttcaatttctcctagaattgaacataactcacctaccaggaattaatcactaatccatccagaatccataaattcataaccacgaaactatttttcttctgataaattcgtaaccaacagactaatcggagaaattaacggagagattgaagaacaaacaaatagatacatcatcaccagatcgaaggatacatcgaagcatagagatacgaagataggaagagataacatacgaagggatctgctggtgcatatagaggacgaatccgactatgtcattgatgatatggaagacgccggagccgcctaatgaagaagcggtggtcgcgatgtctacgtcgtagttctcctctgtagttccttccccttccgccatttccatcgtgaatcgaaaattggaaaccttgtgactgtatgtatgtgttgctgaagaaatttgaaaaaaagtcagtaggcgggtgagagaagacgaagaagagaaaaacagatccttccagagaagaaaatcacccaacaaaagtggaaactagaaacgatgcaaatgacaaattaacccgatagaaactgagaataacaaatcaacccctatactttattaatttcaaaagctaagctttgatttattaccaaagtaccctgaagttggaccaataagcggtggcgagtggttgggccgtatagaggggactaaaatgccttccttcacgttatttgagaatcataattggatccagcttcggcccaattttctactttataacattttccacaatttgatatatatcatcgcgcgtataatcgtgctatttttatcaaataacttagtaacgaatagtttgacaaaaaaaatatagttcatgaccatattgtatgttatttttcattacacgtgtacttccactaattaaaaacaaaaaataaagttacctaatgataaaacataagattatttggtataaaaccctctcattttttttatgtttcatatctctcggattccgttcaaattagtttcattccattaaggaaacataactaaaactgttacaacatcttgttgtatgcgatgagctgatgaccaatttcatcatatattagtcgaaacattataacgtagtaaactataatgaatgcacatatttaaccatacaaaattattgtagcggctttgtttttgttgccaaaattgatatggtggttaccaatataaactagtgattgttcggtttaagagatcaggttaccaaaaaagaaggtcatcaaaactcaaaatagaaactgcgcaaacaaaaatacgtttgattattaaaaagaatgattgagatatcacagaaatgggtgccgcatgagatagtggccaataataagcatcaagtggcacatagaaccatggaaatagagttctctctcgatattcgtttgcagagaaacaaaggacactttaatatatttacacacttttggggttttagattggacattactcataggttgtctaattctcattggtggacatttatatactttgcaaaatttatatgttgggatgttcattatgtacggacactgagactaatttcttcgtccatgtcggggaatatatgcagaatacatacacctcgaaacagtttctgtgagtttataacatttaacaccagagttttggatcttgactcatagtctcgttataaccggtcaagtaactaactcctaatgaaccaaaaaaaaaaccgtaatgaaaaggcatccgattctcgaaagataatatatgtattggatgaattccaaattactctaaaatttacgaaagagacgaatatgctagaaacatttgaaatggccaaccataattagactcgaaaccaagggaactagaaccatgctttttatctttaaaggtagacattcaacaactaaaccaccatgaattaatttagatttttctttttctttttttttagaattatccaatattatatgagactataatgaaaatgctcatgttttatgtttcatttaccaattattctataaccaaaaacttgaaacaaacgattgatgctggcaaaacaacatgcatatcgattctcagttgatggatgcacgcataaaattacttcaaattttatatgatatatacctaccggttctatgtgtttattgtgtataagcaaaatctaatattatatcgaccaatgagacaacaagtaaacaataacgttcgaaatattaaaaatttataataaaaaaaagaaagtaaaatgattaatgaggtcatgcactttggtatgataacgcaaaaagaaagttaggagaaaaaaagtaagagagtctcttcacaattcgtacaaggaaaatccagaaacagaatctaaatgaaagagcaaaaggcaaaattaaaaaaaaaaaatggtgggagttaaaaggagaagtgagcagattttgcatgtgatggtcatgtgggcgtgtgggaacaatctttcctaatgttcatgtggccgttgtacgtaccacatattcatttttcgcacgtaattaaaaaaaaaaaaacatttacgtaagtcatttcaactatatttaataatttatagtgtgttagaaattactggtatagaattaaatcatactgaacagaaatttttatttggtatttagtgtaagttcattataagattttaaaaatgtaatttaaaatataaatcatcatctggtgacctaaataaatactccaagatatcattatctttgatataatatatgaatattagttcatttcgaatcatttaattcatatgcaactgctactattgatgctcctaattaaatattaactcctgctactactactgatgttgtctacgtacaggtcttcctaattacattgataataattggtctgtccaagtattttgtaagacctcatttttaagtttgtatatcgatacacagagaacatgagtggaatgaaatgaaccgctcagaaattttctaactagaaaatatatcttgtcaaacaatgataataatcagtcggaaatctatacacagagaaaatgagtgggaaaactgaaaagagttgtgtatgggaaaatcattcgaggaagcttcctaaaggacattttcggattcttttcttcttcttcacgtacaaaaagaagataaatagtaccactacattattattcagttattggttgttatgatgattatttataaaatctgactataataattatgattataataagtccatttaacattaatacatttaatagaactataaaacattactagtctcctcaagaaatcgtactaaaaatagaaaagacaagataacatatagacatattatacagataaactaaaataaaacccacattaattagccgaattaagtttaagtagcgacccaaaactgctgctgcttccaagtgagcattggtttaggctcacgaccattctccttgcatcttctgctgaatctgctaaactttttatttccacttttaccctccaagttctcactagtttcctcgtcgatgccctcctctgtttcttcttcttcctcctcctcgtgattgtgactaagaagagaactttccgacgttaaaatgagacgaagccttccttcaccacgttctgatacaaagcaactaggcggagacgaaaccctaattgcttgaactacaattcgaccatcttctcctaaccatctcaccatacgattatactttgagtcttcaacgaactttatcggcggtgggaaactgttgttgcgactcatcggcggtgtcttgtccggcaagttagtatcttcttgaggtttcagttgacgaggaggagccctaggagtagtggttgcttcaaacgcaagcaatgacaactcgtcaccactctcgcttcctgtttcggttccgagactctcagtgcacatctccaagcttttctcgttcagtttagaaacagagcgtttctccatcgggtgaacataagctttatcctctttggtttgggcaatggaagtgatatcggacatagattgtaggaaactcaacccacccatgtcatctttttgatagaaactctcgtttatttgaggttgacaaacaacaagtgacatttttctatgttctttagaaaaatagcaaaacaaagaatctgaaggagggtttgtgattgttgttgtcttgctgagatctttcagtttttctcgttagttttttttttataacaaaaaaaaatgggaacgaatgagagagattggatgttagttaagaagagaggaatgaatgtgaaagggaagagggaggggtgagcaagtatttatagtggcgagtccacttggcattggattctttatattattcgacaccttttattgcatgaatatataataaaatcttataatccctattaatatggaaccattttaactggcaccagatcatccaaattttggtagtttttctctagtgaaaaactttaaatatatgaaaatagttttgttgtctacaagttacacaaattacggttcaacctagataataacacaagagcatattaatacaaactactaaactatatgttttagattttcatatgtctaactgataaacttgtttcatttgtcaaatttcatacataaacctttcagcgcgccactaataaaccattggtactcttgctttaattttgtataatctttatgttttgtctcggatattatcagtgtcggaaatggaaggatgaaattataagtttgtgttgttgttgttgttgttgtgtgttgcccaaaacaaaaaaaaggtgttgatgttgctgtgttgttgtgtcgtgtcaacaactatttaaaaagttcgtagcaaaaagcttaaagaagacaacaaaacagaaagatgatacttaaacatagaatttagacattttaaacattctcaatagccccttaaacgcatattcgacctatagcactatggagaaaatggctttaatttgtcatgacatttaattgcctaaagatctatgaatttgcatcattattttattcaggaagtaggattgagataaaggtgtagcatcaactaaccccggttattctcaccacaagtgacatcgtttaaaagcataatttttgtaacatgttactagacacataatttgtatagctattattcaaaattctgctaactattatagtttggctgtaatttttgtacaaccgaccaaattgattcgtaaatttcatgaaaagtatcctactgaagaggctcacgtaacctatagtcactctcacttgagtgattttgttttaaattttttggtctcttcctcaagttgtggctgtaacttatattgtgaaatatctctgcctacaagatttgattcattcctttgcattcgtgtaagttagtatttttatagaaaatacatattttcaggtaactgcttatttccagcattaaacccgtatttaaaacacccaataataagatagttcatatgcttttttttaaggaattaaaacgatttggagatgaactatattattatggaccagccactatttgctgatattaataataagatagttctctcttttttttttgtttaattaacaataataagaagaataataatatagtatcgaaagaccagccactatttgctgatattaatctttcaaacaaaatacggatgatagaaatttattatccgttcagatcagatcaaatactggatatatctagctatacccgtaacccagcaatttttgtccgttaaaagacaaaaaaaaaaaaaaaaaaagtgaaagaccaaaatgcccttattgatgaaagtttccaacactgataataattgaaggcaaagaaatcacaaagacagagagtttccaagtccaccacactttcacgggacctaagttacactaccaacttgcaactgattgcaaactgatatgacccataaataatattaaataaaaaggtatttgcttctgtatggaaattgataagagtaagtgcagaatcaaacgaaaacagtaacatgcttaccaatcaatactagaatggccaaatgaccccaaatcagtttcatgtccaaatccttgagattgtgtttcttatattgcagcatctcaagatcatattgacagtttcctaatacttgttggtacattgaaaccagattcaaagaaaaaagaagtacaacatacgaagaaccgagctttcttcttatgattaatctacacctcaaattgtaatgaatgattaaaaacatgtatgccttgtaatagaaaacttatgggaatacgagcacgaattaatgctcgggttagagagtgactccttctatagtccataggttctcaaagaagtaacaaatgtagggtcagttaaggaacatagacaataagcatgtctcatactaacatagatgataagtagtgatgtctattacaattatttagttaatggaacagtacactaaaaagctacgggtagcaaaagaagtttccatttcaagtgagaaaaacttttcaaaacttcatgtgttgtgaaaacaaaagttttttggtaatgaaaactcgacaaagaccagttaaaaacgtgtgtagtataacttactggtaagtaaagctataagcaagaatctgtaccttattttctctctctctagtgagccctgaccatccgaatttcgcattcgccaatcgctgtgtttccgtgtgttttccccctttttggttttagatttgcctaaaccaatcagaacaagagaaacctggaaacaagaaccaaaaaaagtgggctttctctgcatcatcattccacttctggtccccaactgaaaaggacaatccaaagctagatcccttcaaattttcctttttgttttcgaaattttcgcaatttttaatattattttggaagtctatgtttctttctgatctttagcaacaaaggaaggtggaatctgtttcacgtttacacaaaaacatgtcaactggagattttctctttccctaacttttgaccatacagtatggtccatacttaatattctctctttgtttttaataaaataaaaggtttggttatcaagcatatatgtcattagcttaaagctatgactttgtttagaaaacttaggaggaccatatggcaagcttttatacagtgttagacttctaacgttaattctaaacaatctccagtatcaagcattaacaaggtttattctagcacctctggatttttaaaacttctcgaaccaatccttaactaaaaaagaaattcaagcgttttatctttagaaatcacagctagcatatgctgagaattactctccatggaaacttatactaagattgtttttttccctcatatttaagccactaaagtcaaaagattagtacattgacaactaagtttagatgctctatgcggagaatcaatttcatatgaatgtatcaagcaattcatgaactctaggagaccataaaatccaattgacagaaaaaatgagtcaactaacatatttacctgtgatatgaggtacatgtgcaggtcaaagatcagaagaaaattttctccatgagtctcttgagcttccaactcatccagcgatttgtatcacaaacaatctgaaaaagaagctaaaaaacgttataccaaagtttcacgcccataatgctattgtttggttctttcaagaacctccccaatcttttgaattcgcattcaaaaaaaccatcagtgagtccatttcaagtcggaactggcaggtattattcattatgacaaagtacatacacttgccccccactgaacaatgtcaagaagggaaaacccgacattgtgttggaatagctaaagtctcatctcgtctcgtgatacatgaaggttatcaatatcaacttgtagcaactgtaatttacttctaatatctgataattctttctggattcctaaaagacgatcaagtcttagctgagcttcttctcgataaggcttggcaacaatattcacaaagttaactagattactcgtcgcatctgaaagatctttttgcatagcgtcttcgagctgttgagccaacgcatcagccactttattcaccttaccaattatagcctgtcttcgatatgggaagtttgctatagccacatacctgtcacatagattatgttatgcatacaaccagtctttcttaaaagtcataaatatgcctctagttgcaagaaaaaaatacactaggcgtgatctaagaaggtggagtaatgagacattgggaagaggggaaatttagagcagtgttattaccctccagcggagcaaaggccaagagcaagaagatcttccagtgtggtcggtagcactgaggttagaagtgatgcagacagtcctgcagctccaagcccaccaactgtcacaaagaactagaaaaggcaagcaaaactcaactatgtcaaaagtgtcacttagattgattcttgaatagcgagacgaagtatctgggaaaatacggtactgaattaacatctccgtcagatcataggttcggattgaacagatgacacaattaaacaatgatgaagatcaagacactttaatcgactgaattc

SEQ ID NO: 6 - DNA, 101158 bp, Arabidopsis thaliana
gaattctctcgacgttttgtttaaattggatttgtatcttttggtattggaaaaatagtaatgctggagaaatgatgagaaatcagataaatcttaggacaccttctgacacagattctgtgtatgagaatgacatcatattctgatcttcagttaaatttcttttttcgtttcaaaaacaagtttttccgttctgtttgtaattgaattttatggttttgaagataggttaccttaattctcggtttattaagtggataattcaatttgaatctacggatgttcttaagctgcaaagagagattgtgattctgaggcaaccaaatattacaattaaaccttataattacaacggaacaacaatcaattttagaaggaataatgaattcaaagggattttgtatatatgtacacacagcgaactctatacgaacagtagtggtttatgcctttaagccgatcacatcaactcaatttatgaaaccaatagattatagtgacaaatctgactcaactgattcggctttttagaacgctcaataatttggctcttccaatgatttcagccttgtggtgtcttgagtgcctgtctattgaattcctgaagctgtctgtcatgttcttcaagcatctggtccactctgcttggctgagccaacaatggtcctgacatgtaaatcttgctatcactaggattatactgaaacacaacaatgaatgttagtaaaagaaaacagctgctctgatacgagaaaataaaaaaacagagatcattaactaacccaagatgggtcaattggtgctgtcatatgtctactatccatagtatcagctctattgtatgctcgccgatctcttcttctttggttcgtgactggttgatcttgccgttctaataatgttttggaggagactgagcctgataacatcttcgggtttactctagctggagggtatctaggaagtgcattctccttcacatgcattgttgacttagccatgttccggttgctcatcaatggacctgagtgtgaaattctcacaccagtttgattgtttctgttgtgctgcatattttgataatcaggaactggtccatgaggagtcctctcctccttaaacgacttgaaactatcgttcctactcctcaaatctttatattgtttctgcatttgccaaaagagtgatttgctttacagttagttacctccacggtcattgtgaccataaaagctaggaccttttacagttacttacctccattgtcattgacagagagttatttgctttgaccggtggtacaaattttctctcgtgtgatattctcgtcatagagtcttgtcttcttgtttctccgccctcataggttgttgccttttcgcttcatcacgcattttcgcatcaatctctttactaggaggatattttggtaagttcgatggatcgcaagcaaacggcttggttttgaagtactgacaaaagaacagagttttgtcactaatgcttccatgatctcagtaaaccaagaacatagtaaaacatcatgaaccagttacctcactctcaagggcacgatctgcagagctccggtgatcaggatctatggagagtaaagtctctaaaagtgaaagaacacttgcaggaaagtccttaaacatctctgatactttccgcctataaggaatcgcggttttgaatccagctgaagatggtaacttctgttttctccagtaattttctgttggtgaaccgcaaagcttgaagattttatgcaattgttctacctagaaagattaagggctacatttgagttgaagcaaacaagatgcaacctgaatttggaggaaatgaaatctacgagaatttgcatacctcggtttttccagggaggatcggtttaccggcatataattcacctaagatgcaacctgtgctccataaatcaaccccaacaccgtaatgagaggctccaagcaaaagttctggtggccggtaccaaagagtgacaacatggctagtcaatgaaacactttttgcagggtcgaaaaaagttgctaacccaaaatctgctatcttcaagactcccttactgtcaattagtaggtttgagccttttatatcacggtgaagaacgccacggctgtgacaatgttcaagcccacttagaagttgtcgcatgtaacatttaacctaaacaacagaaacataaaagaaacggattttgaagcggaaagaaaaatctatgcttttgacattagggtagctcaacatttatgtgcagtacctgaggctctgtaaacttgacaccaggtagtgaagaaagtcctaagagatcatgatccatgtactcaaaaactaagtaaagggacgatgagacaggggcagtgatcaatccttccaatttcaggacattaggatgatcaagccgtcgcattactatgatctctcttgccataaacttaacactttccatatcgttaagatcaaaccggactttttttagcgcaacaatcttgttatgaagaagatcgcgagctctgtatacgctgctatatgttccttggccaatctgcatccataagaaagaaggttctattaaacagaaacaggatctggaccaaagagtggtaacaaaagaaacttactttctccagcttttcaaaagtatttgctcgtcgtggagcccaatccactagtgactcaccagcaacagagaccagccaagacggccatcctgctgccacttgcttccgctctgcatcctttggactaacaatgcttgaacccctcttcagttcccgatgaaccactcgaaccgaagcttcaacctcaggtttctctactcccttctctatctgatgatgctcagaaaacatgctagaactcaacttttcagattcaatcaaccgaactttggaatctttgctattccatctatctagcttggccttaacaacctttggatcaatatccaagtccgagtctacaacagcactagaggcccttctcaattcctgatcatgcacaactctatccatatgagcaactgtcgcaggattctctaatatcttcccaatctgatgatcatgacacctacttgtactaaacatttcggattcaatcaacctaactttagcatctccactgttactcaatctatcaaacccatcttccggttgaatccaatcatcaatcctcctcgacgaatcaatccgagaggaacgtttctcctctgatgactctttcagtgttgttgactttcttctaaaaggcctatgcctagaattcacacaacccattcgtatgctctctagaacatgaatctacacacataaccaatctacagaaaaacttaacctttattattcacaacccaatccattcacttccctaaaatctaaaccctaatttcaatccactcagaacaaacacacaacttcaacggctcagcgggaaatacccaattcacgaaaaccaacaagatcgtatttttgaattcttcttcttcttcggaagaccacacacagtacactgtgaaatccccagaaagagtgattcgaaccggaaaaatcaaaactttggccggaattgagtgaaggaatggagagaaattgatgaagattgactttaggcaaagcgttgaatagaatcaaagagggttgcggagagaatatgtaaggaaaggggagatttttatttgttagttgtagcagatttgactaattaaacgattacgtagagtgagtcactatcatcgatcgatgtatgaacggattcataaaaaaaatagctaaatgtcaataaccaacttagccgcctttcgtcgaccaaagttagatttttctccacatctctctctctcagtctctctatggctctatctcatcatcattcatggaattctctttcatttatttttattttttaaaatgttcagattttattaaatgtaagtttgattggtatcatcattcagcctattcaaataattgtatcaagacttgttttagtcaacattttttttttgtcaaccttttaaatggtagataaaattggttgaaaattttaaaataaacttagagcattattatagtctttcaatctatttgatcatcgctcttacaagactaattgtattgactttttatttcgtttgaaattattctaattgtttagtttttttttttttttttaattgtttagttttcgtgtatgaagttcttataatttaacatgtggactaaaacagtgaagacaaaaatataagaaattaatcacgagtataaagaagttcagaattgtgataggaagatgttgtttgactcaaataatttgccaaatacatgtgcacacgcgtgtgtttgtaaataactaaaatagaataatttatgaaatactttaatttacttggctcacacgacagcccgatgtctttagaactaattcatttacttattttaaaaaaaaatcaaagtgtattaaatatagagatcgtcaataggatgccgacaccttcatcggcatgcggaccatgcggtgttgccaatttgccatcgcgaccgtgttgtatggcaaaattggactccgtttccggtcatgggattatgaactagaagattctttgaagtgtacatcaatagaagactacaaaactggaagattatttgtttaatgttcttacaaattaattctcaaagtcgtgtcaacttccatattagaaaagcgtttgacacataacaaagtcgttgcaatcgttcgtacgtgaaattgttacaaatgtcaagggacgttaaattgtttcatatgccaagtaaatcttagtattccaaatgtccaattacttggaagatggtttaccatacaataccacatccatatccaattttaaaaatgtttgattgtagattctcaacttatatgattagtgttccatatattgtagataaatgcttaatctcatttgatgactagacggaagaatattaaaatccatattcaagagaaaaagctaagacttccataagaaaaagacaatcgcatgcattcaagaatttgctagcggtgaacgtcaagaagtttcgttcctttagagtcttcttcataaaagatagacaaaacaaaacaaaacaaaaaaggtaaaatgtcattaaaggttagaataaatagacgattcttttattttagtttgtcggctataataagcgtagaggcgcactatcaagccaaatcgcattaaaaaaaagaaaaggaaagacaaatcgcatttgtttgtttgtccctaacttgctatacgactaaactaaaaaaaaaaaagaagataatgcattacgtctcaaacagatttgttgaagtaaaaaatggtataaacagaaatcgcgtttcgtcattagtatttaatttcataattccgagaggagaaagaaataaacgaagaaaagagtaattaagtgatattaatggaaataataatatttttgatcagagtgagttcacgcagtttccatgtatattcatttgttcctaatttccatgtctggtctcttttgggggaaatcaataaataaaacgaaacttaagcgcgtgtactccactacaagcctctaaaccaacgagtgattaacacgcgctttaacatgagagtgggactcacgtgaactaatctattttccccaaatctgaagactttcacttttttttttgtgctctctctcttcttcttcttcttcttcttcttcttctagttcttcagcacaaatctcaaatcacggagatttcaatttccaacacaaagaaagaaaaaatccctcaataaaaaatctcaatcagatcgccgatgatggatccaacaggatcgccaagaacatcgaatggctctcctccaagatcgtaccttatctttatgcgaatcatgagcaagagacggacatgggtttgtctctttgtagctgtctacgcgattctcctggcttcctcatggaactttctcacatctgtgcttagctggtacaagctccagtacacgtcatcgccgtctccgtcaagattaccggcggtttacgcgtctgtggtgttaggagctgtgtttggagccatgtcgatggttgcggcggctgcggttgcggttccggcggttatggtgatctggatatcggtggttgtgttgcttgcgttttttgggaaatcgagaagggtattggttgttgaagctcgtaagattacaagagaagtgtttggatttgtgtttaaggttcttttgaaagaaggcaatgctgttgctgcggtttgtgctgttttgggttatttcattcttattagaaaggattttgattcgatttagggtttttgattttgggaaattttcttctctttttttattattattggattaggtgggtttttctttctttcctggaaatttgactattatattgaagaaactcttgtcttttgcttcttgtttaacttgttgctaatgtagcaatgtatatgtacattttataaacggagatgttcttgaatcactatcattattatttcttgaaagcgtgtcaaattattacattttggcgaatgttagctatccattgttggttgggttcaaggtacttctttttggtaaaccatagcagaaatataacctgtaccaacaaaatatcctagcaataaaaaaataatatatatatatatatatcctacctagcaacaaaactgaacaaagtatccaactactaattcatgcatttctcattttttttttttttttggggacgcttccatgatagtattaaaatttggtatattcattatttttattaatcaatttgttcattttcctaaaattacttatctttttgcttataatttaccctctctttttttgtgtctagttgattacttactttttacttcttctcaaatgatgacctgaatttttctcgtaagttcattattaactaagttttagtaagcagaccatgtagagtgttctaaagattactacaagtgattatgtcttggaatttaggcccatctcccatacgccatacattagacaatttaaacgtagttaataatggataagctatgatttagtgaaatactttctattgcaaaaccaagctgtgaatatcatttcttgggacgagtgaagggagaactgagaacgattaaatccaagccaaaattgtattagttatccaacccgaataataaaaatagggaaatcaatattcttattgtattagtaaaaatgaacagtgtaattaagcataacccccagaaataacagataaataaaaaataaattattattattaaactcaaaactatggtctcggtctctcggacatatcaattattaaacaaaaattaggtgtttttgggctttgtggcccatgtgtgttcacgagcctctcttatctgggcctggtttccccttgtgggcgtttcctctgttcatcatgtaatgggtatggtccaatttatatgttttcgtatgctcctaaaaaaatgaaaaccttttaataaaaataataataaacaacaatatgtttacatatttcttaacttgaacagtaatccttacccttaccttatagtgcctaaactttcagttgatttacagactattcgttaactagtattttggcaatgagagcagaattctccaaatttgagtttgcaatttgttataaaaataattgattttgttgatgtttagtaatattttttttcttttcaatgtaatgtttagtaatttctctatgtgtgagagagtgagattggccaaaaaaggagggaaaacaaaaactttgagatttggcacgaaaaccaattatgataacaaaagtccatctgtacggaaaagattgaaaaagtggagctggtttcaaaactcaaatttgttggaacaataaattagtagtcgtgtaaatttacaaaaacttttgtatattcgtagtcagttttaagagagatctaaaccaatactggtcgttgcttagacagaatccactggtgaactcgtttcgggacatgcgatttctactaggcaaaaagagatctggacaagatgtattcagtgctggcattggaatctataattcatacaattgaatgaaaactatagaattcagtttgctaatatcagtttcagtaaaaccccaaaattaaaactgagcacaaccctagaatcttttgccctcgtaagtcgtaatgttgaatttgacttccaagttgaatacaattatgcccttcacgtcaaatgtttttttgtcctttttcttttttcgtttttttcttttcttcttttaattatttttcgtcactttttttcgtcaatttaaaatttcttaatttatcttttaattattttttattttgttttgggtcagacttaaataagttgtatctaacacgccaatcttttttaaggtacacatacagagacaaaaagcagcaatggaacatcgttattcgtgaatcaatatccgtcatgtcatggcaataatatgttgcaggttttgatcatgtcaagagatgtgtgttttgccaagtcaaattaaagctgtgtgttaaacaaaaaaaagttcagctaattaaattcttactctcgacaagtcaataactgtgatgctctcaaaggaagatttttttttaatcaaaaagcagaatattagttgtaaaattcaaaacgtgatttttttgaaatcctaatatcgacgcatgttatacggccacgtttgcatttcgagcttacccgtcaaattttttgttctctcgttatttaaaaatcaagtttctgccaagccctaaccctaccttaaccctaggcacctctactcgcaggcggcattgccttttaccaaaatgccattatatctattactttttgtcacaaaaaattccatatatttattagagataactatgatcatactgataataaattgaagttttgcgatatttatgatattattcgatttttatgataccagtaaatgtagcaccagttttgtccctagaaaattggcgcatgtactataaagtttgtctgctttttcaatacattttttttttttttccaatacatttctaaaattgttcgtacgtatatatattaattatttcagttagtttttattatttaatataccttttatacatacatatctactttgagtttgtaataattttgtctatacaaaaagataaaaagataagaaaaattaacagtcaaattagggttcaaatatgttgttgttagggatcgatccatatttctagtagctagtataatcttgcccttacttgtgggatacatgtcattattatactaatcggaaaaaacaattgattatcacgtacgtatatgcccttttttccaaaatacgcaagcccatatcttcggtctttatatcccgttaacttttctaaggattttcagagagggtctccttctcgatctctactctctagtatgttacaccaaaacggaaagatatatatatgcatacacttattcatttatgtgactttcgtgacagaaaattaatgttttctttttacatcttatattaaaataaaggaattagtacatactattaattggcacattttaacatatagctggtgtcaaggtcctgactgtgtttaaaaactattatacaaggtaaaatgatcaaaatattttaagttttacacaaatttttcgtaactttttttaaaactgaaagcactttcaagcactgagatgcacaaaaaaggagacaaaatggaacattgatctctgcaggtccaaaaaaaatattatgatttggttgtcattaaatttttgatgcgtaataatggaaacgaaatttattctctaggttcaattgtaaacatggtcattgttttttgtaaactataatctcagtttgtgttgatgacaactaataatatttattttcactaatataaattcttagaaatacatgaggcttgtgtcaacctaaaaaagttgcttatcgaaatagtaagaaaattagaaagtatgagatgttgatcacgtgatcgagtgtgagtcgaattcgatcaccgagtaaatggggccctcgtaacatttatgttactctagaaattatatttaaataattctaatgttttatttaagtttacccttcttccttagtgcaccatcatttcctttaagttttctttgtctccattctctctgtcactgtcttttctccaccagaaaggtatgaagaaacaaaagtttttcttctgaatttttttcttttctgtgcgatttgttgttctcaaatagtgtttttgccataaaaaagaacgaggtttttgtgtcaaaaacacttttgatgtaaaaaaaaaacccactttttttcttacatagattttcgttcttttggtttgttgatgtttattggagcagtataatgcttttgaagtagagatttttggttggcggtggaagtttgtgttctttgaggcatttcgcagtgctttgtgtcaaatctaagtgttcataaaaggtttcatacatggaattataaaataaacccactttttttttttgcatagattttcgttctttaggtttgttgatgtttattggaacagtataatgcttctgaagtagagatttttggttggcggtggaagtttgtgttctttgaggcatttcgcagtgctttgtgtcaaatctaagtgttcataaaaggtttcattcatggaattataaagactaagcattagggtttaattactagtactacatgttgataaaagataagataaggaagagatctatgtaatttgcttatttgacaatcattattttttgctttcgcaaggtaacttgttgattgtaaaaatgtatagatttgatggtattcttgactcatcagtaatattcgttcctgtgaatttgtttgtttaattttatcactttatgtattttgattttgcactttttgacgcatggttttggatttcttttcttttgtaggaaatggggaaaaacgagccatccattggtggcaaacctataaggcgccaaaagtacctaatgagattaagcgtgaagccgcaactgctaagaagaaaggtccaactatcacaccggtgactcaaactgatgacaatggggttagatcaaaactatgttacttaaattgcaattcatataagatcggtatataaatttaactaactgctactaactaattattttaatatatagctaattattttaatatatagattttaatacaaatatgttaacataccataaaaagtttgtaaattaaactatgttagtttgattatttaaatggttgtgttttatatatgtatactctatttgagttcactttatatgttaaggaatttggagatggaagcaaactatccaaagattacagaggtgttccagagatagttgataaagtcttgaagcaaaaatttggtaactttttgttttgattaatgtgtaccaatatagattacagagttattatctataactaatatctatgggttgataaaatttaaattgtgattaccaattgcagagatatgttgggccatcgcattgacacgtcttctgcaagtcatttacaatataactcaagagtacatagctggccgcctaagattcgatcatgatgacctcgtcgtgcatttgaagatgaaaaaaactcgaggcaaacgaccggggtcgatgaaacttaagaaccttaaagatgctattaatcacatagcagttaaggggttgctaaaaaaaagagaatcgaagtcgaaggtactacttgtaattcgaatatcacctagtactttgttttaagatacacttctttttgggtttgtgacaaactaattagtttcatttttatgacttgaatggaggctgggagcgatattggacatcataccaagtggaacttttccatggagaaatgtccttcaaaggatttcatcaagtccaaagttgatatctctccggttgccatagcgtttgatataactcacaatttccagttcattggcaatgttagtaagaagtcaaatggattggtatatatgtctctctgtgatacaagtaattacctggatcaactaactaaattttttttattgctttcagagtatctacaatgtaagcggcgtagacatggaagatggcgatgcagggggacacgtagttctcattgtcggctatggctacaccaaagaaaataaactattcttcttgattcagaatagttggggagaggattggggcgtgaaaggttttgggcggatcttcatagatgacgagtccaagaccacacttgtttatccagatggccccgtctaacttaagcagacctggttacttgagagattcggttcttttttgtttttgtcttcttccctaactgttactggtaatgggaaccaagtattttcattttaaacgcacttcttttggcattttaagccttgttcactaaaaactcatttcttctggcattttgagccttgttcattaaaattctcgttttattttgcttaaatcattttaatttttttcccccgattatgtcacagcttattgattataaaaatctcctacatccacctaactataagtgaagaaattgatgagattagcaattaaccaacaacttggatacaatagtgggatctgaaacggagtatgaattgccatagaaggtctaactccttttaaaataatttaacccaacccccactacaaacaacataaatcgagttctgatcataaaagcttgagtacatagggcattgaaaaagagataaaatcggtaactacttagtcttcctggtctgggcattgggaacgcccaaggacaccatcaaccctgcaattagaaaaagagaacacatatcattcgaggaactgtatcgaatatagattataagaatcagatgatactaataaacacaaagattaaagcctctaataaggatatttcaagaaaagagtgaatataataatctgtgtcaaccattacataccatccaattaattaggaagaaaaaatcaagcaccagagcgagctggtctgcaaaagatggggtgaatgtttctttgccatgccttgcgctcagccttagcttgatactccacaagctctccatgaggagattccttagccatgaatgtaatataagctttgtatccatagctcaattgcaccgtcaccctcacgatatgatcaagctttaacgtcttattctacaataaaataaacaagtttcatatagcctctacttatcgggaagatataatgatgacacaaaaaaaaactaaaaagagtagtagtagtagtagtagtagtagtagtactagcctctacttggttgtatttgtcaatagccacattggccataatctccatgtagtcacgccccgtcatgtttggcttgaagaagggggcatccagatcgagagggcgtattccgtaacaaacatgtttaggaagcttatccactttgaaaccctgtaaccaccgcacaaaggttcaagctttataccaagattgatggagagcagatctaattttacgacaaaccttgctctcgtggtaatagcgcgtgtatcgacgaaactccaattcctcatcatcctcaggaggctcatcaggcgactcgtagtctgagccttcgaaactatcgaaaccccaaacctggtcatcgctttcactgtttctctcctcttcctcgcatccttcatcggaatccgccggctcaatcgtttcggccttgcgtttcaaagagagatctgcgtccatcacctcgggctcaaccgtatcgacatcactggatttgggatccattttttccccaatttcaaaaaccctagaaattctgaaaaactagtttgagaagaagaaaagtttcgtggtggaatgaatgattggctaacccttagtaaaaagatttggttggcccaccaaatcaatagaaaatttaattgttgggctaagtaaattaacattctattttgtaccaataaataaaaaaacaacctatgactataacagagcgatggaaaacgacaacacttgtgaggttagcgatcatgtttacgatttagattttgtaagctatcatatccacttagatgtagctttttcgagttatagatggcatatgtactactagacactgttaaccacatcgaaattaaacccacaaacatagctgataaaacgatagatcatagcaaaaaaaatatcaagttcattttgtagatatccttccaacgtgatcgaaagtatattgacattatgttaaagttcaagttattcttcaattttgtgtggtgatcatattttaaaatactttcaaatcatgtccaattgaccaacgatgatataacttttttaataacaaaatttaagtataaattaaatacttgaaaacagaaaaaaaaatataaataagaaaaattgaaaaaatatatatattcaattgcttgtgtattaaaatgctttgttttgtcgttttacgtaaaatcgcaattacacattacattttatcattttttttattttttttgacagccattacattttattgttttgttgtttagtttccgtaaaaataagaatggcaatttgaaattattaaccagaccagtgtgtcagtgtggaatgtaaaagtaacggttagattttgaaggctaataaatcatccatttctaattaatgttatgtattgtatagggcatctacacattcttgttggatctttgaaactacaagtaatacaatcattcaatttctaaacactttcgttgtatggcatgcatatattaaaatatcattttatgcatatactacgaaatctttaaatgattttagtacaagcatgcatgtcttagaatttatagggaaaaaaaaaactgaattactttctattcgaattatagtatcaattgagtaagagatgttgatcacgtgatgtagtgtgagctggtcaatcatcatcaagtaatggagcccacaaaaagatttttgtcacttaataatattcaacctgttcaaaaacacatgcggaaaaacgagttgctcaaggttaaaacctcataaaacgactaaggtatatttcaacacaattttttttgaaaatgtattgaagttcatttctcatatatatacataaacaaaaaaaaatacataatttttattttattaaacaaattattacataattttatatgatcaatctatctactacactaataaaaatccacgtgtcataatttcatgtaatatattgtcagtttaatcttatctagtaacataactttaaatataatcttatctatagaaaagatagtattatttattaattaatgatgatatgattaaccatatgaaattatgacacgtgacttaattttaaatgaacaacactaaaatcacaaaaacacatgtggttccatgaatatttagccttaaattttatattactttgattcatgattttcgaagaagaaaaggatcaacaacatggtggatagagaagatgagcaagaatacgtagagaaccaatgcaactaaaccggcgattagagctccggttatctgatcgcaaaatctcggaacttgaccgcatattggcaaccatcctgcgtttgcgtttcctctttttcccacttgggccactgccactgccgctgataagcttgacgtcagcagcattgtcaccatcttcacgattaatttagcatttacaaatacataatgattaaacacatattcaaaatatagacaaatttagaagtatcatgattcaaatcaattttgtaatttcctggaatgtttatatctaaattgttatatatatatatatatatatttttgaactgtcaagatagaaagaagttgaatgtaattaaagaggtaatataattaattaccaggtccaacacaactacgaacttccataataaactctcctttggaagaaacagaacgagaaagctataaacggtcacaatcgcatttgcgatcacaaagtacctgccacacatgcgaatgcaataacatatcattagaatacatatacacttctctaaatactctaataaaacacgtcaaatagaaagaaaagaaaaattctcacttaaacgcagccaaatcgctatacttagccactagggagatgacaaagaaggaagatctttcacggctggtgatcattgcgataaccgctcctaacgcggcacaaaatgccgcaaatcgcagtaccaacccacccaatctctgcgttaacttcaccatcagtttagtttcttggatctccaaagagtttaaaactgtagaatttaactatggaagagaaaaggagagggagagagagagagagataattaagaaaacaaaatcacgaaatataaaccaaagtaaaatgaatatgttattcaagtgttggatgggttggttgggttttcttcaactgtctccaccggtcatgcaatatttatctttttgtttcaagatattaaaaaagccaaagaataatgaaaactaaatttttagtaaaaccatagacgtttttcaagctaatattctttaattattatagattaataatatgtcggtattactcaaatttcatttgttaaagagataattcctaatttgatgacataataaaatgaacaaaaaatctgttttgaagcgttgtcctaacttaggtgtacggtgtgtaacctctgggtttagtctgtagttaatgtattaatgattagctttgctcgttttaaaagaagaagaaataatattgagtttgtagtctttaaacatgtggggctacagaaactggctcaaaaaggttacaaaaatttaggtgtttgcatcaacaattttagaactcacttgacccaagacctgatctttgtttctgatgttatcaaatctcagctacctctttgcttccgttgatcctcattgatgatgcgttcattacatagttgtgagttgtgacaatagaatcccaactggttctgttgttagcacatgctgatggtgtttctgcctttacgagttattgacctgcccattcttaagcggcgacctgttagtgagtccagtagtatgaccaaagcttcctcgactgcatcagcttgtttgtctaactcgtagctgcttaactgtgggagaaggctaagctcagataggagtccaattgctgctgcagccgtgcaggtccggtcccatgatggttgtggcctgtacgtcagagatcaaatgaggaaggaagggcactattttggcagacagagactggaccaggaacatgagaaataaagactatttttaccggagtttgtgcattgcggatgcaccggttgcaagagatatacaaggaagatcttcgtctccccatactgactttgcatgatcctacagatgagtttagagtttaagcatattttcgtgtagttctttagagaaagggggaaaagatgaaatccatgtgagatatgatcagcctgtacctttaaacgcttgagcattgcagcagaattgttccacgtgccatcaagcaaaatgaaatgcagagttttatcctcatctgtctgggaaatatagaaagtgtagagtttcactctatatccttccacaaccttatctaatatttttctgtttgaaataagtaacgatagaagaacagagagtccatagtcaaaacattgcaatctttaccgtggatgatacatgattctctgaagccgaactaccaaaagcgtctttaaccgagaaagttacttccgagttgtggttgggatagaggcaacggacttggctttttcctgagcatccatcagaacaaaaagacaagatttttagcaaaatcatggagtgacatctatgtaagattaaacaaatgcatctacactaagacttagaagaatcaacaacctgcacgcttgaattcattccacatgatctcttcgtcttcagctattccaaagacgcagagtgtagctgattggacgccaaatatctgccacaacagcttccctgtgttgttctggcgtagaaaatcctgccaacagctaaacagcatatcaatacataggaattggcgattggaatagctaaaactagtgggtacaatactaaccctaggatgcatatacagccaaaaacgtatccgtttccataaaccacatggcttaacatatgaacacatgcaatcctccatagcaagccaacactgcatattcagaaatgtttcatctttaggtattgagttgtttattcatggcaaaatacaacaattcaagaagagtaaatgaagtaccttctggcataaataacccctgctcccaagcagccgacaagcaacctgtcgagcagaaaaaaaacgaaactttttctccgggtcatctaatgcttcatatgtagccctatgcttcttatcttcgtatgcaccaaacggtccctgtgatagttgtcacacaagtagaagtattataacctcactataacatttaagagctcaaaacatcaagtcagaaaccactggcacatagcaccacatacgtaaccatagctcaaatatctaacttaggttactagtttgaacacaaaaattacaaaaccagattcatagttatccaatagagagcactaaacaatccaagcataaaacgattgaaaggaaacaagcaacgaggtttcattatcatgatagtcatcggcatttacctgtaacttgccaccattaccaccaaaatctatcggagaatccaatttgcactccagaactttcaaatcatccacaatctgtttgaccgcggatggaaatggagacaccggaccccatttccgccactcctctaccgagatgattccttcatcgcaaacgtcgaattccctcgtatgagaacgcaaaatcgaggaagtcataagcaatctctggccaacagctacgagattacggcggtgaaacagtagcgacggagagaaatcggctacggatgctccagcgatacaacgcatcgtttttactgtttgggcttctcgaggaataataatttaattttacggggtaagtgaatactattgggctttaatgaaactaaggcccagtgagctttaaccttgattgatacacttcaagttaattggttcgataattttttgtttttccgaaaacgagaaatattaatgggctttaatgaaactgcggcccaatagtcttagagcttgaataatagggaatttatttaatcggataaaattaaacaatagtagctctaaagaaaaaaggattcctaaaaaatcagtcactcctcttaatcttctcctatctctcattttcgtgggttttgtttttgttcatcttcttcgtttggatattattacatttgggactcaagaagaaatcgaatctatcgtgtgtgtagattgcttctctctatctcttctctcgctacacaacaatggctgcttacacgtgtacttcccgtccgccgatttctatccggtcagagatgagaatcgcttcctcgccgacgggttccttctctactcgacagatgttctctgtgttgccggaatcgagcggattgaggactcgcgtttctctatcttcactctcgaagaattctagggtttcccgattacgacgaggcgttatctgtgaagctcaggacactgctacaggaagtatgttctctcgtctttgtaaatcaatgctatttctcgattatgcgttttgtttctgggaattcttatgggttaactctaatggggctctctcttagtgtctatgaaatgacttccatgttcaagtagtgaaattggaagacaactagaaaaaggtttcttcggatttgaacctctttgtcatgttatttatgcacatatgtattaggatctctaagtatctatctatagaaactcaagatgcttgtttgttggatttgttatcccttcattcataattctacactcatggtgagtcattaatcttggtttttttttgctatatgatccatgcagttccagtggtcaacgattcaacatgggactctctagttctcaaggctgatgagcctgtgtttgtcgacttttgggcaccatggtgtggaccctgcaaaatgattgatcccattgtcaacgaactcgcgcaaaagtacgccggccagttcaagttctacaaacttaacactgatgagtctcctgcaacccctggccagtatggtgttagaagcatcccaactatcatgatctttgtcaatggtgagaagaaggatacaatcatcggtgctgtctctaaagacactttagcaaccagcatcaacaaattcttgtaatgaactactagtcactgttctcttttctctgtatctctcgactctctaccttttacctatctactcatcactgttcatctagacttgtatgataatatgatgtctcaggttttcagaatttgaagtctacgaaaacattttattattgttaccaatttacacggttagaactttgaagaggcctggtcgtaggggctaaaattctaatctctaactaacaacattgaatacaattgcaaaactgagataaggtcagagcatttacacgcacaaacttacaaaactttgtgatgacaaaaaggtctgatctttagaagaaccttaaggatactgttctaatgtcggattaccgaaaacattgaataacattgcgtaactgagacaaggtcaaagcattacacacaaacttacaaaaccttgtgatgataaaagtttgatcttttgaaccttacggatgttgtttagaactagaataaaagcgacgctaatcctcttcacgtcatcaagagaatatatctctcacatttatatctctacataacctaagaagtaattcaatctacccagtactgcgcatagattctctctctgttcgaatctgtctctctgcttcaagtaattctcactttttcttatgctgcattaatttaaagttatttaggtggatgtttatgtcgtctaatattcctgaagttttaggattatcaaatcttacttattctttttgatcaggagattttaaagtgaaagtagcactgaacaagagtatgaagtgtgacagtaaatctgaaacagtaagctcctcgtccacatctggctccctttcagatccagatcagtggactattttcaaagacaaggatgaatctgagattatgaatccagcgattttgtgtgctgtaagagcaggtgacaaagtctccctcctgaaaaggataaacgatgacgtaaaggtcactcaacgactcgtagacaatcaagggaattcaatacttcatattgctgctgctttgggtcatgtccatatagtggagtttataatctctacattcccaaatcttctacaaaatgtgaatctgatgggtgagacaactcttcatgttgcagccagagcaggcagtctcaatattgttgagattcttgttcgattcattacagagtcttcttcctatgatgcgtttattgccgctaaaagcaagaacggagatactgcactacatgccgcgttgaaaggaaaacatgtagaggtggctttctgcctagtaagtgtgaagcatgatgtatcatttgataagaacaatgatgaagcatctccattatacatggctgtagaagctggatatcacgagctcgtgcttaaaatgcttgaatcttcatcttccccatctatactagcttcgatgttcagtggaaaatctgttatacatgcagcaatgaaggccaatagaagaggtttgtttctatgtttgttcaaccttgtacgccaagtgttctttatatgttttaattatttcttggtcattgctttgacagatatcctaggtattgttcttagacaagatccaggacttattgaattacgcaacgaagaaggaaggacatgtctttcctatggagcatcaatgggatgttatgagggaattcgctatatactagcagagtttgacaaagcagcttcaagcctttgttatgtcgctgatgatgatggcttcactcctattcatatggcggcaaaggaaggacatgtcagaatcattaaggagtttcttaaacactgtcctgactcaagagagctacttaacaatcaatgtcagaatatctttcacgttgctgccatagctggtaagtcgaaagttgtcaagtatcttttaaaacttgatgaagggaaaagaatgatgaatgaacaagatatcaatgggaatacaccgttacacctagccactaaacacagatacccgatagttgtgaatatgcttacatggaacgatgggattaacctcagagcactcaacaatgaaggctttacagctttagatattgctgagacgatgaaggacaataacgcttacgtactttacaaggtatgtcaaatttgaagattcatgtagttaatgataaagtctcatgtaactttttttattggtttacagagattgatttggatggctttggtatctgctggagcaccacatggcccaaacctgattcccttgactgtgtcacagagtagcaaacaaagtccagaaagatacaaggatagtgtcaatactcttatggtgactgcaacactcgtagcaaccgtgaccttcgctgcaggtttgacattacccggtggttacatgagttctgctccacatttaggcatggctgcattggtcaataagttgaattttaaggtatttctgttgttgaacaacattgcaatgtgcacttctgtggtaactgtaatggctctaatatgggcacaactgggtgatgcacttctgacaaagaaagcttttcgactagctttaccacttctgttaacagctgttgtatcaatgatgatggcatctgtggctggacttactcttgtggtgagcgatctcccatggctttcccatcttgtattagccatagattcagccttcttggtattcctgatgctacttatcattccttacgctttctcgtctacaagacatggctttctcagacatatcttctactttccttatttcttgatgcttttggttgttagcgaaggcagcaacaacatggatggttaaagaatgctctgttctgttctattctgctctgttttgtatcatggatgatggatggttagtgttctgtttgtttttaacagtttttgtatctcacgagtttgtaattgtggttttactaagtaaccacaaaaattggtacagagacaaatatgaccgttggctgttgcaaagagctcacatgcatgatcccgactttgctcctctcgctttcaaggccaaattctctgtttcaaaaataagaaacctcaaataatttgtcttgataaattgttgttacgcagtaagatacaaatatgaccgttgtgaggaaatttccttttctttttttgcagcctaattaaaatttcctttttcttaacctagtcgaaaacaaaaaggaaacaatagaaatttccttttttctattgaacaacgtttgcttataaatactcttcttccttgtaaaataactaattcttcattcatcttcttcttcttcttcttctgcaaaacgaaaacaaaagaaaccatctttcatttctatttttcttcggaggatctatggatcgattggattttgactcagtcggtacgtgttatctgaaactattttggtgtgaatctcttttgcttttaattgtgagtttcgttgttctgtttaatctttaatagggtttgttttggattatgtttatctttgatggtttgaagtttaagaagatttagaacaataaacgtcgtcggcgtttgattccagtcatcgccggagagaacaaggcccaatcgtcgtttacaatcaccgttcttccttgtccaattccattagggctagggatgatgcagtaacaccaatctcataaagtcatagtcctctctttcttgacctgtaacggtaagtaatttccaaaatcctctatgcttttctctttttttttttttgtctactgtctctaaatttagccctaaaccaaatattcactcctttcttcgttttattcaatttcagcctattgaaagttatcgcctactagatttgtggacaaacactgttcatcaacaattcaacacttattccatgtaagttattattattattattattattatttttttttttttaacacgattccatgtaagttatttcttctattattcgttcattttttaaaaataataaattacaaaatgtttttgttttcaacaaaaaaataaaagtattttcaacagtagtttttaattttatttaacaaactgttttcgtttacacatatttaaatttttaacaattgtttctcttctattaaaaaatatttttaaacttatatttttatataactattaaaactataaaggttttttggataagtgttaaatttttgaattttgtgtaaactaattggacataacatccaaacccctaagaggtgtcctaggttcaatatggtttacacttaatttaaatttttaatacttatcatcattttattataaaaagtttttaaaattatatttttatataactattaaaattataagggttttttggataaatattaaatttttaaatgttatgtaaactaattagacacaacatctaaaaccctaagaggtgtcctaaattcaatatggtttacacataattaaaaattttaacatttgtttttaatttattaaaaaatgtttttaaaattatatttttatattactattgaaactataagtttttttttggataaatgttaaatttttaaatattgtgttaaactaattagacacaacatccaaaccccttagaagtgtcctaggttcaatatagtttacacataatttagatttttaacacttatttttattttattttaaaatgtttttaaaattatatttttaaaactataaggttgttttggataaagacaaaaacccaacctttgaatcatcgactttttgcgttggagtcaacgaccttaattcaattatttaattgcttgctcggcaagctaaacatcgtcgttgattggtacgcacatccagacttctcctttcttattttgattaagtcaatgacttgttaggattaaatattttggttgctacaagttcaaaacttcaacattattttcttcgtcttccttcatcacctagatttcaaagcgtcttaaggtaatctttgagtgtgtattttcaagtttaagttctaactattctttttgggtttcaattggaaaaagagagtaagtttatgataaaatttctgaatctgctttttaaaacatgtttttgtgaagtcctatcatcatgtctcgtttaattcaatctttcagagatataataagcttggatatggctttgggatctgctagttcaccaaatggtacacaaccaattctcttgagtgcttcacagcgtcccagaatatctaaactacaagaacgtatcttattgcttatggtggtacaacaattgtagcagttgtgacatttgttatgggtttcacatttacaaagatctacaccagttctgctccagatttaggcatcacaggtttggtcaagaaagcagtgttcatagtttttctggtttgcaatagcattccagtgctcttgtctgtcatagctacaatgaatcttatttggccacaacatctgggtgatattcctctgatacagcaagctatgaaacgagccatggtacttatcatgtttgctttttggtctatggttgttgcatttgcatttggagtttgtcttgtattgatgctccttccatggcattccttccatgtctttagctccaaagcacataagtgatgtgtatgtaggtttgtgaacattttccattacacattcaagctcttgattgtttctatctgcaatctttcataagttcgttcacagtgattgatcaaatatgttgtcttttaatttggtgtggtctctgatacagttcctctgtttctggggactaaattgtcacaaaagttaaatttgtgggtcaaatcacaatttcaaatagtttctaaaagtcgtccccgccgtcgctacgcaccttcatcaaaatcaaatcacaatttccttggctcactcgctctcaccggctgcgaaaccaacgagagattccacaaaatcgaatcttttgtacaatggacaaaggagttgtggtagagctgattagagggtcgaccagttgggccaaagttgtggaagatatcgtgaagctggagaagaaaacgttccctaaacacgaatctctcgctcaaactttcgatgcagagctgcgtaagaaaaacgccggtttgctatacgtggatgctgaaggagacacagtaggctatgccatgtattcttggccatcttcgctttccgcttcaatcaccaagctcgcaggtatagacaaacgtccgccaactgttcgatgaaattactcagtgataaaattcagaaaatataatttcgttagagaagaagtggaattattctgccaaacttctactgaaaaatctttcaaccatttgataaattaacctgtagattattatatagtcaaggaccaatgattctggtaaattcgagagctttcaatagaaattctgactagacaaagcccttgttctagctttggttttgcatgcttaaagattaatggagatagctcataagtcaagaacacgtatggaatttttcttattaggcaagttaagagcaaaaacattaggaagaatgtatcccaagtttactttcttctgttgttttggaatcatgtagtgaaggagaattgcagaagacaaggtcatggagaagcattgttgagagcggctatcgacaagtgcagaagcagaaaggtgcaacgggtttcacttcatgtcgaccccacgagaacttctgcggtgaatctgtacaaaaagcttgggttccaagtagactgtctagtgaaaagctactactcggctgatagagatgcttacagaatgtacctagattttgatgactctatttagcccaaaaggattgaatcattggatttggggttatatatgtattcccatatcttggcttgggcttgatatgccttgtacacattcattgattacttctctacatcaacatattacatatgtctagcgagtttttgatattttacgatgcaagatgaaatcatcttgggaccatcaacttatcaacttcttcacaatatagaatgagatttttaatcgttttcatgttaggaagtggtgtaagatttcataatagaagatttttaatcttatcatcgatggtcgaccaaaatgagaaatggcatttgatagtgttttgaaacgtttttgtaagtattataatgtaatattttatcaaataatcccaagcggggatagctcagttgggagagcgtcagactgaagatctgaaggtcgcgtgttcgatccacgctcaccgcatttttctaaaaccttttaatcgatttaaacgacatcgtgttaaaaaattaggtcgtaagaaaggcccattatgaaaagatccacgacataatccaccaaaccgcattcttttgtactttaaattaattttaaacgacatctgttaaagaatgaggcaaaacgacgacgtgttagagaaaaggcacactagaaaagatccacgacatgatatcccaccaattctcgccggtgttaaccgttttgtaattccgatcatcgggtaattctcgaagagagaagaaagatgttagattctctaagaccgaagactcttatcggttaaattttactcgggattacgatgcagttcgttggtcgtgtctcaacaacagtaacgattcatgtccccatctcaactatggagcaatctacgaatcatcagtctaattgtaagtgtcttcagattcgaattcgatgattaactctattgaaatgcattcgaatgattagtctgattgatcatacttattgtacatgtcacaaaacatagtaatctatatgaatttgcatatcaaaaatcttgagttcatgccaaaccaacaagcttctcgctaacctcccacagtttctttgccttctccgcatcacttgcttctttagaaagctgattctcaaacgaagacgagttattgttccaactccaatacactcctgacttcccaagactagggtcactcacaacctaaaacaaaaccacatcctcagtatcaatcaataatctgttatacatatattagaaaggatttgcaatgcaaactgacctgtgctagtcttttgccagcttcctcttcagatacgtaacctttggtgatatacttttgaaaaggcggaaaaagaagccgaaacagcggtatgtgttctctgaacaaccctgttgtagcgatgcaaccagggtaaagagaagcaaacgtgactcctgtttcctcgtggtaacgtctgtgaagctcctgcattgtcagcatattgcatactttgctgtctttgtaagcctttgctccatcaaactctcctccatctatcattgaactgttttgcccattcaatcctgacgctaagcctcttaggtctccaaggtttgcctttggcggtacattcccagccaaagtatttgtgtttcctgcaagaacatagaaaagaacattcattgtttgatactaggaactatcttggtggaaatggacaagttgtctgtgttatttacctgttatagatcctacgatgatcatacgttttgatggataatcagattttttcaggtcatcaagaagcaatcttgagagaagaaagtgaccgagatggttggttccaacgcttatctcaaagccttcagctgtaaaagaaggctctttagcagttggttggtaaaccgcggcattgcagacaagaacatcgagtggttgttctgttctccggaaattttcaacgaattgcttcacgctttcaagcgaagcaagatcaagatgcatcactgtgtaatcttccttggacattccaacagatctcgctgccttctcggccttgagaaagttcctgcaagccatgatcacatgccatttccctgtgtctgctaaagctttggccgtagctaaacctaaaccagacgaagctccagtgatcactgcagtgccttttctctcagtcttcttttgctccggcgatgcttcgtttgccggcggcgtggctgtaactgtctgtgcacgaataccggtggaaaatcgcggtttctgtcttctctgttcctgcaacgaaacagagtataaacctcaggacgttttcgatatctttttttgagaatttcacatcgtatagggtgattgactttaccttgatggtcaacagggtggatatcttttcagctctaagatggtttgaaaatgaagaaccagtaaaagtcgtctcctttagagaagcattgaatttgccctgcaaaatcaccattgcattgaggtaaattcttcattttatcgaaaacaaatcataacaagatggaaatcattactaatggtgaaaacatacctctttttggattgaaatggtagaaggaagaagagaataggcagcttggagagccattgttgtacggaactgaaggtgctagagtgtcacagtgtcttcgattttccccgaattgaggagcgacagaagataaggtagttttgggttagtgacacgtgtcttccaggctacagctttttccctcaaccaatcagatcactagtttcagattcttcatctctcgtttattgggccttgagatgggctttaatattgttttgttaactctcaactgatctgatcaccgttgataggtgaactgtaatgaatctggaccgtccaaatgtgtcaagaacaatttggtggaagagagaagaaggcggcaacttaacggtcaatggagaggtgggagaaagaaaacaaaaacgaaaaaagagagagaaaaaaaaacacttttggatcacacagctctcttcatcttctacaatttctaaaagttgcaaaattccaatgaaaatttccatttttgcctctattttattttattttcttcttctacttcatctcttttcttttcctcctccgtcgtcacggtttctagaccatctcctcctcctcctccattgtcttgttcatatgcctataacaggtaactttttcccccctcatctttttaatcaatcataacgatttttgcttgtgaaatttgatttgatcatcattgtttgctaattatattttcaagggtaatttcattgtaaagttttaaactttacataaaagttatgaaaagaaaacatcctttaattgcgctattatgttagctacaacttttagagaaacctttttgagcccaattataccaaaatttgactaagtgaaaatggaaatgatgatggaacttttgaatatttagaaatcgaattagaactttagctcatttatatttagtcattttgattctatcatcttcttgtcattctctaaattaactcaaaggagtaaataaaaatacaaatacaaaatttatacagaacaacccacaattctgtctagtttagttaaacgtgttaaaatagtcacgcaatgctttttctatttttaaaaattaataagctctgacctgtacgcaaccaaataaaacactaaaacttatctgtgatcaacttagctctgtataaaaatcttcctcctctttctttctgtccaattctctacagagaagtcttagcttttgcaaaatcattaactaatctctgttttgatgactagataacttggatgtaggattattatacctaaattctttctttccatgcatttatgtcggttttgacatctttgttctcttagtttaaaagatatcaatattagttatcttctattctttgaacatttgtgtccatctcatgaagttcaggaagcgtaggcaatactttcctgcttgttcgtctcatcgccaagtaatgatctcttcgtcatcttcttcttctccaaactcatatcaaatttgaatcttatcatcaaattgagagtaatcaacgacaccactgcaatcttgcatatacattgttcttgtgtattccacccgtttctttaatcttcaatgtaccgtaattgagtgtcgttttggttgtaacttgtaagtgaattaagctcactcaaactttctgatcttcagagttgatctttttttttttttatgttctgcagctaatgttatacgcaaacatatgtctgaaaacgtttgcaggtagaggaggatgaagcgtgggaaaggcgagaaaaaggcaacaaagagccgcgatggcagcggtcaagtagttccgctcacgtaatagctcatttggctaaatatttgttttagtgagtatatattgctagatatatcatagggtataaatgacacaccatagaaatatgcatgtgattagtttattagatacataatttagatctattatctcatatatgaatataattttctattagtgaaccagtggttacagctacgggtatggttggaacaagatcatggataggagggctcttcacacgctccaatagacgtcaagacaaggcagtcgactacactttgtctcctcttcaggttagcataatcacaagtttcatatatcttcataaaatgaaatcaagacattataaatagtttgtaacacttttggatctgtgtaaatcaatcatacataggaggaaagacttcaaaggctgcaagatcgtatggttgtacctttcgacgagacacgtcctgatcatcaggtaggtgaattcactttatcagtaagatgtttaacgcagtgagcaaacaacatgcagatatattgttttagctataagaattctgtgaaatatatttgcgtgattaatggcaggaatcacttaaagcattgtggaacgtcgcgtttccgaatgttcatctcacgggtttagtaacagaacaatggaaagaaatgggatggcaaggtcccaatccatctaccgatttcaggtaagatttgatctatacttaacttattgcaaaaaagatcttaaggaaaaatacttagtgttgacgcctgttttgttaaacatttgttttgtaggggttgcggatttatcgctctagaaaatttactattttctgcaagaacttatccggtaaattactcgtaaatacatgttcatatatacttaaactttttttaataatcatggtttgggaacttctttgctccacaaaataatgtgtttatacaaataaaaattgtgaaggtttgtttccggaggctattgttaaaacaaagaggcgaccgggcaaagtgggagtacccttttgcagtggccggaatcaacatctccttcatgttgatccaaatgctcgatttacaaaataatcgtaagtttcttaaactgtcaccattttattcaggtcatacttgttattttcacatacgatttcgattctaaaaggctttaaattcatgttttgttttttgtgcagcaaagccaaaatgtcttccaggaatgaatttcctcaaactcttagaaggtaaacaataggaatatgttcttttaaactgaataaaaccttctttctaaaagttagtagtgtagtatgacgatcgctaaataatcaagaatcatattccaatgattaacagaagacgagagggcattcgatgtactatactgtatagctttcgcgatgatggatgctcaatggcttgcaatgcacgcttcttacatggaattcaatgtatctcttctcactcaatctatcaactttctcttttcatttttttttttttttgagaattagttcttaataattgtatatatctgtgtgtgtttatcaggaagtattacaagcaactcggaatcagctggagagagagctttctttggatgatattcatcggattcaagatcttcctgcctacaatctcttgttccaatagatttttttttcttttgttattttcttagtttgatttcgatttttatgttttgtacattaacctgaatttatgaccgaaatgaaaatgataatcaatgaagccaaaacacataaatagaaaatgaatgataatgaacgtatgttctatatgatgcatcactgtttggtaacatgatgatgatggtgtggaaattatgaactggtagtggactttgtgacttttgtactttgaaaaatcaactctcttgtctccctcgtattatatgaattatgaaatattttgtcggttcttttaatatgctaagtgagtggtttatggttggttgattttatatgacataatatagattaattctgataaaagatcttcagaccaaactaattacttcgattgtccttgtcggcagtcatttgctcatcctgaccgttatttattttgataaaattcggtctgattttttgaccttttttgtataaaacttaaataaaaataaaagataaggttcttcttacgtgtgctttggaggtcgtaaaaatggatattttgatcttatccattatcaacgaaactaaagggatcatcacttttgaaacctaacgtcaaggataagatgccttaccaccacatttccatgattcctattcaattcgaattactcttttttcttcgagttattttttttttttttttgcaagtcatttcgaaaaaatagtgtgatgaagccttatcaatccaaaactctctatactttcttttttctaattatctaggcagtgttctgttttctgtaagtaactaaaaaaagtttggtatctctctatacaatttggtggagaaaccaaacaaaacatgaaagtgtataaaagtcaaacttccaaatcatttattttgtactctcatatatttgacatttttgtcataaaagatcccaactttattcatatcaacttgcgtaatttataagggataaataaatttccttgtatgagtacaacttaaatatccgatatcttaactaaacattaatattattaaatttacaatccaatgcagaaaaaagattctaacaaaatgttgtgacttaaagtatctgatgtccattaataaaagtataatgaattcgatgagtcaattttttaatattgatataataaaatatttaaattttggttaatttcatggggaaaatctttaaagcatttgagtatgagttaacatatacataacttcaaaaaaaatgtttcagcagtttcatcaaacaatagcaaaaattgataattcttctcaaccattttaattccaaaaaaaaaaattgttaacatgattagttcgttacattactatttcagtaacggtactgttggcacaataaagttctctctccaccatgtttcaacttataagaaacaatcactctgtttttaacaagcaacaacaattgtactctgtttcaacaagcaacaaaactctatatacgacatatactctctcaaaggttagaagactcaaaacgctattctaaccaaaacactgcaaagcgaatcgctccattgcgttttacaaaacgcaagcggttccagaacaaagcaagaattagactatatatgaggaaacaagcaaacatcatggtgtcatccaaccgaggtttagccacgatgagtcattgacatattgcagaagtagttgaagtcatgatgttggaccctgagctgtttaagccaagaatccgcaacactgtaaagcgaagccaatctctcttgatcatcgtggtcctgcgaaagccaaacatcgccttgcatcttgtaagtagccatcccaaatgggagcagagttatatcttccccttccctccgcactctctccttgtccccaccattttcttccggttccatatctgtgatacaacaaagtgttaaacccgatcgatcacaccgagttgaaggatagtagacagacagagagaatctgcaccttgaaaagaagaggaaagagtgtgataagtgaggaaacacgtggataagtctttaatggttcttcccattggtatatggtaaatcgggtaccatgctactgacatccaactagctggagaaagatcaacgcttctcaacgacatcaatcccgggtatctttgagccaattcattgatctggaatcatatcaaaacatcatttgtgatgcttattcgatcggatcaggtgaactaacgcaaggctacataacaaggtttatattatgtaccttatccatcagaggaactctggtataaggagctgatctctcaaagtattggagataaagataacccaaacgatcacttggatgcaagagcgtgttgttctcaagtccttcctcagagacactctcatcgctacctgaatcgctaaacggatctctaccctcacattccccatcttcagactcttccctaatcaacccaacacaaccaaatttaatcagatatctttaaagcaacccatgagagcaatcattcttcagctataaagcacaatctattcaaatctcattctaatgatcaaaggattcatcaataagccataaaagatattaaaggttcaatctttgagctgtaacacaatcaaaagacaaaccttaagcggatcaaggaggaatgagaggtgaaaatctggatggcagagagataaggaacatagtattgaacaagagattctccgttggtaacatgaataggaacgctagctccataagcgctccattcatcataacaatcccacaaatcactcaacctgaaaaactcaaccttttgtctctcccatggatgccacaatcgatttagggttctaatctccgtctgcaaaatcaacacccatcaaaatcaatcaataatgacatattgaaacgaaaacaaaaagagagagagagaaagaaacgttatgaaaccttggggagagattggggtggcactaagggtgttatgcaatgaaggaatcgatcaagattcgattttttggttgaccctttaacattcaccatgatcgtaattgaggaaatattacgaaggtaggtttcttcttcaatggaggaggaggaggagaaagagatgggcttttagagagagagaggcacgcaagcgagttattcagatatctgagctttgacgttatgtatgaaggaggctgaatttaagggacaagcaaaaccaaagaaaaaaaagagagagagatggattctctctagaaaaaattgtatggagattacaaatcgagaagacgcacaatgagtagtaagcaaagatcgaatattgtttttctgttttttttttttaaatgtgattctctgagaaaaaatggaagccacgcgtcgagatttctaatcttgaagtcagatcaatcgagacaaggtaaatgaataaaaggtaaagccataaaatgagggagaagaacagagaaaatattcagaactttgttgaatgaatgaagaaaggatagagattttcccggggaagtcaaaactttttctcgggcaattttggattcgaaacgattgcttttactcagagacgatcagcagatgttttttttttttttacaattggtgtctttgtttttttatagcaaaaacagtttatttataaaaagaaaataaaaacacagaaaaaggaaatgagaaaaatagataagatctttaattaagtttgaccgattttcctcgtccaccacctcaccacagctcattgttttcttcacgtggttttggttttgttgttatccaaaatttatgaattttttgttttcttgaggtgaattgatcttagaaatttggttagtttagtcattttattggttagaatcctttttacatattatttgcatcaatcatattcagaaattagagatttggtatcacaagctagggtttactggtttaagtaacttattgaccacttttaatttgttatccaattcgtatccgtccccgtaatatagattcattaacgtatattattagtactcaccgatgaaacctaatcttgtaacccgtatggagtacgatatatattgcatttggtgaggcgagcgaatgttgacttgcaagattagtgttaaataaagagggtgcaagattatactaatgaactattgaccaaaatacataaattaggcgtaattaaacacactagtcagcagcaaacacggtcattatttactacacccatcaatttgattttaacgtattggaaaggtcagcagtataatggtagattactagtgcacacgtgttgttgttaattgcgttgaatgaatatattattataatatataaatagagtaaatacgagccatgtgttagtgttcacgtgtgtggacctgcacgtaatatgttggaatggggaatgcttgtggagtttgttgtcacctacaaataaaatgaccaaactacacactttgtgggctttgttgatggcccataggaaagtctttacatagacttgaaatcattttaggttgataagcattcaatgcaattatgcagaaatgtgacttaggagttttggagattttataatggtgtaattcatttctcctctatcaaaaactaaagaaagtgtagacaaattttctagggaagtatatagtacaacagaagagagttaatcgaacttatgaagcagctccaatcattgagaaaatggaattcgatataagttatataagtatctctgataatgataattaagcaattatcatgcagaacattaagtattttacaggaatgaaaaaaaaaagcaggcgagccaattcaagtttctcttctcatataattcgattggcatttttaggaaaataaaattttcatcaacaagaaaatggagaagaaggcctgactgcagttttttcatcttcctcttgtgagagctttctcagcagtttccatctcttcaagaatcctcgccttcctcttcgccggaatcggagccgtcggaccaaaactcacataatgacctgaaacagcattcaacgccgagtatatatcccggaaagaagcttttccgagaagagctttctctttccggtacttggcaacccaagaattcgacgcttctctcagctccgccaccgcatcagccacattcggatctgtcttctgcatcgaaagcgtactccttactttactgatcactgccgacgtatctttgatatactcttcatcttcagcggcggagaccggcgccggagctagaaactgaatcgattgtgttagaagcgtggatgttgccgccagggagaggaaatcgcggcggaggaggtggttgcgacgtggaggaggaagaggcggagatacggaggaggcgatgatggtcggtttatgcggcggaagattgggtttgagaagagtagctgtcgctgatgctgaagccattgtcggaactctggagaaaaggtgtaagaagagaatgaaagagttttgttgtgcgttagtaaatcggggaaaatgtgtttctgtgtgttggatttttgacacgtgtcccttatcttcttatcttagattctatggtttttgaggatgacacatgaagatccactgccaggtcaggatttgcttgtttttatatctgtttggtttaattgtaaagcccgattaagataaggcccatatgtcaaagcccacgcgatgatgagtcattgtgcgtggcctttttagtttagtaatttttgataatgctgcaattggaagatatagcatttggttaaattgacccacaaacacgtgacattcttctcttgctgtcagacacatgggatgatgattatgatgatccctttggatttcacaaaattaagatttttttttttaatttcttcatgtgtcatcctcaaaaaccatacaatctttgatcttgataataagctttctaattaaatcgtctttgattggcccagtgtgaaaaaaggaaagaaaaaacaaacgaaagctaaggcctacgcgggaactccgtgaacgatttgtcaacagaaccaaatgggaaaagaagctttattaaactccaatctaattttacacatttattatattcgtgatctaccaaccaacctatcctttcgtctttttttttttttattgtgaaaactacaaatgcaaaaacaaaactgcatattaataagaaatgttttggatatcatgattctctaaaaacatgaattactccatataactgataataaatttaatcatcgccttcacatctctatttgactatcaaccatataattcgctctcattttctttagtgaaatgttttggtgggtgaatatgcatgaaattcatatggatagactttaatggaacataaaataaataaataacgaagtggggattagtagtagtatgtggagaaaagttggacaactcatctgtttttgcaaactttgcaagtgtcccatttatttctcgtctcttatgtcgtcttgcttttattaggacaccacaaaaaaataagttgactaaataaaaagcaattaagaagttgactaagtaaaaagaagctgaatagtgtttttttccatcatacaattaaccacaatgcaattaagaacaaacaatctttaattatatccacaaaaattgatcttttgattttcatttccctatattctttgtaacaagaaaataaaaaaaaaaagaaggaaatttaggaaagtttttaaaatgattaaatagcaaaagcaagtaagctttgattttgatctttcatgaaagaaagcgaagaccaaaaaagattctgtagggaagctctctctcttttgttttcttcttcttcttctcatcctctctgattcttcgctttcttcaattaatgagatctcacccatctccctctctctctctaccactactacaactactcaatcactaactctctcctttctctttccatagtcagtcattgtctctggatcaattgttcttgatcccctaaaggttccttcttttcctctgattttctctgattccttgcacttttgctttgtttctctctttgtctttgtactctgtaatctcatatttggattggctcgttcgagtttcgtaggatctttcttctgatgattttggtttgttcttttctctcttttgtcactctgcacttgttttgggttacagaggaaactttatcagatccatttttcttatctaaatcgggtttctgaaaagtgaatcgcttttccacttaacaataatcccaccttttttcttttcactattagggtttcgttattcttaaggcctgcttgcagcattactatataaaagccttataagatgaatctaatttgctttcagctctcactgttcagatataagctttggggtttagcattatatgttttgttttcactggaaaatgtaaacaatgattcttgaaaaatctggtcacgttttcttaacgtcaagagttgtatggaaacttgtttcagtagttaatcttgcaatttgcctcataacatgtgtttggatacatgatgtgcttattataagacatttgaggaaactctctgttcttgatttgtatgttattttgttttcctgtcttctgattcttaagtgttttgattaatttattagcaaagattaatgaaaagtgaatatattacaaaacatggagctataagagtcttaaggttggtccaatgccaaacaattaggacaggctgtttagtaatatctacatatattctattgctaaagatcacatgctgggttttcttctttatgacttgtttgcgtctgcttttcttttttgtaactttgcaataaattaatcactaattcatttttctgcaatgttttcagctcacggtccatgcatcatcattgaccaagatttgaagaaaaggttttgcccacaaagagtattttatatagaataaagaaacttgtgtgaaagctctttgatttgaccaaataagttgctaaaagcctttacattgggggatctggttttggtacaacaatagaagtcttctttttctcaaatctctctgcgatcagatccgttgtgtatacttgcattgaccaatgggaggttgtatctctaagactcgtggagcaatgaagagcctatgcatcgcccatgtcttgggatgggatgttgtgggagcaaaatggggaagagaggtttttcagaccgcatggtttcacttcataacttggtttctataccgaatcggatcattgggaatggaaagagcaggagttcttgcattttcactcaacagggacgcaagggtattaatcaggacgcaatgattgtgtgggaagtgagtttcttcttcttgttcttcctcaatgatgtttattagagctttatgtgaactcaatatataaacaggatttggtgttggttttcgtaggattttatgtcgaaagatgttaccttttgcggtgtgtttgatggacatggtcctcatggtcatcttgttgctcgtaaagtgagagattcattgcctgtaaagttgctgtccctcctgaattccattaagtcgaagcaaaatggacccataggaactcgtgcaagcaaatccgatagcctagaagctgagaaagaagaatctactgaggaggataaattgaatttcttatgggaggaagctttcttgaaatcattcaatgctatggataaggaactgcgatcccatcctaatctagaatgcttctgcagtggctgcacagctgttacaatcattaagcaggtaatcttgacaacaaaagatcacttcattttttttgggttcaatatcggttttcctcgggatttccattgtgttccaagtatcggttttgatgtacattgattgttcagggatcaaatctatacatgggtaacattggggattctcgggcgatacttggatctaaagacagcaatgattcgatgattgcagttcagctaacagtagacttaaaacctgacttgccaagtattatgctttaacaacattttgtgatatttgctctaatctctacttttatcttcattttgtctgacttcttagatattattatttgtttgtgtctaaaggggaagctgagaggatcaaacagtgtaaaggtagggtctttgcactgcaagacgagccagaggtgtcacgagtttggctaccatttgataatgctcctggattagccatggctagagctttcggtgatttctgtctgaaagactatggagtgatttcgataccagagttctctcaccgtgttcttacagatagagatcagttcattgtcttggcctcagatggagtaatacactgaacttttaaagtgtcttctaagccttatcaagatgaatttcttgtactgatgattccaacctttgttttgataggtctgggatgtgctaagcaacgaagaagtagttgaagttgtagcatcagctacaagccgggcatcagcagctaggctcgtggtggattcagctgtacgcgaatggaaacttaagtacccgacttcgaagatggatgattgtgcagttgtgtgtttgtttctcgacggcagaatggactcagagacatcagataacgaagaacaatgcttctcttcggcaacaaacgcagtagaatcagacgaaagccagggagcagaaccgtgtcttcagagaaatgtcacagtcagatcattatcaacggatcaagaaaacaacagttatggtaaagtgattgcagaggctgataatgcagagaaggagaaaacgagggaaggagaacagaactggtcgggactagaaggtgttactcgagtgaactctcttgttcaacttccgagattccctggagaggaaccaaagacttgagaatgactattgattgttttcagaactgattttgggtcagggaaaaattgtcttctgctcaacataatcttctttattgcttaaagcatatgtaaatgtcttaggtctttagtctatatctctctctctctgcctcaaaatctgtgcttgatgatgaactcttaaaaaatatctaatgagtacttaaaacaagaactcatctttactatatatccttcttttttaattatttttgattttagttaagaaattcacctaagaactcactattagagatcctcttaggtgactactaaattagcacaaccacttatcatcatgcatttcatactacaagttcatgatgaaccttatgatgcccctcctctgtgccattatgcactctctcattaacttagcaatgcatactctctgcaaaaaagcggctgtgtattctttataagttgagtttggtaaattgcatactttcttcagaccgagaagcaagagagaacgaatctcttgataaaaaaaccaatgaacccaaaggaagaaactccagcagcagcagcagcatatttgatcctgtccttgtccagtttaacttggagattggacaaagtcagttccacatttttgacccgttcgtggaggacatgacaagcatcgggaactgctttcttcctctccaaggaaagctcctcgagcttagacttcaaccagtctagcttgaagcctacttttgtgagctcggacagttggttttgagcattggttagttcatccgcagacaagctctgtggagacttgctcagtgtctcgatgaggcagaagaagagagtcaagtacactggtagtagctcctggtactttggcacgaaatctacttcaaagtccgggtggcgacttaaaattttggaaaatgaaagagcctgccaaaagatttgattaggttcaacaaaaaaggagatggttgttataaatgggaaaccggaggctcctaaacatacttgagaagcaaggatcgggagacctctgtgttgtaatatatcattctcagttgattgtccttggtggacaacttagactacttcgaggtggacttggaaggttagtttcttgttgttgtcgtggtcttctagaagcttggtaagcggcaacagcttccgaaaaccccattgtgtagcctcagcgcagaacaaacagctttgatcatctttgcatatcaatcaaccaatcaaatcaatgagatcagacacataaaaaagaagagtaaaaagaagttgataattactaggggatctgcagagctcgttgccggattgattcaaaataacgaagaaaaagcgagttctccttttccatccaagtctcaatgattcaagattaggtacgttcagaaatagagacaagtgattatcataaccagggtagcccttgggatgaagaataatacacctagagacaaaaccgaaagttgtgaaatcttttagacaattcgcgtaaagctaaaaagcataaagataggatgagtcttgtcgatttaccattcgcacccgccgccacttgagaaggacttcgaccttatcggatggttctcgtccgacaagttgtttatatcccaactgaagaccttcctcaattccgtccccatctgacttccaagtgtagtgtgtgtaggaggctaaagacaaaaactttacagctcctaacaaaaatccttcaaatacatttgaatatattttttgtatttttaatctaataacgtaattcgttgaccaaaaaaaaaaccctaataaagctatcataataattttttgtaacaccaatgtacagagaaaacaaataaagacaagatccaaaaaaaacttgttgtaattacgcaattattttacgtgattgccaacaaaaaaaaaggtcccaccgagacttgaactcgggttactggattcagagtccaatgtcctgaccactagaccatgggaccatttcgttacgatttctccatgttaatttaaaaattaaaacttagtgttcgagtactatatgaccaatgtcgctgccggtgcggctgcttgaagaaattaccgatgcgaagattttaccggaagcccttttctgtaccgcttctgaatcgtccgcattgttcttcacaatctcactgtttgtacaaaaatggagactttttgtcggatgattcaaagtgctcgcctttatcgagctcaaggacgagtgttagatgggtgttcaatagcagctcacttcctcctcccgaatggatagaaccttttaacgatgtctccgatttggtgaaatcgaatcgtaatctcctgccgtcgccatgggtaagccaaattctcaaccttttagatggttcggcttctatggaatcgaatctagatggtttctgccgtaagtttcttatcaaactatcgcccaattttgtttcgtttgtgttgaaatccgatgagattcgcgaaaaacctgatattgcttggagtttcttctgttggtctcgtaagcagaagaagtatactcataacctcgagtgttatgtctccttggttgatgtattggctctggcaaaagatgtggatagaattaggtttgtaagcagtgagattaagaaatttgagtttcctatgactgtttctgcggcgaatgctctgattaagagttttgggaagcttggaatggtggaggaattgttgtgggtttggcgtaaaatgaaagagaatgggattgagccgactttgtacacttataactttttgatgaacggtttagtgagcgccatgttcgttgattcggcagagcgtgtttttgaggttatggagagtggcaggatcaaaccagacattgtgacttataacacaatgatcaaaggttattgtaaagcagggcagacacagaaagctatggagaagcttagagatatggagacgagaggtcatgaggctgataagattacgtatatgactatgatccaggcttgttatgcagatagcgactttggttcttgtgtggctttgtatcaagagatggatgagaagggaattcaagtcccgcctcatgcgtttagcttagtgattggtggactttgtaaggaagggaaattgaatgaagggtatactgtttttgagaatatgatacgtaaaggatctaaaccaaatgtagctatatacacggttttgatagatggttatgcgaaaagtggaagtgttgaagacgcgataaggcttttacatagaatgatagacgaagggtttaaacccgatgtggtaacttattctgtcgtagttaatggtttgtgtaaaaacgggagagtggaagaggcattggactatttccatacttgccggtttgacggattggctatcaattcaatgttttattctagtctcattgatggtttaggaaaagcgggcagagtagatgaagccgagaggctttttgaagagatgtctgagaaaggatgcacaagggattcatactgttacaatgcactgatcgatgcgtttacaaagcatcggaaagtcgatgaagcgatagccctgtttaagagaatggaagaagaagaaggttgtgatcaaacggtttatacatacacgatactcttatccggaatgttcaaagaacatagaaacgaggaggcgttaaagctttgggacatgatgatcgataaaggcattacaccaaccgcagcttgcttcagggcgttgtcgactgggctatgtttgtccggaaaagtggcgagagcttgtaagatactggatgagttagcaccaatgggtgtgattcttgatgcagcttgtgaagatatgataaatacattgtgtaaagctggtcggataaaagaagcttgtaaattagctgatgggataacagagagaggaagagaagtgccagggaggatcagaacagtgatgatcaatgcgttgaggaaagtgggaaaagcagatttagcaatgaagctaatgcatagcaaaattgggattggttatgaaagaatgggtagtgttaaaaggcgtgtcaagtttacgactttacttgaaacttgttttgactcttgagttttaagaattgtttgcgtttatatcttcataaaaccccatcaccggagagaacaaggctcaatcttcgtgataatttgaaggatgaagaagattcagaacaacaaaacgttgtcggcgtttgattccagtcatcgccggagagaacaagactctccatttgttacttccatggcttagtatatgggtaggtcttggtgtaagcttgtattttgtattctcgatttgtacgattttattattaaataagaaaatagacagttcaacaacaacgtattttattttcatgaaagaatcagtctccactaaccgcctcaaaaactgtcgaagcccattgggcacttgcaaagcccaactgtttataaatagaaatccagagtcagagatccattcgatagcactttcctctctttctctcatcgtaaaaccgttctttgttttctctatttctctcgtctctttcttctacccagatcactgattgattagtcgtgaattttactctactctttcatcaattttactgtgtttaattcataaaacaaaacaaacgatcgatttttgtttttttttggggatgaagatcagaagcaaaagcaaaggctatcgtcaagagatcaaatcaacttgcaccgactccaacactctgttctcaaaaggtacttttcgtcttgttggaatttttggccaaataacgtcttttttttatatggtatctaattactgtattctggttgatcgcaaaacaaagaattctcatgtttaaagtgggtttcgtctaatccaatttgaattttaggtcttatattatttccctagctctaaccctaatcatatatttctcaaagtttttgatttttattcaagattccttctaatcaattatttcttctttgtatgtagatgtggttgcaacttcggagcttttttcatctgtgatatcgtagcgtgtgaaagacggataattctacagagacaatgcatcatcccattcggctaggtcaattttcatctctatcttgtttataatctataatcttatagatagtttaattacaaaaaaggtttttatactatttttgatttttcaaaacaaaatatatttctcaaaaaaattatttttaatggttttcaactctctctttttttttcttctataatactaaattaatatgacgttgtgaaatctaaccggattttggatcccgccagttaaccgtggtcattagcgattccacaaatccaacatgtttttcacatcttcatatatatttagcatttatttttcttaaaaagttttcaattctttttttttttgttttaaaattttataaatactaaattaatatgacgttgtgaaatctaaccggattttggatcccgccatttaaccttggtcattagcgattccacaaatccaacatgtttttcacatcttcatatatatttagcatttatttattttttaaaaaattcaactctttttttaaaaggttatataaatattaaattaatatgatgttgtgaaatctaaccggattttggatcccgccattgaaccgtggttattagcgattccacaaatccaacatgttttcacattttcatgtatatttagcattttttttttttttttcttaaaagattttcaactcttttttttctataaatattaattaatatgacgttgttaaatctaaccggatttaaaaaaatatccaaaatccttaagagatgtgttatgttcaatatagtttacacataatttaaacttttaacatttatttttattttattaaatcgctttggttatgtttaaaaacggttagtttttaacgtatttaatacgacacatatataaatacgtcaaaaattaaccggacttaacatcccatcttttataattaacactcggctaagttttaaagtttctcacgaataatgttttatgtaatttgtatatacatgatattttgtggttggaccggtttttaaaatcaagatctgaaaactttatataatttccctttcttgtgcttcgttcggtgtgttctttgcatgtaacatgttagcacgataagctgaaacattatagtattgatcttttaatatagttaaatcttcattatataattgagttataactttgataaactaacaatagaatgaatgatctgttacaaacgaagttgtgacatgtcactttcgagccactaaccgcaaagttcggattcaaacttttgaagtgcgttaaagtgttcgtaaccaatatttaaaaccggattcaaattgaatcaaaccgttgaaaaactcaacatgaaaagcaaaaccggaattctattactagtgaactaaatccaattgaccgaataaaatccagtaaaccgatccataaaccaaaattggaagaaaacaatgcctgtttaataggtgttgaaactttgctgaaaaaaaacgaagcgagcaccctctaaaatgccttcgatttctctggcgccattgatttagttttctctctctgactacaaagtatccattcgttcaaaccagtttcttcccattttcgatttctgtcaaaattcaccaaccaactccaaaaactctgttattgaataagtttcttgatcttaaaacaaacgatctcaaagaatggcacgacacgatcctaatccatttgctgatgaagagatcaatccttttgcggtaaagagctctgtttcataatgactgaatactaatgtctgatctttctgtagtctttctccatttgatctcaatttattatgttgtagaatcatacaagtgttcctcctgcgagcaactcttatctcaagccacttccaccggaaccttatgatcgtggtgcaaccgttgatatccctttggattctggcaatgtacgatattttcaataccttctgcattttgcctttcatgtttactcaaaatctggttagatgaaaacggaagttttcattttgctgattctgttcgcaggatcttcgagctaaagagatggaactccaggccaaggagaacgaattgaagcggaaagagcaggtgatttctagtaaccgagtctcttgggcgatattcaaatataatctttagacctactgattcaatgaggactgtatctaacagtcttcttcttctcattgcaatacaggagcttaaaagaagagaggacgcaatagcacgaagtagtgcaatcttctatatgtctttttacatcttccaatgaccttttacgggtttttgtagctaacttgatacggttgttttggcagctggagttgtcattgaagagaagaattggccggagttttttcctttaattcatcatgacattccaaatgagattccaattcatttacagaagatccaatacgtcgcattcaccacattgttaggtatgtgaacccttcttagaccgctgcaaaaaaatcaagaaaatgttaacagggtaaattcttgaactatgcagggttagtaggatgtctcttgtggaatattgtggcagtaactgtagcttggatcaaaggagaaggttactgtttttacctaaacgatcagattcgtaatgttaattcctctgaccatgttgaatcatctgatgtgttctgttttgtaatcaggtcccactatatggcttctctcaataatttacttccttgctggggtacctggagcgtacgtcttatggtaccgtcctctttaccgagctacaaggtaaaaccagctctcttagtatatgctggaacacgatgcattttaaatagatatatgaaatgagtcaataatacaatgcatgtgtacctcttgcagaactgatagtgccctgaagtttggagcttttttctttttttacgtggtaagaaaaccgaatttctattggtagatttcctctgcatttaagtttttcaagaagccatgagtaaataaacccgtgtcttgcacttttcagttccacatcgcgttctgcggctttgctgcagttgctccaccagtcatcttccaaggaaagtctctcacgtaagagttttcttctagataaaagcatcagaatcagccttttaagttttacattctttaacgattcgtcatttcatgaacatgttaaaaaccttttgagtctttgatgatctccatctgatccatgcattgttggttatatgaacagaggtttcttgccagcaatcgagcttctaactactaatgctgcagtcggggtacgtaacctttctgtctatttacaagtactttacttcggattgtgagagtcttcttagtcctcacctaattttcttctttttcaccctcacagataatgtatttcattggtgctgggttcttctgcatcgaaacacttctcaatatctgggtcattcaggtttctcaacttcttctactccagaatttatcagcactgtaaatcacttgaatccatctgtttttctaacccatgacgtgcaatactcgactttcagcaagtatatgcatacttccgagggagtggcaaagctgcagagatgaagcgtgaagctacaaaatcgaccttgatgcgtgcactatgaagaaatcactcttcaccagaaaagtatcagtggctgcttgaggttaaaatcttgaatcatacacaaaatatttgacacaaccctttcctctgcaaagtctaggctgccaactctcttttgtttgaattactttgtaatggagacctcaaggaaactttgtgtggtttaaagttgtcaacaccatttcttcatgtatactagagcaaggtccttagagggatacgaatctttatagctttctagtgagcatcaatccagctctgtccaacagtctttgctacccctcgtctaaccattaacttacgaatattgagtgcatcaccatggcgacctatcgccttgtacatgttactgagaagcacataactcatgtggtactttggttccaactccatcattctctttgcaatccgctctgcaactctggaggcatctgcatttgcagcacaaggtccaagcagaactccccacagagacgcatcatttctacactctgctctctccaacagattctccgcttcttcaaacaaacctgcacgtcctagaaggtcaatcatgcaactgtaatgctcagtacctggtttaatcccgtaactcttagccatcaacacaaagtaattccgtccctcgtcaaccattcccgtatgaccacatgcagtaagaatcgcaataaaactgatgtagtcaggctttatcccctttttaaccatatcattgaagaaactaacagcttcttcacctcttccattctgagcaagcgcagagagcattgcgttccacgttatcatgttcctaattgacatcttggagtaaacacgactagcagaatcaatgcacccggatttcccatacaagtcaattaaagccgattctacaatcacattaccaaaacaccctcttctcacatactggccatgaatttctttcccaagtctcactgccgccaaaccagcacacgccttaagaacagtgccgaaacagtacagatctttctcttccatctccctgaaaatctcaattgctttttcatgctctccattctgacagtatcccccgagtaaggcagaccaagaaacactgtttttcttagacattccattgaacacttgcctagcctcccgtacggatccacatttaccatacatatcaagaagactactctcgaccaccacattgctacctatcccatttgtaataagcttcccatgaatctctttcccttgcttcagcctcctcagattaccacaagcagtcaaaaccgttccaaatgtagacccatcaggcaccaaccctttccctctatgcatcgcataaaaaagtcccaaagcttcctcgtacaagtcgttcttagaaaacgcagaaagcacagctgtccaacaaataacatctggctcaggcatttcgtcgaacactcggcgtgcatctactggttctctattcacaccgtacaaatacgccaatgtgctagagataaaatggttccactcgaacccatgagtaataacaacaccatggaaacatctccctagcctaacttctccaagctcagagcaagccttaaccgccgaagacaacgtaaactcattcgcatccaaaccaaaactcaccatctccacaaacacctcaagcgccttaacgtgttctttaccggtaacgtatccagacatcatcgaagtccacgagatggcgtctttgacgaatctaccatcgaaaactctccgagtctccctcataccaggtcccaacttgaagtacagagagagcaagctgttcccaacgtttcggtccgtttccagacccgatttgacgacatgggcatgaaactgaatgccatggataaaggagaagactttgttgcatgtttgcaagagagaggcataaagctttggcgttgcggggatctcagacgagtgtgttgagtttaggatccgaatggcttcggtgagctgacccaatttacaaagctccaggatccgggattgtttcgtcggagcagaggaagaaattgacggcgtgagacataaagaggcgtgttgactgaaatggcgcttcaggatgatgagattcatcggaggcaccacaatcaccggtgaacaattcttccaagttcgttacttataaataaagctaatggaacattgaaaattaatcaaattggtaaatctaattatgtagattttgtaaagtagacatctttatattttataactgatttattaattataaggattaaaattaaaataaatacgataaaaaaataaataaagaaaagaaaaaaagacaggtggagggagagatgaacggctaaaccctaattgagagggaagtggcaccaccaagagagccaaagccaagtactctctgctcttaaaaccctaacgtatctgcgataaaccctcgcgcctttgctaaaatagctgcctttatataacttagccgccactttaattctcgaaagtcatgttctttcacttttcttcgctggttcttcttcgcgctctctcttcttgccatggttggatttcccgctaatcaagcaaaaaccgttgaagaagagctacctttgcaagtcgtagccgatcaagaccccaaggtaaaaactttcaaggactcttttgatttcccttccatcgattcctttccggatttcgattctatcacttggtctgagagtaatcggaacgttgaggattttagcatagaagatacggactttgatttctttgagtaccacatggagatacctcaagaagatgttgttactgttagcgatgtaatgtgtccggagaatcagactactgttaattctgagtcgattgagggaaagcttgaggtctttaatgatgacatgtctggggaagttggtgtgagttcggttaggtctgagtcgatggttgaagtaaagcctgtgctttgtgatgtcatgtctgaggaagttggagtgagctcggttgaggtagagcccaatgtttgtgttgagatgtctgcaaacggtggggatgaaccagcagtaaaagattcagaaccggttgtttctgaaaactcgaggtcaatggaaggtgagactgagccagttgttgtgtctgatgcgtctgttgcttgtcccaccatggatttggatgaatcagggttgaagaaaactgatgagggtttggcttgttctattgaagtagggttggagaaggtaagtttggccgtggatgatgatgagaagagtgatgaggctaagggggaaatggattctgctgagtctgagagcgaaacctcgagctcttctgcaagcagtagtgatagtagtagcagtgaagaagaggagagtgatgaggacgagagcgacaaagaggaaaataagaaggaagaaaagtttgaacacatggttgtggggaaagaggatgatctagcaggggacttgaagagggtgagatagagaatttagatgaggagaatggggatgacgatattgaggatgaggatgatgatgatgatgatgatgatgatgacgatgatgatgtgaatgagatggttgcttggagcaatgatgaggatgatgaccttggtttgcaaacaaaagaacctatcaggtcaaagaatgagctcaaggtacatatccttcagcttttcacatttcatagctattactattagtggttgatattttttccattagtggttgactgcgacaagaaaactatgtactgtcctcaaggtttttagcattactctttgaaggatggaagccttctttttgttgtgtaaattttgaaagatttttcccctttttaaaacttttgcaggagcttcctccagttcctcctgtggatgtcactctggaaccacaccatgccacacttcctgttggagttgttctttcggtatattaaaaattacctctacttgtatgctattgcttctctgtttgatgtcttgacaatccactgctaaaagcatacccgtctcatttgtgattttacaggtaatgagcgcacaagtaatagttgagggaatggaaaagcatagtcctttgactgaaggttctatcctttggataactgaaaaaagaacgccattgggactggtggatgagatctttggacccgtgaagtgcccttattatattgtgaggttcaattcagagagtgaagtgccagaaggggtttgtcaagggacacctgtctcatttgtcgccgatttcgctcaacatattctcaatatcaaggaactgcagaagaaaggttacgatgcatctggggataacgacgaggagataccagacgagctagagttctcagatgatgaaaaagaagccgaatacagaagaatgcagaagttggaaaagagaggaatgatgagtgaccagaaaaccggtaacaccaggaacaagaagaagaaaaaccgagatcccggaaggcctacaagcagttactcaggggaatggacgaagaaccagggatctagttctctatcgtcaaaccgttctgatcctcaaatgggtggtccgcgtcctcaaatggacggttttcctccaaacaatgcagcatggagaccccagagtaatcagcagaacccatatcagcttcctcctatacctaatcagatgggaatgcagatacctttcatggcaatgcaaaatcaaaatcaaatgatgttccaaccgcagttcaatggtggccagatgccaatgccaggtggaccgggaggcttaaacttctttccaggacaggcttcagcgccatggcctgcaatggtaggtcagaattgtttcaaccaacagtttgggatgggtcgtggtattcagcagcagccattaccaaatgagctgagttttaatatgttttctcaaggtcttcaaatgcacccaccacagtcccaaatgcaccggccacagtctcaaatgaatccacagttccaaatgccaccacagttccagccccaccagcaatctccaatgaacccgcagtaccaaatgatgcaccgaccacagtctccagcgaacccgcagttccaaatgcaagcacaatctgatgtgcgaccactacagtcacaaatcccgcagtcaccaagtgatttgcagtccccaatggaaccacaatctcaagggtttagcagcgggcagtcttctgaacggggaaggggcttccatggtcgtggtagaggtagagggcggggtcgcttcggacgtgggcgaggtagaggccggcaacagtctggatgaaactttttttggaagcatactaaactgctaatgtgtgtcatagccaggctatatttagttttgtatgccagtttttgtatgattatgatctttttttttttacacattctctataacagtaaaacgaactttgatttctctgttgttccttctccttgtaccaccaaagtcaaactggctatagagtagaatagactatactcactagcagtgaattaggcagcaacataagaacagtgttttttttttctcgccgttaatttcgttacttatctaacgtattattatgagttgataatgccacgtgtacgtcatcgcttgtaaagggtttgagagtcgtacatgatcattaaattctctactgattgattttgattttgccaacaattattaaagcttacaccacgaaatgtttgatgtttaaattaattgccatgtctctctgtctctctctgtatctctctctctcttcttccccgcgtcgatttcacattttctcttttaagacagctttgaatctacagacaacttcatttttaccaaaatttctgtttcttcaaaggattgaactttcatatttctctcttgcccagttctgagttattgcaatcagaagttgtaaacacttttcctgtctctttctgctacccgaatttatcttctttagcgtctgtctctttcagcggacgtgtcttgtctctttaaggtaatttcaagacttaaacttgaagtatctctggccttcttctgctgtctgtttcatttttgaaatcgatttggagattagatctgactcagcttcgactaaaagccattgctttcgcctttggattgttgattccctagtggatgttctttatctctttaaaaaggtcctctcttttaaatcaatttttgctgaacttgcccaattcggaaactttgttgcaagtctcctcttggtctctggtaatcgttttcgcatcaatccttatattgatttgaatctgtaatcagattcgatctttgatgctaatttggtattctatagaagacaacatatctgaattgggtttcttcgttggataggataagtggttagggaatgagaaaattgtataggaagctggtttcattcagagacccatttgctagggtcaagagacatgttagttcacattcagggtttagagctttcagcgacagaaaatggttgttcccttttctagctagcttgatcatgtccattactcttctgattttgttaatttctggccaattcgacaacttctttggggaagaagatcaattaccagttgatgttgtttcagagtctaatgactactttgtagaatcagatttcaagcaatctatgaattcgacggctgatgttaatccagagcctcctagattagcttatttaatatcgggaacaaaaggcgatagtcataggatgatgaggactttacaagctgtgtaccatcctagaaaccagtatgttctgcatttggatcttgaggctccacctcgagaacggatggagctggccatgtccgtgaagactgatccgactttccgtgaaatggagaatgttcgtgtgatggctcagtctaatcttgttacttataaaggccctacaatgattgcttgtactcttcaagccgtttcaatcttgctaagagaaagcttacattgggattggtttcttaaccttagtgcctcggattatcctctagtaacacaagatggttagtaactctctctataatgctttagtagtctatgatccttttgagctttatatttagttgtgacttataattttggcttttctttttgtttctgtagatttgttgtatgtcttctcaaatctgtctcggaatgtcaatttcatcgagaatatgcagctcaccggatggaaactgtaagtataaccatgcttcattattcagagtcacaccagaatctcaaagcatctgtacttacttggaatttcttagcaggaatcagagggctaaatcaatcattgttgatcctgccctatacctatcgaagaaatccgatatcgcttggactactcaacggcgatcacttccaaattctttcaggctattcactggttatcttctttaatctcacagtttcatatctgtgagaaagattatgaaatgtttgaagatgatttatgtcttaattctgcaggctcagcttggataatgttgactcggtctttcctcgagtactgcatttggggatgggataatttcccaagaacaatactaatgtactacacaaatttcgtatcttctcctgaaggatacttccacacagtaatctgcaacagcaaagagtttatcaacactgcaatcggtcacgaccttcactacattgcttgggacagtcctccaaagcaacaccctagatctctctcgttgaaggattttgacaatatggtcaagagcaaagctccatttgcacgcaagttccacaaaaacgatcctgcgttagacaagatcgataaagagctattgggacggacacaccggtttgcaccaggaggatggtgtgtcgggagttcagctaatggcaatgatcagtgctctgtgcaaggtgacgactcggtgttgaaaccaggacctggttctgagaggttgcaggagcttgttcaaacactttcctctgaagaatttaggcgaaaacagtgttcttgaagttatctactgatgacgcaaaatataacgttgtacagtatattgttttgtttgattataaatttttggttatagaaatttcttcgaaacacatgaattaagaacaagtgacgtgcagtgggcttttatgggccgtatagcgtcagtgaagtggcattgatagggccatatttataggggaccaagaataaggcccaattagcttgtacagccgaaaataaaaaagatcgccgttgccggggatcgaacccgggtcacccgcgtgacaggcgggaatacttaccactatactacaacgactttgttgtttggttgtttagaacataactatttaacaacaaactaatttgtatttcttgaaggctgacgccaacaccgaaagctctatctccaccactccatgtcttcttcgtacgcgtcgagctgcactaaattgatctctctcaccaaacaattaagctcttacgcgaaccaaggaaaccatgaacaagctcttaatctctttcttcaaatgcattcttctttcgccttacctctcgatgcacacgtcttctcactcgctctcaaatcgtgcgctgcagctttccgtcctgttctcggtggatcagtccatgcacactccgtcaaatccaattttctgtcgaacccatttgttggatgcgcgttactcgatatgtatggtaaatgcttgtctgtttctcatgctcgtaaactgttcgacgaaattcctcagaggaatgcggtagtatggaacgcgatgatttcgcattacacacattgtgggaaggttaaggaagcagtggagttgtatgaagctatggatgttatgccaaatgagtcttctttcaatgctatcataaagggtttagttggtacagaagatgggtcttatagagctattgaattctataggaagatgatagagtttagattcaagcctaatttgattacccttcttgcgttagtatctgcttgctcagccattggggcttttcgtttaataaaagagatccattcatatgcttttaggaatctaattgagccgcaccctcagttgaaaagcgggttagtagaggcgtatgggaggtgtggaagcattgtctatgtgcaattggtgtttgatagcatggaagatagggatgtggttgcttggagtagcttgatatccgcttatgcacttcacggtgacgcggaatctgctctaaaaacatttcaagaaatggaattggcgaaagtaacaccggatgacatagcgtttctgaacgtgctaaaggcttgtagtcacgctggtttagctgatgaggctcttgtatactttaagagaatgcagggagattacggtttgcgtgcaagcaaggatcattactcgtgtttggtggatgtcttaagcagagtagggagatttgaagaagcttataaagtgattcaagctatgcctgagaagccaacggctaagacatggggggctttgcttggagcttgtaggaactacggtgagattgagctagcagagattgctgcaagagaattgttgatggtagagccagagaatcccgcgaattatgtgttgttggggaagatatatatgagtgttggaagacaagaagaggcagagagacttagattgaagatgaaggagagtggagtgaaggtttcaccaggtagtagttggtgtttgttcaaagattgacatattaccatgctcatgaaatttttgtaagctcatacacaattttcgaaatcaaggttgtataattatacttaatactattcttaaattataagaaaataatatgcaaaaatacctgcaaaagaagtttgtaatttgtgatcttgtaacaagttaaggcataacattcgcatatgaatttgaattttgtaaggccgggcatatttgagccatcacaaacctaacgggggccggttaacgtctaaccgcaacaataaactaacgggggcaatttcgacttcttggcatagagagaatcaggctagggttttgaccagccgcgtgctatttaagtcatcttcttccttgctttgtgtcgtacaattagaatcgatctttagaatttgggttcttcgtcaatcgctttagggtttgattatatatatatagtgtggttagcaggagcctcccgggctaatctgataactaaggtacttgaagaagtaagccccaaagctcctgctagattatttttagcgtttgtgttgcagatttgccgtattccttaggcttttctgtgtcaaaaaagcgtctatatctctcttttctatgtatgttttgctttgagctgtgtttgttgatggaatcgagttggtatcaacgtttgtttatgtggcaatgattataaacttacccgcgcttctgagattattcaatgaagtagatacggtaaatacatggttgaatttcttaatatgagccaaagttttgttttttttttatatgggtttctgtgttttgattggctgggatgatgaattgtaacagcttgatacgccagttctgcttcagataattcttgatcgaaaaagctgtattcttatccgagcctttcattgctattttgtctttcttctgagttattatttcttgggaatgtcgatgaggatctaatccaatcttacgaggtgcagtggagctgagaccctgttttacagggagaaccccttggcagaagctgtaatttctttgacttcaatggattttactgagactttctcattcatttatcgcttttattgaaatctatttgagtttaaactatacacttgcacttgttttcttagtgcttgtagtctgaaaaaactcataaattaccagtgttctcatcagctttggtctccttaaccatgagacttgagttaaacaagatcactacattattctctttcaattttatattatctttttgtttccttgttttgagtttctgttttcggacaaagagtatgttttgcccgtatttatgaggttggatatggatattaaacaatatgaaaagcgttggtggaacggatagacttgttatgattcgtgggactgaacaacttcggttttgtgttgaatcatttcgttgctacaagttattggatgagaaaggggctgctacgttgcgaatttcttgatccccttttgtagaagtgagtcaaacacatccattttcttcttctctagtgctattccaatctcaactccattgctgccgtctctggactctgagaatgcgatagaaccacctgtttctatgtgcactatctccattttgcagggctttcctaatccaaaatccatgtcatacagtcccaatttcggagctcctgcaattgaggttggataatgggacatgacccatttacgtactccttgtccccatcttggtgctgtcttcaacagatcgcttgataacatatctttgattctcgctgtgattgcatctgaagcagccatgacgcatttttctcctagcaaatcgtgttcttgactgatacgataccaggagccatacagttgccaaagtatgtttgtggtattggttgtgtgtacttgagacgattcctgcaatccacgttgatcatcaagtgaaagacttcgtccttggcctctgtttcactgtcttgaacaagtgtcttaatcaagcttacccaaatgaaagctagagtcaccacgaaggtagaaacaggagattgattctcagactgctctgtaacccaactcttgagattgtctatctgcttccggctcaatgtaaaagtggctctgaccatgttctcaggcgtaacatgtgaactgtgttttgcagagttttggctccaaaaccgctccaaatgtcctgcggctacctctcctgggtccttgattatgtttctgcagctgtgaataggcagagagggtagaagaaccgtggccggatctttgccgctggatttggtcaatgacatccaatacttcatgaaatgactgaaggtgactccatctgctacaacatgtgtagctgagttgcctatacagattccagctccagggaagatggtgacttgcattgccattattggtcgcatctgaattccttccggagagacgtgaggaggaggtaacttgggcaagacgccatgcaacacactgatatctttaggggaatcagacttcagttggtcgaagtcggtttcagtagactctgctacggtgaaaacaagagagtcttcgccagcgttgtagtgtaaatatggagggtcgggacgaggcgggataatcagtttaccggcgtaagggaagaaatgttggagagtgatggagagggaatgtttgaggttgggtacaaagtcttggaggaaagattcagttgagttttggtaagagaagaagaagagagaatcggcgagtgggagagagagccagggggcatcgaagaaggtgagaggaagagtggtggatgcaacggtgccctttgggggagagatgtgacaggtctcgatgatgttataaggttgaagttgagccgccatggtgtgattaagttttgaggaaatgagttcatatttgtctttttataaaaggaaaatgaaaccaccgggcaagtgaagaagttgattctgttacgtactttggtcaaaaaaacgctctcatgtgccccaacctccacaaccaccattttttttggttttcaaaacatttgttggtcctttatgtttgcttatttatcaatggaactcacaaatcacaattagtattttcgaattttataatctttgaaaaccaaaaacattacttttaagtacacaattgaaattcatagctaaatagttaacattactgctgcaactctatattaattgtagagttatggaaaaacaaaagtacaaactaaaataaagttcgttaaactagaattttaccccggaaaatccactatttttatgatatctcctttaccggagttacacaaatacactaaccatatgtctatagtaatctttgtcacatatcaactcaacccactaaaatataattctatcctctctggtttgtgtcgtatcatttatcaaccctagttagatcaataatctcataattccccaatgcgagggcatcattaggattgtttatcagtaccatcacatcatctttttcttgctcttgagtaacgtcacaatcttcttgacgttgttgttgttgttgttgttgttgttgttgttgagtaacttcgcgagattattctccatctagcatcatcgtctcaaggtcatcattagcaaaaccggttaattcagcctcttctggctgctcacgatcttcatgtccctctagcatcgtctcaaggctatcagcaaaaccggttaaatcagcatcttctggctgctcatgatcttcttgtccctctagcatcgtctcaaggctatcagcaaaaccggttaaatcagcctcttctttctgctcacggtcttcttgtccctctagcatcatctcaagctgatcagcaaaaccggttaaagcatcctcttcttacactacttggttccgtaagatgttgttggtgttctccgccacctgagtctgatgagcctgatggttaacgagtccaaactcgttgacgttcgcctctttcttgtatcggatccgacacaagacaaccttttggaggtcatcactctagtgaagagaatactccatcttctgtcaatcggtcttgacaagctttccatgcactctcctgtggtacgtgaaagactgctcgtaacccatcacccttttgcatgtgtccgtccttgatctcttttttcccatcgttgcttctccaagtgccgccttcgcttcctcctcttgcggctaccttccggtgtacgcttaatatcttgccacctcgttcagtaagcggaacaaagtagtaccactcgttgttattgaacaaaggattgtttacgtgaggaagaagccaagggtagtcttggtggatgtccatagttgttatgaaactgctctgatttctctccaccttgtttcgaagataaagcctcaccaaccctagatccgtcggacaaaaccgtgatccaaccggaagaatcttcatatcgatcgtatagattcgaagaagaactagctaaggtacctatataattgctaaggttaaaagtgctctttcgtctcttgtgtaatactgctctgtgaagcagggttttcttgaattcctcgcaggtcaagcggctgaactctctatatgatcatgaatatatagacaacgtgatgggcccaaccggattttcttttgtcagcgattaactattttttggaaagaataagacggttgtaattacatctatttggttatttgaaataataattagataggattcgaatctataatacacttttgttttgtttatcacagattctaacgatagataaagatatattacatgaccatgatttatccacatcaaaatagcatagtgccgtaaaccggctaatcgttttgggcctaatttgggcaattaagcccgttaagaaggataagagcctattgtgtatcaatatcttcggttcgaccaaattaaaccgcaattttaatttcgtgtctggtttggtttcggctaaataattcagaagtggtttagtctgagaagactggaactgtgttttcttttaccttgagctgttaaataaaaagggagagcggtcaaaatcagtggacgacgaagacttcttatcatttaatatctctccatcatcatcttcttcttcagcatcaaatccaaattcggatcaaacatggcttctcactcgtcgactctcctctcttctcctactttcgctcctttctcctctcatcgtcttcattattctcccaatccctctactctcagattctcccgtccaatcagaaataaacctaatctcgccttgcgatgttcagtctcaattgagaaagaagttcccgaaactgaacgaccctttactttccttagggattctgatgacgtcactccatcttcttcttcttcttccgtcagggctcgtttcgagactatgattagggctgctcaagacagtgtttgtgatgcaattgaagctatagaaggcggtcctaagtttaaagaagatgtttggtctcgacctggtggtggcggtggaatcagtcgtgtgttgcaggacgggaatgtctttgagaaagctggtgttaatgtctctgtggtttatggtgttatgcctcctgaagcttatagagctgcaaagggctcagcttctgatcagaaacctggtcctgttccgttcttcgctgctggagtcagctcggtaatgaatctctcccttcaattttacgattcttggaggttctcatgttttatcattacggatttctgtgtgattctaggttttgcatcccaagaacccttttgccccaaccctgcatttcaattatcgctatttcgagacagatgctccaaagggtaaaaaagctaaagtctcagtgagattgtaaagttgttgtcttttgtttggacaacagtcttaagtttttaattttcaacggcgcagatgttcctggagctccaaggcaatggtggtttggtggtggcactgatttcactcctgcttacatctttgaagaagatgtcaagcatttccattcggtactgagccttattccttgttctaaagatatgagctttgtgatcatggagttgcttttatataaactgctctttgttgttgtagattcaaaagcaagcctgtgacaaatttgacccttccttctatccccgattcaagaagtggtgtgatgactacttttacatcaaggtaagttttgtgagatcctgaagcattttctggaactgagggccttattctttgagttgtgtttagggatgttatagtcaaatctgagagggtagaaactgcttagagagacgttcagaagcctattgttagtgtgagggctttgaaaacttttcttagaaatctttgattttgcttgcagcaccgtgatgagagacgaggacttggagggatattttttgatgatcttaatgactatgatcaggaaatgcttctgtcatttgccactggtaagggactgattgtcctcaatctacaacaaacgatttattttaattggtctagtttcttggtagactaatttagcaattggtgtttacagaatgcgcaaactcagtggtgccggcttatatacctatagtagagaaaaggaaagacatggaatttacagagcagcacaaggcatggcaacagttgcgacgagggcgatatgtcgaattcaacttggtactatgaccaaaacattagtctttttctctgttctcactctcatctctccaatctttcgttatgaaccttgttcactaatgtatttgtaatgatggatggaaggtatatgatcggggaacgacatttggtctgaagacaggaggacgaatagagagcattctcgtctctcttccggctttcagcaagatgggaatatgaccatgtaagttctttcctcatttgtgaagaaacttggtctaaattcaattgaatatggcaatgtagtaatggtgtttgtgagtgcagaaaccggaagaggggaccgaagagtggaagctattggatgcttgcatcaacccgaaggagtggatctagcctgtgtttcccattgttgtgagaagagtgagtttatttccattgtttcatgtaagttttgagcagctttagaggattagataactggagagatggagaaagagagtgtgtaaggtcaggtcaaaatctagtcttgtgatgtgcatgttaacatcatctcctttctctctttgcgatggcaatgaagacaaactaagagcagtgttgttaaaagtcaaaacttaccaatgcaaacagttggtttcttgcaagttttgagcagctttagaggattagattactgaaaagaaagttatactctagccttgtgatgtgcatgttaacatgcgtctgttacgctgtcgtttcgtttctttcttttgccaatggcaacgaagacaacttgtgcattcaactttttcacaagtgacatgcttatctacggactctaatccaaatccatatcctccttaagaacccaaaacaaaaacttattgctcaaagtgttgaaatctgagcttttccaaagagaagaaacagtgatcagcccagcctaatgtaagccattaggcctcttagtatttttttttttttttttttttgtcatcaagcctcttagtgttagctgtcataatttcctttttttttcatctctctcgttattacgccctgaatcatttaataatccccaaataaagcaataaatttctattttttgtttgtttgtacagaattctatgcaaatcagtgtattttttttatgtagaaatagtgcttaacgcctgtaagtgttaatcaatactttaatctataaatagggtacaaatttaaaattattcaaagacaataacatccttaaaaagaaaaaaaatagattcacttgtcttattgtaaaaagagctaataatgaaacaaagccaaatgaagaactaaatatgaggttcatcaattttttatatttactttaatattttatttttcccgactactttaatgttttttgtcttattcattacacactaataagccatggaaagttgcggcaaagagttttatcgaccgttgcacaaactccttttgcgtgttacgctcaccccggcccacatgcctcgtggggcccatttagataactttcatatctatcatctgaacataactcccaaactacccctgttcatagctccatatatgataaatctttgactacactgttataaggttataaacatttaaataaattaaagaacaactctgatatagagaggaaatcattgaatagtattttacttgactttgattaaggaaattttctataaaaaatagttatttaagtaataaataattcgtttgaagaaccaaatctggcagtccaaaaattcatattaaggggtggaaacgtcatttaaggacataaacagtgaagttctgccatgtcatccgccgcttagcctccaggggtatatccgtaaattacaaactctgctgtgtattacttaaataccatacgtggcaatatgcgattggttaagacagttaatgtcaatgataaaagactctgaactctcaagtccgaagacagaagaatactaaactccttaaaattgctctcaaggcggagaagaagaagaagaagaagaagaagaagaaacggcgccgtttatttattgtctatcttggttttccacgcaccgaggttggtaattttcggagtctctgctttttgtgttactgaagatgaaactaatctaataattcaaagagtgagtctttgatttgtattttgctgttttgtgttttttgagtggagaaagctttaagaagagtgaaagatggtgatggactcatcaaaatggtggtggattggaaatcacaacactactaatttctctccttggcttcattctactctctctggtaaaaatttctctttttgggttccaagaatttttatatatttacttatgatttgattcttctttcgaattcgaagtgttgattttggtatatgtgtgtctattgatttcaaaggtaagctattgcgtttttgcttgatgaattttagtcacaaagctttgttgttgttggagaagatgctcttctcttggtatcttctcttggtatcttatcggtatttagtttcatcaaggtttgacacgtttattttggttcttttaatgtcttaatccaagtgttgatattggtgtatgggtctttggtcctctcaaaggtctttggttatcaagatacttgttgtaattgggttataatagtcgtagatgattctcttttggtatcttatctttctgagactaagtaatgatacacaattatttaacttcattgaggttttgacatggtgaactttgattgtgttattgaagaattggatgaaaagacaaaggaaatgctgagagtgattgatgaggatgctgattcttttgcggcacgagctgagatgtattacaagaaaaggcccgagcttatagctatggtggaagaattctaccgttcacatcgctccttggccgagaggtacgacttgttgagaccctcttctgtgcataaacatggctcagactcggagagtcatgagaaatcatcaacttgtgatgagtcttcttggtctgaggcttgtgagactcatgaggagtatgcggagtctgaaatagataacggtgaaagcaaatgggtcgatgaaagtgaaattgatggcattgttgaggaaatagaaccatcggaagtcgtttacagtgaaggtaatggaaattctgagatgatgaagatagagatagagaggctgagagaggagaataaggtttacagtgaaatggtgagagagaaagatgaagagaagagagaagctataaggcaaatgagtgtagcaatacaaatgcttaaagaagagaactcagagcttaagaaacgtgttaccaatactgttgttgcaaggcgtaataaggaaggtggtgattctcagaggaagcaacagatgtggaagccatttgagtttaagaagattaagcttgaagggttatgggggaaaggctttggcaattgggctctcccaaacacagattctacttccaaagagctcatgactctttagaggagacagagaggtccgagtgatcaagaacagaaactgaggaactttctctaaatatctttgtactctgtgataggtagggtatactctcaactagttagcgtaaggtatatcataggattgtagttatacctaagtccatggatgtttgttacattttctattgttcgtttcttgtttaaatataattgtctttcttttgaaatcaattgttttgttctttaatatctgtaagtttgttttcttttactttatgtgtgtaataaatggtgataagaagttgttgtttaaaaggtttgaccattattttagattttcataatgttcttctatatgattgtggttttgtcgaatgatattcttttatatgatcataagtctgaagacttttgggtctcactatgaggataagtaaatttcccaaagatctgcaaatttgaaatgccagagactggtgagatgtagaatctaactttgtttttacataagcacgttatctactatctacagattggatatagattaatctaacaacgtatacatattttagtagactaatgaatacttgattgatatgtcaaactttttcattgacttctttcatgaaatgcaatagaaatattatcatttactcacagagtaacagtggagattcttttaatacgttttcatgctaaattaagcggccgagtggttttttcttcttaattactactacactattatcgtttatcaatgactaattcacacaaacatgcacaaaaaccagaaaacaagtggggtcaaaacgtaaactaaataaagtcagcggccttctttgtgaaatttgatgtaagaatcggagctgatgtggttatttatttccgaatggcaaggacagtctgtcatatttatgtttttgccactagtatttccttatatttacgacactctacccttatttcagtgtcctctactcgttgtcactgaaaaatgaaaatgacctctcgtgtatggatataaattctacggtcaactagtatagtcgtatttatttctataactatttctcgatttacttacttttaatttttttttttacaaatctagaattggtcattggattctccgttccaaaaataaataatatgttacattaatataacacatattattattcacttcatcacttgttacaaataggattggattgattttaatttagttgtatggtgcgaaaacgataaaaatgtttatattcaatttaagttaaaaatgacagtttgcatttggagttggtttggctagattgaaatgtccaaaccctcttttcaatggtgtaatatattattgtctaaagctaaaatatatatattatataaaataattaatatggaaatttatagccgtgtccatgtgtattgtcaaatactcaaatttcaactgctcaaaagaaaaaaaaggtttttctttttgtgtttgtaactgtgtatgtttgatttggacctttaaacaaacctacactttttattattaataaagaattaaatatataaaaattttagtgataaaaatattaggacatatatctatcactactttaacgtcagatgatcatatccattataaggaggaattgataaaaaaaaatattagaataaaggtagactaactttaacaaacgatatccaacataaacaaaatactcacttttctttaaaccaaacgacaataaaaatccaaaaaaaaactaaacataaactaacattttgagttttaatgcagaagactgaagaaatgacagctatttaatttaaacataacaaaaaaaatagtcagcttattcacacactccatattaaaacaaaaacgcggataaaatggtaaattcggcatgacaacacatccataatcagacaaaacaatccgaaagtgttcccctggcatcccacaggctcgccttcttgtttaattgaacagctgttttaatggcaatatcgtaaatttagtaataacgacgagcccagatttagtccgtattttaatttaaccactttgtcacccattagttagtagttctctcatttttttttcttattattattattttttccaaaaaaaagaaagtaaataaataaatattcaggaagaaaaagcctgtagagagagaagaagaagaagaagaagaagaagacgacgaagtcgagagaaagaaataatggcggaggagacgatggagaacgaagagagggtgaagctgttcgtcggacaagttccgaagcacatgacggagattcagctcctcacattgtttcgagaattctccatcgtcaatgaagtcaacatcattaaagagaagacaacacgagctcctcgaggtttttttttaataaaaaaattcctctgttttctcccaaagaacgttacttttgatatctttttggtttttttcttagaagtttttctctgtttcgaggatacttgtagatggtttttcgattcgtctgattttggattctgaaaaccctaattttctccgtttcattcgtttaatttgaactctgtttttttctttctttaatttggaagttcccctgtttttttttttttttgttcttttttattgcgcgtgatttcttcgttgcttttattttatttttgaattgtgaaaaccctaatttcttgtggaattgtaggatgttgttttctgacatgtcctacaagggaagatgctgacaaggtgatcaatagttttcataacaagaagacattgcctggggtaagtcttctttcttgttaccattcttgaagctgttttgcttaattttctgggattttctgatatttgaatctgatgtttctgtgtacatcaaaactacttaaggtgacattttttcaagctactgattaaaatctcagattgatttttcttctttttatccgtctcgatctgcattgtacttgattattgtccctgttaattttgcatgttgttgcttggttatatatatcatatatccatcgaggtgaaatcatgaatctgatttggctgatcagaatctgccctatcagttattgtaatctgatgatactagttcgtttcaaatcctctctagctgatttcttcaaacccaagaaaccacattggtccactatagatgtatgtcagtggtcactaaaacgtgcaagatgcaaaaagctagaacatctctaggaatgagattataggaacccaaataccaagagaaaacttttgcttcattgtgttgactttttgttgagcgatctttaacaaaaatttggtgtatatatatatccttgcttctttcgatttttctgtggccggtatctgaacattaggatgcttatgggctatgtacactcttatccctctctcgaattatagaattcactttcttatgatatgtttcaggcatctagtccgttgcaagttaagtatgcagatggcgagttggaaagactaggtacgcaaaatgcttctgagtgatgaagtctaagcaccaaaagagttctttttttctttctttccagagtttggtcgcattttttaatttttgataccaatcaatttgatagatgttcttgactgttcgtgcaatccagagcacaaacttttcgtcggtatgcttccaaagaatgtctctgaaactgaagtccagtccttattctctgaatacggaaccattaaggatctacagattctaagagggtctctacaaactagcaaaggtatgtatctccacttgcttatgcatctatagcaagcactctataccagagttctgactgactttaattatttggttcatttggattattttaggctgtctgtttctaaagtacgagtctaaagaacaagcggtcgcagctatggaagccctcaacggaagacatataatggaggtatgtgcttattacatatacttctctcgaacattcttgttattttataaagacttgtatggagagtgtgacaatatcacattctttttttcttcttttagggagcaaatgttcctttgattgttaaatgggcagacacagaaaaggaaagacaagctcgaagacttctaaaagttcaatctcatgtctccagactcgatccgcaaaacccctccatgtttggagcattacctatgagttatgttcctccttacaatggatatggctatcatgtaagttcttgttttctcatctacttggattgaactttttggactcatgaggtttgaaaaagctgtagagattggtgtattttggttgcaagactttttttatttgatccttaaaacttttctctataacaggtgcctggaacttatggctacatgctaccacctatccagactcaacatgcatttcacaatgtgatttcacctaaccaaggtaacggcagggcattgcagggaaccgctttgacagagtctgtcccaccacgtttggccccccgcagaaacttcccaacggctcttggaaattacggttaccatggtcttcaatatcctatggcatttcctagagggatgatacctcctcgccttcctctaaccacagtttcacctggaatttctaataacggcacatcgataccttcctcgcttcaaacagaaggtttagttagtccaaaacaagaacaaataagattttgataagtttctagtcgttatgttactgatatttaaagcaatttctttgatgttctcaggaccagcaggtgcgaatctatttatttataacatacctcgggaattcgaggatcaagaactcgcggctacgtttcaaccttttggtaaggttctaagcgccaaggtgtttgtagacaaggccactggtataagcaaatgtttcggtaagctcttgctttcttcctctatcatcttcattctttcccctagactcgaattaaccgttacgcaacccttttgttgctgcacgcaggattcattagttatgactcacaggcagctgctcagaacgctattaacacaatgaacggttgccaattaagcggtaagaaattgaaagtccagcttaagagagacaacggtcaacagcagcaacaacaacagagtaaaaacccgttatttaacggtttattaaactcgtaaaaaccactgacatctcttcatcattaagagttcgcatgtgcggttaacggcaaatccggttgagacactaagatggatcttgatggaactggagaacaaaaagttgatggccgtaattaactaacatttgccaagtctgatcatgtgggtcagaaattctcaatcactcagaaaagctgtatcttcatgcaaaaggattctcttccactcactcttcttctattttctcttttctaaactttgtcaatttgtgacttatgtctatcattgaaaagttcatgtataaatgttatgattattaaccattataatttcatttattaatcttgttcattcttaaaagtcccgttcttgaagacttctttaagaatgtttgattgtagtttttttccagaaaattggaggatttttctctccttgttttctctctaacagtattgttgtgcttctgctccctgatggataaaacagagtcaacgatgtaatatattcttgactattaagaaactgcatatatacaaaaatgttgcaatattatagatgaattgattaaaatgaatcaagtaatgttgagttgttgacaattcaaacattttattttcgtatccttttttttttagtagagtaaagatcaaaatatataaagaaatcaaaatgttctaagactttaaatttaagtttttatattaaatctcaatatacagctcacatgttatcatttggtaattaaaattataggtccacatttcattttaaaattaaaatagtcctaatatattttaattacttttaaaaatcaacaaagggtccacaactcattaattgataattaatataattattatctcttatttggtataattaactaaaaggtccacaattatattttatataaatgactgtatattatattcttcttcttttggcagtaaatatatttcttataaatgggaggtcgtattcttaaataaattacaatgaacatacatttttaattaataaaatagattgatttttcggaaagaaatctagtcattatgaaaattagagagttggaaaactttgctaaaaccttaactttatcatttaaaaataaaattaaaacaataaatataccaaaaagtctattccggtccggtcgataaaactatcaaattggaggaaacaatatacaaaaagtctcgagaacaagtatgccgcgcactttttaaaacgcgtcgtatttctattttaccattttgtacgaaagggaaaaaaattattgaacaacgaccagcaaacgaggcaataagcgccattcaaagactatatagcgtgggcattttcgtaatttcactaatcgcttagccgttggacaccaatgccattcaagaaatttcgtcggagtctaaacttcattatttgcttaccaaaactaaaagagtgcgctcgtggacaaattttaggctataaaatggagacgaaggcgattggatttcaccacctttctccaccacaaaatattgtgttatggctcctgatcaatcttatcaatatccatctccttcgtatgaatcgatacagaccttttacgatacctgatgaggattggccgggtcctagatgcggccatactctcacggcggttttcgtcaacaattcccatcagcttatcctcttcggcggcagtactactgccgtcgccaaccataactcctccttacccgagatcagtaagattttactcccgatttttcgaaatttttagggttttgagatttcgagatcctctctgatgatgatggctttgtttcttgtaatgtgatttgtttttctaggtttagatggcgtcaccaattcggtccattcttttgatgttttgaccaggaagtggacaaggtaattgaggatcttgatgtttgtttctaggttttttttttcttattgatgatttcaattggtttagaagaggtggatcttattagaatttaggaaatcatttagttcattattctaataggatctctttgtaacgattcgtaattgtgtaggcttaatccgattggtgacgttccgtctcccagggcttgtcatgctgccgctttatatggcaccttgatccttattcaggtgattgtccgagaacacagatctggaaagattttgttttaatttgattgtcatagcatcgttcatgaagtttacatatgtcacgatggatgtttaggttgcaatagtctatgatctaacatatgagcatgtcgtttttgttgttggcagggtgggattggtccatccggaccttctgatggagatgtctacatgcttgacatgactaataacaagtggattaagtcagttcatttatgaatttataaatctttgctagatctattttgttactgaatttttttttacgcatttaatgtccgttcaggtttctggttggaggggagactccaagccctcgctatggccatgttatggatatagctgctcagaggtggcttgtcatattcagcgggaataatggtacgtctatctatgttttccgctttcgtttggcattgatatatgttgtctctcttttgcattttgtaatcgtatatatagcttcagttttctgtttaacttatacatatcaatatatcatatagtacatccataagtaagaaaacatttagatgcatgatatgtttccctcagaaagggagaatgtctccatcgaacaaattcctaatctatatttggcatttcaaaattatcttagcgaaacaaatatgtatatatcttccaacaatgttttcatttatgtttctacgaaggaactttaatttcggttatcattatcctattttattttgtaaaaatgtcatatttaaacatcctaaaacgacttttgtctatggagtaggaaatgaaattctggatgatacatgggcattggacacgcgtggaccattttcatgggacagattgaacccgtctggcaatcagccaagtgggagaatgttagtaatttagttgatttaagtatactctaacacattgctttgagttataactcttcattgtttaacatttttgtaggtatgcttcaggtagttctcgagaagatggtatttttttgctctgcggtggaatagatcactcaggagtggtataatatttcttccctaattaaaattacatagattattttatgtaaataggacatagaagttttaaaaagtcgaagttcttgtttactacaatagccaaccttttgtttttccaatctctttcattgaattgtgacatgtatatacaccctaatgcttgccttttccagacactgggagatacttacgggctgaaaatggatagcgataatgtttggactcctgttccagctgtagctccttccccgagatatcaacatactgcggtgagaaccaacacttccatgctctaatcctatcttttgcaaaaacttccttaacttcattgtctctcttattaggttttcggaggttcaaaactgcatgtcattgggggtatactgaatagggctcgcctaatcgatggtgaagcagttgttgctggtaaatatctaaccgctgttttctagagaatctgagtttgatccttatcagatatatatcagacttagtagtggataatgttatggaaaaaaaaaaaacttccttgcagtgcttgatactgagactggtgaatgggtagataccaatcaaccagagacctctgcgagcggcgccaatagacaaaatcaatatcaacttatgcgacgttgtcaccatgctgctgcatcgtttggcagccacctatatgtgcatggcgggattagagaaggtagccctgaatttttaaattatattgacattaaaataaaaggaacttatacaaattttgttttttgagatggattttgcatatcttagcactagtcaatttcattgtttttattcatcttctttgagttaaggcaaagtaacaatatttatgacaattccattgttgtttttattcttgtgtagatgtattgctcgacgatttgctagttgctgaaacatcccagtcttcaagtcctgaaccagaagaagataatcctgataattgtaaaatcaaaggaaacttatatagttttgactttcatatattagtcctatggtttttgcatatctaagcactaatcaatttgactttttccaagtttgcagatttcttccttgagttaaaagtaacaaagtttcttttaacaataattgcttgaattttattctcgtgtagatatgttgctcgacgactatctaatggatgaacctaagcctttaagttctgaaccagaagcttcatcctttataatgaggaggtctatactcgtacacacttttctacactcttttgttctgtgcttaatcctatataggtttttttgtttttttaaacaaatccttctttcttccataatgatatcagcacaagtgaaattgcgatggatagattggcagaggcacataacttaccaactatcgaaaatgctttttatgatagtgctattgaaggatacgttccacttcaacatggagctgtatgtggaataatatttttttccttcactcctctatctttctttatatagaatgttatatgttcaataaatgagtgttggttgtgatttcaaaggagacggttggaaatcgaggtggcttggtgagaactgcaagcttggatcaatctactcaagacttgcataagaaggtgtatatatatatatgatcttgctttcagcatatattcccatcttcatgcacttacacgttgcttgctttgcaggtcatttcgacactgttgagacctaaaacctggacgcctcctgccaacagagattttttcttgagttatttagaagttaagcatttgtgcgatgaggtagagaaaatatttatgaatgaaccaacacttcttcagctcaaagttccaatcaaagtcttcggcgatatccatggacaatacggggatttgatgcgtttatttcatgaatatggacatccttcagtggaaggagatatcacgtaagttcaagcttcctagcatgtttttactggtttttgagttttgttcatgaatattagtcactgaaccaatcgttgtgtgtgtgtctaaatatatatacgtcttcatcagccatatagactatttgtttttgggagattatgttgaccgtggacaacacagcttggagatcatcatgttgctgtttgctttgaaggtaagatattctttcttatatgttatgactttttgattttagtatcttctaagatctgtctcttatacgcagatagaatatccgaagaacatccacttgattcgtggaaatcatgagtctcttgcaatgaatagaatttatggttttcttacagaatgcgaagaaagaatggtacgtctcttcagagaatatatattctcattgtcattggctaattaatgaagtaacatatataatcttgttctgtacgttaccagggcgagtcctatgggttcgaagcatggttaaagattaatcaagtttttgattatcttccgcttgctgcacttctagaaaagaaagttttgtgtgtccatggcggaattgggagggcagttacgatcgaagaaattgaaaatatcgaaaggccggcattcccggatactggatcaatggtcttgaaagacatcttatggtaacatactctcaactatttctaactttttttctttccaagctgtgtaataacatttttttatggataaacaggtcagatcctacgatgaatgacactgttttgggtatagtagacaatgccagaggagaaggtgttgtctcatttggggttaggcctattccttatttatcttttactttatgaataccattttcaagctcaactactaacgcatattcttgtcttataaatgaagcctgatatagtcaaggcatttctagaaaggaatggtctggagatgatactaagagcacacgagtgtgttattgacggctttgaaagattcgctgacggacggcttataacagtcttttctgctacaaattactgtggtacatttgttatgtttatagaaactttcatttatttcgacatttgcatacatataataggcatgtgaataaaaaacattgtgtgtgtgatgagcaggaactgcacaaaatgcgggagcaatattggtaattggtagagatatggtaatttatcctaagctgattcatcctcaccctcctcccatctcatcttcagaagaagactatacagacaaagcatggatgcaggtaagcctcccgtttctttaccatatagaatagatattgagcatatgaaacatgttgtggtaaccgagcttttaagtacttttgtgatggactcaggagctgaacatcgagatgccgcctactccagctcgaggggagtcaagtgaataaaggcagatatttggtatagaagttgtgcggttgaagaggtgtaaatgtttcatttgcaagctgcacaagtgtaccggaacctttttcttttcatttctttctattttggtattggcagaggacaattttaaaagtgattttctttaatatacttaagtttggaaaacaattgttcattattccattttgcctgatttatttctacttttataattttaataaatggttatgaggttgaaacttaaaaagcatatattcccattccattcattaccaaaaaaatattcccattccattatcattctgattgttgtgttcataaatgttttgatttctagaattgattactcatttattttcctatgaatttttttatttcatttgaactgaaactgcttactcatttgtcatctcccactcctttttttctattaaaacgaattttaagttattacttttctgaaaacaaattttggtaaacaagatcattcatgaaaccattttgaacactcttcaataaaacaaaaccatcattttccaattttaaatacgcagaaacgatggatagtggacaatcttcatcctcacatcaatataatccttattccaaagacacttgtacacaccaaaactctaatcttcattctcaccaacgaataaacgaatcgttttttcctttaaaagtttttttttaacacgatgaaacactctgttcctcaaaaactttaaccaaaaaaataaaaacatagtattatataagaaagcgtaatttaccaaactaccctcgccactcggtgcattgtgtagtgggcctagtcttttgtgggccggcctttagcggacacggggtttgtaacggcggcaccatacagttatactgcagacacagcgagctgctcaccgggatttccgccgccgggctaatctgtattcccgtcaagaaattatgctgtagatacagagtctgtatgttcgccgataacaacctctccacgaaactcgccgggacttcaccggtgaaacgattgctgtttaagtagagattctcaacgcttgagagaagcggagatatcccaccggagaatcgattgtagctgagatcgacggtggagatcgtcacttgattcgccggctgaattaaaccgaagaagaaattgcgttgtaactgaagatttgtgatcgggaaggcgaagactcgagcggggattgtaccggtgaaccggtttaagctgagatcaaggtagttaagctggttcaaccggagtaaaacatggtataccgatccggttaactggttccaagcgagtgagaggtattgaagcgacggagggagagacgccggtgagattgagccggtgaggctgttgcgtttgagatcgattcgggttagagtttgtgagagaaacggtggtattgatccggttaagtggttgtggcagagaatcaaattggagagctccggtaacgatccgattgacggagagatagttccggttaattgattatagcttaaatccagtgttctgagaccacgaacctcgccgagactcgccggaatctcgccggagatgaaattccggctgattgcgagaaaacgaaggtcttttagctgagagattgttgccggtaacgcacccatgattctgccggggacaatggagagctcagtgagtgcagagagtttgcctattgctgggtcgatccgacccgataaaccgggtgaaccggctctaggatcgccgagattgagagagattactttatctccgttgcagtagacgccagcgaagccgcatggatcagaagtgaaatcccaagactcgaagaacttggaacctggcaagtcatcgagggatttacgaatagcttgcagagccaagaaatcaactgggtcgagaatcgcctccgtgaagaagccgaatcgaagcaggaacatcaaacaccaaaccaacttggtaaatctcatcatcatcttcttcttcttcttcttcagacttagccgttacaggttcaagaaacagagactatatatatacacagagggaagaacagagacgagctgtaaagtagagaaaatgggttttgttttctgatttctcgtgagagggaaagtctctggtttatgtggtggaaagaaggtgttctcgtgggagcttccgtgagagctttaatggaggattatcaataaacgattagcaaaaggaagaaaagaaaggtttatcgagagaagagaaagagagtaaacaaaatggcttgagaaggaagccaaaaacccaagaaatgaatcaacgtcgtcgtctgtttcttctttcttcttcctctattttttgtttcctttttttatattttattttgtctaatagtgtcagtctttgtacagagaagaatatacgaagataagtatatatgttaagttacttctcaatcaagtttgtaatctaaactctagattatctttctctttgtactcacatcataattaataagaagaatacatattctctacaatctacatggtaagttaatctaatatacagtttaacatacatacaaagatacttggtaaattctctatactttcattttcctctttgttccgctctttttgtttgtttcttttggtggcttgtggtggaagacgatgatatgaaaatttaatgtgtcggacaaaaacactaattagaatgctaaattaagaaaggttatacatttggattgtgtcagtaaaaacatgaaaaaaggtgccttcttttcttttagctgtggtttttatggggaacaggtaatatggtaaaacggctgtccgagccttaggttcgtaaagaaacagattaggttcggtgagagagacgataaaaagtgtgtcttctcgtcacgtgagttttgtgtgcgtttcagttttactgttttgagtgacagcttggacgagcgagatttccgtgacacgtcagctttctggttcgataattactctattgtactagctactacctttgttttataattgtactttattattttttccagatatattttgctcgattttaaaacacaaaatcagcgttacaatttcattttcctgattgaagttgatgaaaaaataaaataaagaattttcctgatatttaacacaaatcataacgcatatcgtaggaagtttagcttatgatagatggttaagtaatggtcaatgtaactgatgaaagttttagtcaatatcaactttgaagtgtgtcctagtctatatctaactaagctttactgtactatatccacttccaacaaatcttgcgaccaaaagtttatttcacaactacttttgattagttaaatgttatagtccctagttagtactaaatgtttgattcgccatagggcttctttgatgaagttatagattaacacatctatcgaagaaatgtttcgtataccgactcttgcataaatcaacaaatgtttttgtcaattgttttcactcgtttacatttagccattatactaattactaacttacttcattgaccaaaaaatatataactgtattaatctatatttatatatgaaagaaagttttaatattttacgaatgaataaaatgaatatgagaaagatgtaaaagctagctatgacagttagataggtgaaagagaaaaaaaaagatttgtaaggttgttccaactgtctaaattttacaaaggtagctggcaaatggtccttcaattccgtgggcgtaaagaaagataattggtaaaaaagttggacaacgcataagagattgactttaagtttaaaagcaaaaggaaaaaaaaagagtaaatatggtaaaaacagtgacatgttatatttctctagtttttactcatttggtttttcacaaaacttgttgtttgtatgttaaaaaaaggaataggagcttggaccacaagttttagcaacaacacatgcataagatggtcaggtcaacatttataacgcttacccaattttaacatttgtttcactacatacgcaagcaacaaaatagctcgatatatacctctactgtacaatcttttgccttgtgtacgtatattagcagattgtctctacttttgatgtgcattaattagtttcataagtgtaactaccgttttctgaaaataattaactcatagcgtacatctaaatacgtttcaaataatgattcgctactgattcacatataccaaccatgcataataaaaatgatttagtattcattctaagagagactaggtagtgatgagtagaccaaattagatttatgaaaagaaaacttggctttgcaagaaagccaaagcaatacgttccaatcataatgaacaaaattaaaaaggtctaaaccctaagatggtccgcactacgagacaattaacgcactcgttttgggactcttgtgtttgtttggtgtgtcgtcgaatcctctctccatagaaggtaagatcacatagtaaccgatataagatttgctttgacttttgaatcggtttcatgaagaaccctaaaaccaaccatgttataaggatattacaaaattattttaaaaacattggttgagagaaataaaaatgatgaagatggatatgataaaatgaaggatagaggagaaaagctttgttattatttgttacattacacgcctccatgccttcaatttatgtttcattagtctctttcacttcacatactcttcctttaaaaaaaaaaaaatgctccacctagtgattaccatagacacatggcttcacattttttattccacttataaacaatctattgataattcttcgacattttctttttatttcattcctagtttgaggtaattcggacattatattaaatacatacctaacaagacatgcccaatcctttctcaatctattgtcacaatcatgtcttataagccctataacaataatgttgataaaagagaccatggaataccgttaacaaaataaagagaccatggaatcgtgttatccataattcaaacaaatcattcttgattaatccacacataatgaaatcgtctaaagtgctaactagtacccgcatgctttacggctcaaatcaaaatcatgaatccaatagagtatatcagattcagaataatgctgagaattctaagtcatgatggtcagaacaaaggctccaaatggtggttgcattgtgacaggaatacatatggacatgtctatttatagactaataattcaatttttactcttagaactcaattaagagtctaaacaagacacgatatctggccagggacagtgttgctgaacctcattaatcaatataaaacataacaacaacaacaaaactacagaggagtttcggtttcatttgtgtcatcagccttgaacatttgcataatcgagaaacgcatcggtctaatttatatccacttgaggaattgtacctccagcttggaggatctgtttctctaactgcaacaacataacataacagaaacagaagaatgagaagtagcaaaaggctcagtaaaaagaatacacaagcagaacaagtaggttttcgcaaagtttaaaactcacattaaagagatcctgaagtttagtctttaacatcttatattcataatccacctgctgtaaacaccttagacacctgtgccagatatcattatcacaatttgtgtgtgaattagaagaatagcttctcatataataaaaaagtttagagatccaataacattttgcatcaacaagctaaaaaatatactcacccttcacggttctgaacatcgcaacattccttgaaagatatgcacacatttttcaccctccttgcaccgacactgagtacaaagcagagactgagccattaaaatcaatgtagtttggtcacttaaaactagaaaagcaaatttagcagtgttcactgtgacaaacctggagctactacccttgagttgatgaacacctgaatccacctgtttgaaatccacattatctggccgctccctaatgtttataataaactcataaaatgctgtcatgaatatatgaagctaatttacaccctcaaaaatgaatatgaaggaggattagagacaaagtcccatgttagataaaaaagagaagcctaagagagtaagcaaagcttacagggatatagacatggtattaataagcttggaacagtcgtcgaagaatagagagacaacttcagctacaaaatcaggggttccttcatcttgcaactttctcaactctgagaactgattatccagaaatcccttcaaaacaacaacatattatatcatctttataaaaaaaataaaaaaattcaaattcacacataactgcaccttaagcttatctaagcccaaaagtgagaatccagccaaagtaagaaaagtttggttaggaacgaacctgttgataaagagaaacgatgtagtcttgaaattgtctctgcaactgagcaacgacgatggtgttcatagctaaagtttaccaagaaccagacttgtaaacaaagatggtaagagcttctcaaacatacatataccaaaaacaaacaacggatacggtgaactgtatttcgacggttccgagatcgatctaatcggaggtttttggcttaatttaaaacagatccaacaacaactaggcgaaaagaccaaagaacaaacttccaacttaactaagagattccaaattcaaaatcggagcgacacagagagagatgatgatgaatctgatcggagcgtcgaaagttataatttattccacgttccgttgactgattttgacttaaatatcaaatggagggttatttttgtaaatgactatattgtaggaattaatcaagtacgtaaataatattttagtttgtggggtgcaaatctgattttatagatagggaagttgctagcatgcgttctccacaaacgagatatcttttttttttttttttaaaaaaaaaggtccagtcccaattgggcttaggcccggaattacaatcgtccacagttacaaaacaggaaaaatccggtcaccggaaaaagagaaccagaggtggatttgggcagtggaacggaggcagcaaatagatctattagtaccgtcgtatacaaggcccactactttgcaacacaaccaccggaacgagatcattggccgaagtatacgagtcctgccgcaaatctcttaccaatgagctggccggacctgcaacaaacctaacggaaaaaacccagtttccgacactccgccacccaatttggtcgagtccccaacctcgcaaaacgaccacgcatttccaagcctctgacctccaaaaccttagatctgaaaattttccaaaagcaaagcaaccttcaatccggattgatggagacaaaaaacggaggctaaagaagggtgatggctcagacaacccttcagcaaccggaacccgcaacagccatctcagatccagtttgttaaccatcaaacacgcactgaaaacccaccaatccacagcgtcttccgccacagctacagcgtctaaccaagtggttgaaccaagaaagacttcaccgatctccaccgacgtccataaccaggaagaaacggaagagaagcctctcatccaccgagaaagggccaccgctgccacgcttaccggaaaaaccacaccactccaatgccggagaagatagcttgccttactcctgctttgtcttgcaaattcataacctaagatgaagaacagaggcagaaaaaactagatctgtaaaaactggaaaaaacttcaaagagagagaaaatgaacagtagcggaacgattgtccaaagtcctccaaacgagatatctttaaatgttgttttgctaattagtggcgtttcgagagctaggcgagcaacaatggcgatgagatttaatatggtaagtgtgtagttaattaacaaaagttcaaaccggatgctattcttacttgtaaagacaaacgaccaattaagaatccaaattttaatataggaattgaaataaactaatggaccttgtttttggcgattcatttctttatttgttatcttaatatgggtcacgattccttttgttatttaattgtattaagatgtgcattaagatgtggaataatagcacttatgcaaatctgtgcattgcaaaaaaaagaaagaagaagcaagatggagtcaagtgatcgttcaagtcaagcaaaagctttcgacgagacaaaaaccggcgtgaaagggcttgtggcttcgggaatcaaagagattccagccatgttccatacacctccggatactctaacaagcctgaaacaaacagcaccaccttcgcagcagctgacgatccccacggtggatctgaaaggaggaagcatggatttgatatcgcggcggagcgtggtggagaagattggagacgctgcggagagatggggattcttccaggtggtgaatcatgggatctcggtggaggtgatggagaggatgaaagaagggattcgcaggtttcacgagcaggacccggaagtgaagaaacggttctactctagggatcacactagagatgtgctttactacagcaacatcgatctccacacttgtaataaggctgcaaattggagagatacgctcgcctgttacatggcccccgatcctcccaagttacaggacttgcccgcggtttgcgggtaacgtttccctttccataccaaacacctagctagctaggattcatttctctttagtttttttttggtttatgatgatagagattatattcttttactttaattatgagaaagaatttccacgtacgaattggcgtatttctcatctacttgcttcgggtctactagatcggatatcttgtgtgttttaactcggttattacaaaatttaaacttgaaaaagcataaaaagtcaataattaataactacataagttagtggattctacacttgattttatcatgagttattgatttctaaatagtaattataaccttttaatgatttcattggtttttaataaattatttatttatttcacattggattttaacagatctttcaatgtatatattaaattaaagataaataaatcaaaaagttaaataccaaagttattttgaatagatttgttatatgtgccttgtgaatagctagacgtacgctaatctcttgcaaatattttgatgtgacagggagattatgatggagtactcaaagcaactaatgactttaggtgaatttctctttgagcttctatctgaggctttgggattaaaccctaatcacctcaaggacatgggctgtgccaagtctcatatcatgtttggccaatactatccaccttgccctcagcctgaccttactttaggcataagcaagcacaccgatttctcgtttatcaccattcttcttcaggacaatatcggagggcttcaagttatccatgaccaatgctgggttgatgtttctcctgtccctggcgcccttgtcattaacatcggagatcttctccaggttaaaaagaaaatattgttgcgcttctagcttcatttcatctatggagtgggtttaaccctctgttttattgtgtgcagcttataagcaatgacaaattcattagcgcggagcatagggtgatagcaaatggatcttctgaaccgcggatttcaatgccatgtttcgtcagcacgttcatgaagccgaatccacgaatatatggacccatcaaagaacttttgtcagaacaaaaccctgccaagtatagagacttaaccatcaccgagttttcaaacaccttcaggtcccaaacgatcagtcaccctgcgttacaccatttcaggatctgaagcaattatattggtggctctgctcggtcttcatctcaaagtaactttcgtgaaaccagcttcttttttctttctcaaaaggcataaggatatttgtaacattcaaataaggtacacaatgaaaactactactacttacttacttcatcttccagccgtgatgtaataaaatttgcgaggaactttcttgttttaagtcctcgtgttaccattttcatctacgaactttggggattagattccccctcttttgaaccttgttttatgttgtatcacgaaaaaagcttattggcctcatttatcatcatcatccaccgatgatatatcgtttaattatatgttcatcagatattcttgtaaacttaaatgattaaccaaaagcatatgattttaggttttttaaaaccttggtggactagtccacgttcggttgactgatttggatatacatatacatatatatatatatatatgaaaataaccaaattaatattagatgtggttgtgatatacgtacatcattttctttatgaggtggcaatttctcttgttatctgaatgatacaaatttagttaaggacgtagaaaagcaaaaaaacaaacaaaaaaaagaccaagaagcaatggagtcaactgatcgttcaagtcaagcaaaagctttcgacgaggccaaaatcggtgtgaaagggcttgtggattcaggaatcacagagattccggccctgttccgtgcaacgccggctactcttgcaagcctgaagtcgccaccacctccaaagcatctcaccatccctaccgttgatctcaaaggagcaagcgtggtggagaagatcggagaagctgctgagaaatggggattattccatttggtgaatcacggcatcccggtggaggttctggagaggatgattcaagggattcgcgggtttcacgagcaagaacctgaagccaagaaacgcttctactctagggatcacactagagacgtgctttactttagcaatcatgatctccaaaactccgaggccgccagttggagagacactctcggttgttataccgcacccgagcctcccagattagaggatttgcccgcggtttgcgggtaagtcattcactattattgtcagaaaatcatgtgttattcgttcaatgattccacatggataatgtagtagctagacgtttattagcatacacagcttaataattctgcatatatggggcagggagattatgctggagtactcaaaggaaataatgagtttaggtgaaaggctatttgagcttctatcagaggctttggggttgaactctcatcatctcaaggacatggactgtgccaagtctcaatatatggttggccaacactacccaccttgccctcagcctgaccttactataggcataaacaagcacaccgatatttcctttctcaccgttcttcttcaagacaatgttggagggcttcaagttttccatgaacagtattggattgatgttactcctgtccctggggctctagtcattaacattggagattttcttcaggttaaaaagatcatgttgctacttcgatcttgcttcatttcatgtatgatttggggtttgatccttcttttttactgtgtgcagcttataaccaatgataagttcataagcgcggagcatagggtgatagccaatggatcttctgaaccgcggacttccgtggcaattgttttcagcacgttcatgagggcgtattctcgagtatatgggccaatcaaagatctcctgtctgcagaaaaccctgctaagtatagagactgcaccctcaccgaattttcaaccatcttcagctcaaaaacgctcgatgctcctaagttacaccatttcaaaatctaagacatttgggtttagaccttttttgtctactaatctatcaaactctctcggtacacaatgaaaactggtacttcatatgtaagccatgatataatacgatagtgtacatttcgaagcttattggcctcgcattcatcctcatccacccatgatacttgattttttcatcagataatcttgcaaacttcatcagaagtaaccaagagcatatggttcactagttttattgagtgagttgaaaactcatcctgtgagtctaggtcggggatctacgcaaaacttatggttcccattataccatgcttgttggatgatacatcaaataaataaccaatcgatatgcaagaacaacacctgcaacctatatctcacctagaccaaaccggtttaactaattgaaatatcactacaaattctcccccttttcctgatggatattggtgaaaaatcaaaaccatttcatttgatttatcaaaatggcttcttgcatccaagaacttcatttcactcacctccatatcccagtcaccatcaaccagcaatttcttgtacatccatcaagtccaacacctgcaaatcaatctcctcaccatagtctctatctatcaaacctagatgatataatcggagcacgagttttcactccctccgtttatttctatccatcaaccaataatcgagaatcttttgtactgaaacggcttcaagatgctcttagtgaggttttagttccgtattatccactctctggtaggttaagagaagtggaaaatgggaaactggaagttttctttggagaagagcaaggtgtgttaatggtgtcggcaaattcatcaatggatttagctgatcttggagatcttacagttccaaatccagcttggttaccattaatctttcgaaacccaggagaagaagcttacaagatcctcgaaatgccgttacttatagctcaagtaacgtttttcacctgtggtggatttagcctcgggattagactttgccattgcatttgtgatggttttggagctatgcagtttctcggctcgtgggcagctacagcgaaaaccggaaaattgattgcagatcctgagccggtttgggatagagagactttcaaaccaagaaaccctccaatggtgaaatacccacatcatgagtatcttccaattgaagaaagatcgaatttgacgaactccttgtgggatacaaagccattgcagaaatgttacaggataagcaaagagtttcagtgtcgtgttaaaagcattgctcaaggagaagatccaaccttagtttgtagcacgtttgatgcaatggctgcacacatatggagatcatgggtcaaagcacttgatgtgaagccactggattacaatctcaggctcacgttttcagtcaacgtaagaacaagactagaaaccctaaagttaagaaaaggtttttacggcaatgtggtgtgtttggcttgcgcaatgagcagtgtcgagagtcttattaacgattctctttctaagacaacacgtttggttcaggatgcgagacttagggtttcagaggattacttgcgttctatggtggattacgttgatgtaaagaggccaaagaggttagagtttggtgggaagctaacgataacgcaatggacccggtttgaaatgtatgagactgcggattttggatggggtaaaccggtttatgcagggccaattgacttgaggcctacgccacaggtttgcgtgttgttgccacaaggaggagttgagtctggcaatgaccaaagcatggtggtttgcctttgcttgcctcctactgctgttcatacctttactcggcttctatctttaaatgatcataaataagtcaatgatgcgacacaacattcacattaatgtcaatcatatgatttagtatcgactttaaattaccacttcatgtttattccagataagagttaatattatccccaatcaaaaacataagccacataacaaatcaccagagaacgaattcggattcatcataatcacttaaaacaacaggagataccaaaaaaaaacattggtgtagttttagaccaaagagttgatctccacatggatcaaactgtacaaagattagggctcactagtagggtttaaaacaacatggaaaccccaaattcgaaaattttcattttcttttccgttcaaggtttcaaccacgccccaacgacacccatatttaccaaactcccatctatcataatgtacatagtatttggcctatttgcgtagccatatcttatataaaagaagaaaagggacagagaaattattaccaccaactcggaggaaatctttatataatatacaaactccaaaagcgttcaggacttgactatttacctgttcaaacacaaaaattaggaaaagagcaaagagatcagcttctcattactcgcttagacaacaaatcatcataaaggtgtctggaggattcaccgtagggagactccagactcgaggtcgtgattgtggttccgtgagagatttaatcacctacaaaggaaaccataccatgtaccattttgtctccttgtagtttctctgtgttgttgttgttgacgtttaagtgatgaacattagtaacttcatctaacttctttttcaggtgttcttcttttggatctgctactgctttacagtgctcctcatgcaaagcaaaaccaaagcccataggaggttttcctgtagagagcatctgttcgttgacactatcggtgagtataggtggtgtggtaaaaccatttgtgatccgggtttctttgagtgtagagagtttggctgttacgggtttctccatccacccatttgcgttgttcttctctatttccttgtagatcccatttactgttgggtaaaggggtaaagaagacttgattgagttgctcatatgatccgaatcatggagattctccatctgttttgttgaacctatagccattaaattaccaaatggttacttccactgtggcttgaattaaaacgaccctagattttgatctctgccatcaagaatattttaggggcagaaacataataatttaccctcttcagaactttcggcggactcaattgatcctggcttagagtgacagttgataatatcttggcatatttttccattaacttgatgagatcccgttgcggatgtgtgatagcatttcattgaaaacctatgtcaaaggttccatgattcaaagcataagatatacagatcaaagaaaacttttgggaatataaaagagaatattcggaaaagaggacaggctgcaaataatcacacgttaaaatacttgtcgcactatgaactttcgtcaagcaatgcacaatacaagaagacagcaagttacgcagaaatttttgtccaacatttaagaatacctgtcttccaacgttgctttggtgctgtggaaatggtcaaaaactggcagcagctttttctgttttatttcaagttcatgggccggaaccttttctatctcaaactctccaccagtggaactactatctcttggagaatccataacatgaaaagaaatctagcaacacatcaagaaagtaaaaaatcaagagacaagtacagatatatcaaagaaaggaagagtttttgactaaacaaatacctttgaattttgccacactggtagcatccccgaggtaacctttacctcaaagttagaaagatagcaatgtgatctttcagggggcttctcagaacagcttttcaaatacttatcttcactaaaatggctgttcatgtcaagggaaagacatgcatcctcatggcttgtcaagtgattcgacactgtctctaaatcatattgcttttcagtgatacttttgggaagtcgttcctcagtctctagccagtcagaccttctacatacatcccaccactgaataggctcaactttgaccctcaaatcatcctcctgaacttgaacatgtgatgttttttgcactctcaaaccattttcaggtgattctgtgcaaactgatggcagaagttcatgctgcaccacatggcctgatggagtatagactaagatatgctccaacgcgttagtccgggagttcagctgaaggtcatgagtgacagatttatgaaaaacagcagccacggcacctgatggtacaaaaacttttccagtagcagcagtagtagcattgcttactgtgttaagccacccaaaactgctatactttattctgcttacaacagaaagggcaacagctgttggtggcgataaagactgctgattacttgacaacgattgagtaaaccaccatggcaaggatgaagctggtagtcgggtaggctcctcaccctcgcaaggttgaaacgcagcgtcgctaccagaagagtttaaaacaaatatatggcaagtacccttggatgaaataatagcaacccactgactctgctgactaaagcaaatgtcctggacaatctgttaaaaagagcagaaaaaatccaatcaagcaaagagaacattgaaaagaaaaggacatagatcaaccaaaaagtatacttacagctgaagtgatccctctatgcagtttgaagagatgcacatgagaagatcccactcataacttaggtcaccaggtgcattatgtgaacgagatggcatgatctgaaagacattgatattgttcccacatactgaagcagtaaccaatagagttccactaggatcaaaacaaagtgctgagataggactcgtatgagccttgaactgtgatactaaagctccagaaacaagatctttaacagcaacctgttggacgaacattcaaataatatcacaatctggcaattaaaaaaaaatagcaagagagcaaagctcaaagtaagtgactatgattaagatctttggtgtaagagaatagcatgacccaagaattgcccgcaatgttcagatccatcttaatactaaccattccggcattctctgcatctgatccagaaaccccaccaactttccagattgcatttggtgatgctggagaagtagatccatcagggagcatatcttgacagtattttgacaatgttttgtatcccatgtcccccaggttgattaatccattggctaactgcttgctagactccatggcataacgggccataaaactgcttccacctgatgatgaacttgggctgagactgggtgaagaagtaaacgtctgtgggcttaggcgccctgttttcatggtcatggaacttttggacgcatatgcaagccaccttggacctacagccatcggaccatagccaacattaactctggttgtcccttgtctcactggctgggggacaggataagtgagaacactgaacttattttccagagtaagtgcgtcaacacaatatatctgcacacaccaaatggaaaccgtcagtgtatggcataagaacaaaagataatctcttatacttaagtataataacactacgcatagttaaactacattcaatacaagcaaggttcatttggtctcaagaccaactaccaaacacttatcttgccaatcatctaagataaagtacgattggtatggaagaattttctaataaagaatctgaatttattgaaccacagtaatactcacttgattcgcaaggccaacagcgactactcgggagctgcatctaatcatgcaaacagatgaccgaaatctcaggacatatacataactgtgggacctaagggagtagaagcgaacagtggtaggataattgatggcatccccggctttagagtctgaactaccatctcttgctaatgaaccattctgggaaaaactgtgacccaaaccagtgccatttgtttcatccccagcaacaaccagcaaaagaggatgtgagttccaaaaaccctcatgatcaccagaccttgcaggtaatggctgcatctgtaagaatgaaactggaccacctcgtttagagaccagttcattaaaattagaggcatcctcaacatcaaagacttgaaagccattctgataaccgagtaagagaacatgtctggtgacatgttgacccagttcaagaatgccaaatccagcccaggtcacctggtcatgaaagcgaagttcagatgtttgtggacaaagtagtctctcgaaaaaaagaaaaagaagttgttaacctagaattgaaaatatagcaaaacctcccatttcaaagagggtcaacaggaaaaaggaaatagacacctaattcagaaattaaccaaccacaaccaacaaattcgaacacataatttcacatcagaagaatcacttgcatatttgttactagacctatgtatctcaaacttagtggacacagcagcaaaagctagactaagaatgaagtaaacacaccaaccattaatccactaaatatttctaaacaggaaagaatcccaattacgtcttagattttaaatgatctaacaaaatagtaaaatccaacacggtacacagaacaaaagcaagtatcaaacagtaactgcaaaacaaaatcaagggacctgatccttatcatcttcagcagcggaaattgaagcagcaacggaggcaccagcggaacgaacagacgacgcaacgttggtggcgttagccgatacagttttaaggcaagaagatataatcttaaaggaattc

SEQ ID NO: 7 - DNA, 119914 bp, Arabidopsis thaliana
gaattcgaggtctattcttttctttttggaaaattaagttctctaagcgtcgttacttttcctttttttcttctgaggagtttaactgagttagatcattgaaacagtactacccggctccatcaattcaacttctctggttacaatctgtatcataaccggcgtaaatccaagaacttttacgaatcaaacaaactgaagaaaagtaaatatctattgtcactgatcgagaaaagagagacatgtaaacatccagacactaaatttgagtagatagaagcaaatggttatcaattacactacaaaaacgaccagcagcagtaataggctcagtagtacgtgttgtagtacgcttgaggagcaacagcagcagccggttgctgcaccggtgcagccgctggtgctgctgctgcaactggaggtgcataactctgcgttgggtatgtctgcaaaaaatttcacaaagataagatccaagttagatgatcaaagacttatctccaagagtgattcccaattcaaactggtggctaatccctgtaatcctcctaaatactcctgagtttaacactaattaagaattttggttacctgagcaggatacgctccataagctgcggcctgtggcacaggtgttggtgcttgtggagcggtatagccagcaggatatcccccatatgcaccataagcagcctacaaaggtatattcgatactattataagagtaaaagtatagaaggaaggaaatggatatggttctatctttggtatcttacctgttgaccgtaggcagggttccattgctgtggttgagcaggagcagcttgtgctggtggccaagtctgaggctgcgcagcataaccaccagaccattgagcctgagcatttggatatgcattggatactggctgagcaggtggagtgccgttgtaagtttttgccattttcgtcctatctgatgcgagaaaatcatctgcgctacgctttttcagctccgacgtgctccgatgaggataaaacagtttaacatgttgatcttccgcttttttaatggacttcacatctccaaaaatacccaggaactgcaaaggccatgcacatttgggtgttaaaaccaataatatagatacatcatgttcaaacaagaattgtcttctttcttttccattacctctatatatattaaggatagctcttccctctcagtggaacttgcaatgttttgggcatctgcatctggctttataactttctctacaagtggctcaaggtaatcaatctctcttggtggtggctgaatcgcctcaaaatgaatcagtgcttccatgagaggttttgacggttgtacatggtcaagtgcttcgacaataatcctcctagctttctcagcatccctggagacctgaaagtaatattaagaaaagtaagaagccaaatcactacatactccatcacgaaaacaaaaacaaaatgagttcaaaaatcagtactataaagtatcactacatactccatcacgaaaacaaaacaaaacgagttcaaaaatcagtactataaagtcttagtagtgtagagaccatgtgacgtaccaagtatgaaaaccttgaatactgcgcatacagcagtggcagtattgtggaatgttctttccccttttcaacagcaatcacttgctcatacaaagagaaagcatcatccagattaccctacagataagattaggagacatgtaagggaaacaaccagtgataataatcttatactagttctttaatcaccattgaagcttactagtcggtattccatatttgcatgcttgattactgcttcaagaagtccaggagaaatttcagagtgcactaattggtatgcagctctagcaccagctatatctccattctgctcttttaatcgagcagcaaataggtgaatctctggttgtttctatgaaagaaaagaaagcagataaataaccatgagactcaaagctgactatttagaattattctgcaaagccactcgaaaataatgaaatttaactacccagaaaggttggagaaacacaattcataccttgacaaagacttgagttgctcgagcaagggcattttctgcaaggtccgcacttccacttgcttccatgtttgtcacataacgaatccagtattctgggtaatttgcacaggtaaccacacatctttcatacagcttgaccacctattggaaaagacaatcgaatgtaaaacatatatgatgatgactacggaaaaaaaccatgtaaacatagaaaacacaaaaggagaaatccacaagaaatactctacaagtccaacagaggggccctcacatacagagggaccctccttgcctgacagacagaatgttaggaagacacctgcattaataacattggaacttcaacaacaggataattcatgtgcctaaaatatccattgacaaattgagagttcgaaatacttagccttaaagttaccaaatcgaggcacatgctttggtctcagttatttcccatttaaaagttgcttgatccaatggaaacccaatcaagcatatgatgcaccagatactacttaactgtaggtcaataatatgacagaggtacaacttaatctacaaaacacttgtacgttcacgtataagagagttaaaccccagtaccttattgaagtctccatccctctcaatgaaatccagatagttgtgccaattctccagttctgcgacattcagaggacgcacatggaaatagggcctccttatagccatttcataaccaatgattttagattcaaactctttcgattttatgtacatggcttccctgatgcctacatacttcttcaactcctcaggttcagttgaactagcactttccaatttaggggattgttcggtggaaccatcaacttgagatcgtccttcatctgccttttcaccggactcagatgctgcactttcagaagcatcaccagcaacagcaacagcagcagctgcggattcctcagcactccttagttccgacagaggccgtgtttcagctagctccttaaaactatagcaagacaagaacttatcaacaacagaaaaaataccaaaaacgaagcaacatacacatcagaaagaaactaaagattatgagcaaaacataaaaaccctcgctatgacagatgaaatataaaattagattaagcatatatcaaatgtatgatacagcacacctgccagatagctgaactcgattaagtgctaaatcaacatagtgcatcaaatgatgttttctctccataaccatgacaatccacataaatagactctatccaattcagcacagacaataatgattaatgcaatcagtaaaaattacctgctgaaatatctatccagattttgaattggattctccaatattctggtgtaaatcaaggcaactcggctccagtcctgctgcatgtactcatactcaatgtatttgtcccacaacggagaggaaagaaaatcagttccaacgtaaaccaaagctcgttcaaaaagcctgcaacagcattatagtaaaaagaatgtcatatgagctgaaagaaacagacatatccaatcaatagagacaaacacgagttctatggagaaaaggattcactctttgaatgcatgatactgccaaacactgcatttaccttcctagtaaaagcatactatggccaaaatcgagcagtcaagggctacctaagcccaaaactggttgacatctttccagcagcattttgaacttcgggggagggtgacagttaaaacagatatattttaacatcaaaatttttaaaccagagaagtaacgagcaccaaaaaagggaacagttttagataaagatatcagatagcaatggaaggaggctaaaagctagtgtgtcgaacatagaaaaacgaagtattttaaaattaattccatcagatctttccgccacaaacgagaggacttgctgtagcaatctaaaaaaagggttagatggtaaaaccattttgtctaggtaattggaaaatcaccaagttgttaatacacatacaaatagaagaataagcattcattaccttctgatcgtttctggatctccatatgtattgatggcaaaagtgcaataatgcaaccagatatccactgaatatgtcactcccagcactgctctttcataaacctccacgactttgtccattgcccccacccgagcctcatgatcggcaaactttttccaatagccataacacagaggaaattcagctaagaaagcatcatagaccttccggatttttgctatattgtcctgtaatcagggcagcaaggaaaacattaacaatctagagcaaattaatcaagtagctgacagtaaaagttagaaaaaatataccgaaagatgacagcgacttatggtgtacaaataaaaacggaatactcattcttaagattcaaatagcaaacaagttttggaaacataatccagatgacaaacatttacgtcaccacgaaggtcagaggactcagagcagagtacatagggaaaaccggaaaaataagattcattatgtaactccacacatacctgcgctatcctctccgtctcatcaatcaaggcagtccaagcattaaactctaaagaatttgcccttacaatattccacaagcgctcctcttccgttgagagtgtagagcctgtaacaagagagaaggaataagtaaaggattatcatcatcgaagttaagatcaggttctagtgacgcctcttagaatcaatatgtgctcatacaagctttcaaaaagaagaagaaattaccagtattgtctccatgctccgctgctggagcagtcacagccacattatctgttgcacttccgttctcaactggcgcagtaccattgaccaaagaatcattgttgaccgagtgtgatgcatcaacaattggtgcagtctcttgcccggtcgattccacagtagcagcagaagcattatagtctccatatggagcagaagtataaccctcggaaaccatggcctcgctgtcacccattactttctagaacagacttctcaaacgcagaaaactacattcacataagaacagaatcagtttaaagacacagaagactgatactaaactcatcgaaggatttcattaaatgcaagcaaataagattagcgtaaagcaaaattcactctatcttcctatgaatcacaaccaggaaagcatgatacgaagtttctacaataggacaaaaatctaaaccacaaccgaaacaaaagcagaaacccgacaaaaatgagctaatgtaaaaccctagttttgttcccaattcgtagagacgagaaaaggatatgtacctcgggaactaaagaagatgctcgtcgcttctagaactctttaccaatcagtgaatgctatcttcgaaagtagcttcaatgtaagagagctctcagcttttgattttggtgtgtttcgtttacacacgaagagaggggggtatagggttagagacgacgaaccaaaacgaaaggcgacgcgtatcgtgttggtcggcgcacactggaactcaatctggcccgttaagtaaatgggtcattagatttcttaatgggcctactgacccgtacattattaaagccgaggatcccctttcaattttatttttcaaagtgaaaccctcgtcgtcgtctctagtctgaactttttcaatctctctcgatttcattcaatcaatggcgcctaagaaaatcggagccggcaaaggcgattcgagcatcttggcgaagatttcaaactacgatatcgtttctcagggaagacgcgccgcttgcgatgccgtctacgtgtcgaagaagctgttaaagagcaccgggaaggcggcgtggatcgccggtacgacgtttctcatccttgccgtgcctttgatcttagagttggagcaagatcatcgattaggcgagatagattttgagcaggcgagtcttctcggaaccccaccggtcggtgcgatgctctaaagtaactttagaaaccctaatccgtcgatcatatcataaatttgatattatcatgcttgtttctgctactcgattagaagctgttagtttccttccttgtgtaagattaggtttactcataagggatttgatgaatttcaattggctattttgaagattgtgtttgagcaatcttcttctaatttatttggcaatttatgatgtgggctgagattttctccgtacaagtgattattcttttaatctcatagctgtgactcactttgagtggagcatcaatcttcgaaattttatttggcaatctggttaagaatataggtaaggatctttggtaaacttagctgtttacacttgtcttaatttctcgtcaacatttatgccatttagttcaaattttgatttgatcatcactcctttacatggcaaggcctgtaaatagactgcctaaaccttgatgatgcttcttttgttcagcaaatatcttgttagcatcactgctcttttcgtgacaaaacctttgactcccactttttcagttttcaatgtgtattttgactctgtttgcatgaagggttttggtttagctgacttgctgattactgaatctcttgattttattcttcccctatcgccttcacacttgaaccaaaagaactatacaaaattctactttaaaccaaaaactgaaatcatacttgaattccctgggttattcaattgtagtagaacaaaacgttgtctgtcctggacccaatcgcttaaaagaaaaaacatatgttgtgggccgtcccatacttgatgaagcccatatgatttaaaggagttaaaccagtcaactcgaaggagtaaaatcagtcaatcatactgacactgcatagagagaaagaaaggttcacttttagtttgtcttattcgcctcatacagaaaaagtcaatgacgactcccaaacgctgcgtttctcaaatctttgaagactctccttcgtggagagtatacacttttctttcctcacttcgtcttttaaagtttcaaattgtcgtctttctttggacagagagatacattgatcaaaaatacgctttgcataagcaaatctaccatcagtttttcactacattctcttctctgaggaaagtcgaaaatccggttctctcactacagagtctcaccctcttaaaaccctaaatcagtttcagagttggttcttttgcttgtaagttcttctcattttttctgctaaagcttcaatcttttccgtttcgagacctctactcgttttttttattctggaaaattgaaacgttttagggttttggtactttgttgtcccttcggttttccaaaaaaaaaaaaaaaaaaacagaaaaagttccaatttttttggtgggtaataagtatttggtaatggctcttcctacatttgtttttttgtttgctttcatctcaaaattcagggtcttagtcacattagtttcgttacacatctaactcttttactctcttctctggtttcgctcttattggtggggcaggaagatgaaagtttccacttttgttactttgctatgtttatttctgaagttttttgaggttggtgagtgattcagctttgttattgcagaaacttgttgaaaatggcaccgaatcttaggattaagaaagcctgtgacgcgatgaagcttttaggaatatcagagacgaaaacaagggcctttctcaggaaacttctcaagacctatgagaataactgggatttcattgaagaggatgcttataaggtccttcttgatgcaatcttcgacgaggctgatgcccaggtctgttttttctgcttaatcactttttattttctttatttgattgtttacatattctcacttagtcagttctctttctttgatatgtcatatggtagtccactgaaaaaaataagaaggaagaggaaaagaagaagaaggaagaggaaaagaagtccagagtaagttaactttctttaatttgatgacaattttctggtgttttttgatgttgtttcttctcaaggttttgatgatctttttttgtttctttagagtgtagcaacgagcaggggaaggaggaaagctcctgaggtatacgacctaaatatctttgttgttttagaatttgttatcatcatgaaacattaacttgtttttttttttggttaaaccaaactcagcctttggtacaagatgaagaggacgatatggatgaagatgaatttccattgaaaaggaggttgcgcagtagacgtggaagagcttcatcttcatcttcatcttcatcttcctataacaacgaggatctcaaggtatgtttagtatctgtttttcgggtttcttggtcatattatatagcctgtgtttattttgttttcggtgaaacagacacagcctgaagaggaagatgaagatgatggtgtgactgaattacctccgttaaagaggtacgtacgcagaaatggtgaacgagggttggcaatgactgtttataacaatgcaagtcctagctccagcagtcgcttgtcaatggagcccgaagaagtaccaccaatggttctattgccagctcatcctatggaaacgaaggtttctgaagccagtgcacttgttatcctcaatgatgaacccaatatcgatcataagcctgtgatttcaggtattgttacatgaactcaagataaaacttagtaatctttcttttattgctttttatgtggttgtgatgagatgttgaaacctttgcattttaacctgatctgtcttttgtgatgtttccttctgacacttcttttcattatttagatacaggaaactgttcagctcccatgcttgagatggggaaatcaaatatacatgtgcaagaatgggattgggaaaccaaagatattctcaatgatactactgccatggatgtgtctccttcttcagctattggggaatcaagtgagcataaggttgctgctgcttcagttgaattagcttcttcgacttctggtgaggcaaagatttgtctaagtttcgcgcctgcaactggagaaacaacgaatttgcatttgccttctatggaggatcttcggagagcaatggaggagaagtgcctcaagtcgtacaaaattgttcaccccgagttttcggtccttgggttcatgaaggacatgtgtagctgttacatagacttggcaaagaattcaaccagccagttgcttgaaacagaaaccgtatgtgacatgagtaaggcgggtgatgaaagtggtgcagttggcatttcgatgccgttggtggttgttcctgaatgcgagatctcgggagatggctggaaagcaattagcaacatgaaggacattacggctggtgaagaaaacgttgagattccatgggtgaatgagatcaacgagaaggttccttcccgtttccgttacatgcctcacagctttgtgtttcaagatgctccagtgatattctcgctctcaagtttctctgatgagcaaagctgctccacttcttgtatcgaagactgcctggcttcagaaatgtcgtgcaattgtgcaattggtgttgataacgggtttgcgtacacattagatgggttactcaaagaagaattcttggaagctcggatctctgaggctcgtgatcaacggaaacaggtgctgcgattctgtgaagagtgcccattggagagagctaaaaaggttgagattttggaaccatgtaaagggcatctaaagaggggagccattaaagagtgttggttcaaatgtggttgcactaagagatgcggtaaccgagtggtgcaaagaggaatgcacaacaaattacaggtaaaacattcaccttaactaacaatcttttacgtgtttttctttcatcttgttatataaatcaattagtttccatttttgatcagtcatctttttttcttaatatcaggtgtttttcacgccaaatgggaaaggctggggacttaggactttagagaaactgcctaaaggggcatttatttgtgagtacattggagagatattgacaattccggagttataccaacgtagctttgaagataaacccactttgcctgtgatattggatgcacattggggttctgaagaaaggttagagggtgacaaagctctgtgtcttgatgggatgttttatggaaatatctcaaggttccttaaccacaggtaatggcttcccctaaaactcagaacaccaatggtgtttctctctattttaaactgatgtttctttctgtcctttgatgtatgtagatgtcttgatgcaaacttgatcgagattccagttcaagtcgagactccggatcagcattattatcatgtaatgatacaatgacggtctcatatataatcttttgctcatatgtttcttctgttttggggaaattgtttaaactgtaatcttttccagcttgcattcttcacaacaagagacatcgaggcaatggaggaactcgcatgggtgtgtataatttcgcatatccattttatattaggctgagaagtttctataccgatgaaaatgattgtatattcctaatgcttactgatatcttgatatacattgatctgatgtaaccctttcacattctcaggattatggcattgacttcaacgataatgactctctaatgaaaccctttgattgtctgtgtggtagcagattctgcaggaacaagaagcgatcaacgagtgagtaatatcatcagagtttgttgattctgttacatgggactgagtaatatcaatcctgcatctcactgactgaattttttttacctttgttatgttccagagaccatgcagattttgaacaaagcatgagaggctagtgaagaagaaaagacgtgatgagaccctctgttttttggtgaatgggactctccaaaccggtccgggttaatagattttgtaggttgggaaaaaaagaagcttaagttgggtattgtgtgatcaaactctgtatagctcgagggtccagtgccttttgttttaatttagaagtttgaccatctttaattctaaatctctctaaaccacgttcttttttgtagtaaaccataaatttccgcactgttgagggccaacggatccctgatcgtaagactaggagtctaggatggacaagtttttacttcttacttttatcactcagtttatggagatggaaagtatgattgtattgtctttgtgcatatggtgtgttcatctaaaacaagtgaaaaaagctaaaaaattgccgttgaacaactctctcactatatatataatctatttatgtatgaaatttaatcaaaacgtgattaacaaattataaacaaacaactcttgtcatgttatgatcggtgttacttaattgaccattctactttttgaatgttataattgtttgcttaagaaagtaagcttttacgaaagtggtatcctaatgtataacacgtattatctaaaagatcaaaataacgggaaaaatgagattctcatcgttaacattttacgattattttgacaaaatatggccaaaagttgtagtaaatgtttaacttattcaattttaagctgaattggcagttgaaaataataagcatttaattgtagtccaactgtgcatgatcggtcgtatacgtgctttgctggaaaaccgagtgtttctaatgacttaatatctatactctacttatattcaattaagagatccaaattaattttcacaaatgcagcatagaagaaaaaaagagtttaggattaaaaatatatatgtgaaaatttttaaaaacagttatgagttgttttttttttgttttggttaaaaataggtttgagttgttcatgagcgtcatgttttacttttaccatttctatatgtattttcgtgtatatatttaacaatatttaaattttgtcgacatctatccttgccttgctagctagcaaaccaacaaatcaatttattcaacggttttatttattaaaattaaaatccatgtgctgccattccaactcttcaatcaattttgtcaccataaccttaccacctcctctctagctagatctatctatcttgtcctttccatttcataatgctaacaagttctaaaagaacttttggtgtaatttactttagatttttgactcgaaactgctattttcttatatatgaatattgttcttgtgatcccatttgatttttggtgtcgatagagtctacgtatataacaatgtctactttgaacatcatttggaaaaaaaacaaaaacaattagtttgatcgtttgatttgaactgttaataaaagtaagttaaatagctgtttgattttgattgcatcaattattggaactacaattatttcacactatcatccaacttgcttcatgatgtatccatttcaaatcctaaaaattaatttccaacttcatttgttaattgcaatgtgtatactatttgtgccgatagtcaaatacatgatacatctacaattctacatacattatgtaattatacactttggcaaatatatcgccactaatcgaggaaaacaattgctcataccatcatactttttttattttttttgataagttcatacaatcatacttcttggcaagttggcagttaattatctttaatttatccaaatcttttagtttcacccgcatattaagttaaactttcataattttgcctcccataaaatgttggaaagctagatcatatcgtgcatgaatgtatagtaaacaactatatatatttttaaaaatactataatgtataattacaaccaaattattattttatttatgaaaaaaataatgaaacaccaaaaactttgattcagatttgtgtattaattatttttctttattgttagggctgccagtttgactcttctacttataaaagcctctttacacacaaacacatacacacttgtgatcaaaatctcaagatccaaaactcttctttcaaacatggaccgaaccatgtttctttccctgacaatagcctcactcttggtcggagtcgtctcagctggtgactggaacatcttgaaccaactcagaggactcggctcatcgtcaagccaaaatggtatcgtttctaaaggtatcaagacggacctgaaaggatactgtgaaagctggaggatcaacgtggaagttcacaacatcagaaagttcgatgtggtgcctcaagagtgtgtatcgcacattaaggattacatgacgtcatcgcagtacaaggatgacgtggcgagaaccgttgatgaggtcattcttcatttcgggagcatgtgctgtagcaagtctaagtgtgacggcatggacgcttggatctttgatatcgatgacacgcttctctctaccatcccttaccacaagaaaaatggcttcttcgggtaatttatgaaattctctatcttacccggtttaagataaaccaacttgaattgatgggtgttgtgtatacgtaactgtacatattgttactttttagctttttacttaagtgaatgcactttggatctgactgaaccggaccggatctctgattagagatgtgaattttagatttcggttcaatttggattaatcttatttttctcatgctaatggattaaaaacagaggagagaaattgaactcaacgaaattcgaggattggatacagaagaagaaagcaccagcagtgccacacatgaagaaattgtaccacgacatcagagaaagaggcattaagatcttcttgatctcttcccggaaagaatatctcaggtctgccaccgtcgacaacctcatccaagccggttactatggctggtccaacctaatgctcaggtacaactataccggatattgaagccaaaatctatctgtttcatatattctctaaaaccgttcaaaatcaagatgaatcaaaagtcaagtttttccactccttaataccttgagtagttttcatatattcactcttaagtgagcacacaaccgattttgtacacccctctagtaattttagtgtactctaacaagaaaactgaaaaatgcagggggctagaagatcagcaaaaggaagtgaaacaatacaagtcagagaagagaaaatggctaatgagtcttggttacagagtctggggagtgatgggtgaccaatggagtagctttgcaggctgtcctcttcccaggagaaccttcaagctccctaactccatctactatgtcgcctgatcaaaaccaaacacaaaactttgatttagcttcaaacaaaaagaagaatccacgaataagagagagctgttttgaatctgtttcttgtttattttcccctttttcgtgtcatattatattgagagacttatgcatccaaaagaacaaacaaatggttatatgtaacagagagaaatcaaatcaaaatcacacattatcaaccaaaggtttacagtaccaactaagcaagtgtggaatgagtacatcaccattatttgtctatgttgttcaaagctttctccagtcttgcctcaaatggtgttgaatgccaatttacgctcttatcctgcacttccaaaaaaactgttattgtcggggaaaaggacacctgattgattattgcactcgaggtagttgggtttgaaagtgtgatgaaatcaatatcagaaattctactatcttttggagtgtttttactggtttatgcgtacctctctgtacttgctactggtgtttggtattcccttgaatgaagatgcagagccgcaatctattgcctttgagcgattaccccagtaaccaccaactgtgcctataataggtgtctcatcagggcttttgctcggtgatttccttggcgtagatgtagccgagaactgtttgatatcctccaatgtcaatgcgcataatacaggtctatcgtcatgattgattctaagcggttttgagtagcagctggtagacttgagtttctcgggtgttaaggtatacatagaggcgctgttgcattcactaccagactcagatgttgataaccatgttgaaaggctagcatcaacggccagttcttggtttcgcagtttcttgggttcaattctgcatttcggtttgacgctgagtgttatatcatcaatctgagggtctgtaccgaaagaagaggaatcccttttttcttcttgatctgcgatgaagttagagttctccttttgagactgtttctgctttgttctccctttggatttagcggatttccactgagtaagattctcaacagggttaagtactccttggccatcatagtggtttccatctctaacagtctcgttagaccttctcagctttgaatcaatctcctctgttttatccccaatatcttgagtataaacttccttggttgggttatgcaagctatcctcactaaatccaacatcactgtaatattcttcatcttcatctagatcgctgtcactgcagtcaaactcatcctcctctatgtcatcatcactttctctgcaattcttgtatctgtggttttcaggatacgaccctgaggagttggaggcaacctcaatgatctgatcatcagtcttgcttgactttaatgacctcttttcggattcaacctcttcgttcttctcttctgagagttcaacagattcttctgaaacaacgtgttcataggttttgactttggagtcaaaagtgactctcttcctagaaatagtgcttggactgcatttctcttcagcctcgtcactgagaaatcagaaaatgttagcttaaaacttgaatctagaggaaaagcacacaaataaaacaatcacactcaccaaatttcagtgattggaatcacagaagctttcgggatctcctcaacaatgtggactctatcattcagatgatgaggttctgcagtttccacagagagtttctatgcataacaaacaaattcatcgggtcaagcaaaatcaatggaagttaaatgcgataaacacggagatgatctatctagaatgtagcgtaattcaagcaaattcatcactaaaaagaaactgaaagaagcgaggaatttcagataaaaactctcacaaactaaacgtaagaatttttttaaggaaacttacgttatctctagcttcatcggaatctctgcgtctctgacgccggcgattcttccgtccaccgaagcaacccgaaaagcaacccatagtcccgaaaattctcaaggtctagcgagagaagaagagaaacttcatgcgtgtggtttccagatatttgatcaagcattaataggtcgacatcgaaattgaggagcggggtctggtgtggtggggacgatcactacgaagagagcggggaaaaagtgatcacttcggaaattgggaatttagggtttgtttagcattattttttgcctctttaatttattaattgtgtagctttattaaggaggataaagtaagtgaccgttacaattttgacccaccaatgccctgtcaaagccttttggtattggtgcgttggcacaccatttttcgttacaatttatttttcattaaaaacattaattctgtcattaatcggtaagatttccaaactttaagttacaaagctttgtttttcgaaagtaaaagttggaattttatatgcgttcaaacacgaatctgttttgttatcttacgaaatcaaaaatagtaaaattaaactatgttacatatgtgtagggaaattgaaatgtcttttgtctcttcctcttaaattagccaatcacaggatgtaacttgtaaccagcaatggactccaagacccatgtgtgaccaacgagacgagacccagtttggcttgctaaagcttctgcgtcattagctcgttgccaaatgattgtgacttcttcacctaaggcacatccatgtggaggatcaatgttgtaaaccacaatcgatgatgatctttggtcattgacattgttgctgctttctgcaccaagctcatcctctgtgttcaagattgtaccaccagcgactttgactagattctgaaggtcttccttgtatcctttatagaaatctccaaagaaatagaacttcaagccctcaaagagctttggtttctgtttgccaaaagaaaaaatagagagtgagatatctaaaagaagcaaagcactttcaaacttgtttttggtgtgtttttatacttacattagtttctgctctgagtcttgcggtttttggtccatcttgacatccttgagtatcaatttgaatctcgaatggttcttcatcaacaggttgagaagcttttaggcttgctttcatccctagaaacaattcaaggttgattcatgtaaagatgaagattccttaatggtgaaaagtaaagattatgacaaactcttgagtgagcaatctaacttacaagctgcattgataatccattttccattgagaatacccataagaaccttcaaagttcttgtgcaagctcctttttcatctgtagaagcaatcacatgtgtaacacttgggttccagtaccttgatatggtcgcgttaaatcgaacggctaaactttccatcagtttctagggaatagcaatgcaatgagaaaattagtctttttatatgaaaaagctctaccaactttgaaccaagagtggtaaatccacaaacacttgtttcttgtttgaaccttgtggaaagaagattaacttagtactgaccttatcacttttagagagtgctgatccacagagaacaagctcttttgtaaaagctggtgtttgttccaaagaacatagctcagcaggatttctgagggagcaaggtaatgagatttattagttgctatcataagaataataatgtcatactgtaagtattaaattatatgctgaaacagaattatacatttttggtaagggctcggctctggaaacgcgatgtccagacttctcgttcgggaatttgacagaagaatgagccggacaaagtagaagaaaatcttcctgtaaagaccaagaaaacaatctcacattataactagaacattggtaagtaactcttatgtgaatgagaatgtagagaatgtggcaaaacatacataatcccaacggcatctagaaatctctcttgcacatggaacatgatagcttcgacggcaagacttgacaaagcagcctaaggcagcacctttcagactacatttagtgcacttgattttcatcccccttgccagttctgctttcaggttcttcactgtgtcaccttcatagtaaacttgcggtgccctgaacatttattcaactacttttagtatttttatcatgcaaaagccaaaagcgttataacactagccaaactatatccacatggacttgcagaaacaaagatgagcaaatgtagaagttttttgggtttcattttctataccattcgatacatgcgctatggacatggataacattggagcggaagatgtcatctccatccaccggtcttcccctagagtaatgcagcatttctccagtggcctaacaaatattgatccagccagttgagtaaaatacttcacaaacagagaagctcagtttctagagcagaggatatggcaaagacttttaaaggttttacctcagataccctagcggattggcagaaaccacaaatggttatgttggatgatgtttgttctaatgcctttgagattttctcacttagctgatcatcagagtttgcagagcatttaccattgcagtcaatatcagcagatttttgcatcagattattctccctcttggggaccttcagatgattttccattgcatcagaagcggtgatgtcacgcttcctttttgaatcttgttctgtatgacttttgggtaactgctggacacaaaagatcactacacatcttaagttgtttgatctcaagcacagaacaaaactatagattacccaaaaactgaagtacaccatctattaacatgtaaatgtgtgattaagaatactcataactgataaactaaaatagtcaacttatgaagtaagacgagaatgcacctgatggttctgtgctttaacataatcagtgggatcatctgaccggaggctctccatcaaccgcagcaaagtcggatcctgagtcttaggattcggactgctttcctggataaaggaatcaccacatatccgcttccttgcagcattgctaggctgctcagaagcagtgatgtccctcacattttttgcagcttgttctgtataactttccggagtctgcagcaagaagaaaaaaaagaggaatttataaacatctttcaatattgcgcactgataaatcaaaatgatcagtaatatgctcttacgtgattggcagcatcatactctgattcaaactcatataataggagatgatcactcaactgcttttcagtccaatcctgatgcttaggtcttggatcactttcttctgaggtcggaagaggagaaccatcacgactagaagaatcagtaccaccactgcgcttgctcacatccttgtcagtcatctcagaatcttcagattcgccatgtttagggctgttggaattgttcaatgcatcgttcttgtagttgcaatcatttggaatctgtaattgtgggagatgaacactaacagctgcattcaagctcttgtatatgcttataacactctccatgaatcgaagatctctcctagctgcacatgagagtaattcacaatttcacatactgtcttgaacactaatcttcaaatgatatcactggacttaccctttttgggatgtttagatttgcagacaggacatcccgattcaacttgcgacgatttgtgtacacatgaactgtacaaataatttccagaaagataagaatctatatgaattcaaatttgtaatgaattgttaaagaataacagagtagttagataatctcactcgcagaagacgtggtcgcaaggaagcaacaccggtcgattaagcaattttaagctgcaaattacgtaaatctcttgttacgattccaagaacactaaacaaaaactcgattactctacaatataatcaaggaaagggaagctgtgggtgaaacaaaccatagagggcacttgagctcgagctcgagcttctggagatgaagaacccatggattcattagcatgttagtaaattccgccattggtgatgtacaaaacccagatctaaatgacgaaagctcttgaaaccgagaagagaaggagaagatgcacttccttgcttcgtctccgtgcgattggtatttactttgagaatttagagacacgtgtacgatagatatcaaatggcgggaagataggcggggattttatgatttgattaagcgggagaaaatgtgaataaacgcccgcttgtttgttacgaaaattttgaaattattcaactttcaatttcaaaggcccaattaaaagcccatttgtttgttacgacgtgatagagagtagtaaccttctcgatgacttcgaaggttcttgtaagggtatatttggaaagttaggacgcttccaaaaacttttcaactctcaccttcaaggtccccaacaacgcacacactctctctctctcctctctcttacttttcctcctaaactctggcgatgaaaagtagttagagacaccgagcgatgggagcgaattcgaaatcagtaacggcttccttcaccgtcatcgccgtttttttcttgatttgcggtggccgaactgcggtggaggatgagaccgagtttcacggcgactactcgaagctatcgggtataatcattccgggatttgcgtcgacgcagctacgagcgtggtcgatccttgactgtccatacactccgttggacttcaatccgctcgacctcgtatggctagacaccactaaggtccgtgatcttcatttccttcgctccttattctgtcggtcgagtcacttgttgatgaattccaagcgaaatatagcaatgaagcatgtctcgtctctcttattgattcgttcattagtcaacagtgacgcttctgaatctgagtttagagtcatataaaacagctgactcggcgagtgtttcccatcgcttttggttcgctaaatgtagcgcaatgaatgtgtaattagtctgcgctttttattcaactagatctgcaagtttttcagagtgctcaatagtagttagaaaatgttaggtcattttacttgtgcattgtgattcttttggttgttgcttactgatcgacgtgatggatggtttacagcttctttctgctgtcaactgctggtttaagtgtatggtgctagatccttataatcaaacagaccatcccgagtgtaagtcacggcctgacagtggtctttcagccatcacagaattggatccaggttacataacaggtagtttcggatttttctttcttttgagttttcttcaatttgatatcatcttgttgtgatataatatggctaagttcattaatttggtcaattttcaggtcctctttctactgtctggaaagagtggcttaagtggtgtgttgagtttggtatagaagcaaatgcaattgtcgctgttccatacgattggagattgtcaccaaccaaattggaagagcgtgacctttactttcacaagctcaagttagtccttatcaggctaatgtcttttatcttctctttttatgtaagataagctaagagctctggtcgtcttcctttttgcaggttgacctttgaaactgctttaaaactccgtggcggcccttctatagtatttgcccattcaatgggtaataatgtcttcagatactttctggaatggctgaggctagaaattgcaccaaaacattatttgaagtggcttgatcagcatatccatgcttatttcgctgttggtaccggcctactatccttaagttaccattttattttttctctaattgggggagttatgttgtgacttactggattgagctcgatacctgatttgttgttgatttaggagctcctcttcttggttctgttgaggcaatcaaatctactctctctggtgtaacgtttggccttcctgtttctgaggtgacctctgacttctctttagttttaagtagttgatatcaaccaggtcttataactcactggattttccttttgaaagtattacttttgttaattgaactgctgtacgcgatatggtatctgtagatcttgaagtgctagttatcaaagaacatattgtgggtagtatacctgtcagcggccttagctaatacaaccaaaccacatgtacactgatttagttttcagattattatggtagactttaagttgagaagaaactttgactgaaatctttttattttaataggctatgatttgtttattgaaatcatgtgacatattgacatgcgcttctcatgttttttgttggcaaggcttcagggaactgctcggttgttgtccaattcttttgcgtcgtcattgtggcttatgccattttcaaagaattgcaagggtgataacacattctggacgcatttttctgggggtgctgcaaagaaagataagcgcgtataccactgtgatgaagaggaatatcaatcaaaatattctggctggccgacaaatattattaacattgaaattccttccactagcggttagactctgtatatgcaactgtaacactaacaaaagtttcaccaagaatgttcactctcatatttcgttcctttgatgtgtatccatcagttacagaaacagctctagtcaacatgaccagcatggaatgtggccttcccacccttttgtctttcacagcccgtgaactagcagatgggactcttttcaaagcaatagaagactatgacccagatagcaagaggatgttacaccagttaaagaagtacgtacctttctttgtgataagaaatattgctcatcgatcatcacttgctggcttcttgtacgtcaaattgttttgtttaaatctctatatcaattgttcatatgctttgtctttcttactataagaaacaagtataatcagaaaccttattattgattatcagttctctccttatattatggaatgtctttttcgtttacagttatgaatgcaaaagggggtattttagttgattgattctctcattctctagtttgttttgactaatagcgtcaattttgtttttctagcaaatctttgtgaattatatataacatgctaactatacttttcaggttgtatcatgatgaccctgtttttaatcctctgactccttgggagagaccacctataaaaaatgtattttgcatatatggtgctcatctaaagacagaggtatgatgcattctcaatatcacattatgcgttgactttgttattatattccccatttggtttgcaatatctttttgaattatgatttatcttctcccttgcatcttatgctattaagcgttaaaggtactaaatgtatgaagctgtctgtcataggttggttattactttgccccaagtggcaaaccttatcctgataattggatcatcacggatatcatttatgaaactgaaggttccctcgtgtcaaggtaattttccgcaatggcagaagtaaaacaggaaggcaaagtcttctgtatcagtctagtggcatgttatctcagttgcataagcaaattattaaacaactaaaatttaagtacttttttatcattccttttgagcttagtggatgatcagtggcttaaagtgggaagaggtgttgcatgaaacatgacacttgtatcaaagataactagcaaaacaaaactaacccatttctgaatttcatattattaggagtagtcgtgcttttaaaaaatttgttttaagaaaccgaaaaactagttcatatcttgattgtgcaatatctgcaggtctggaactgtggttgatgggaacgctggacctataactggggatgagacggtaagctcagaagttggttttgaaattatcttcttgcaaactactgaagactaagataatacttgcttctggaacactgcttgctatgttctctagtacactgcaatattgactctccgctacttttattgattatgaaattgatctcttataggtaccctatcattcactctcttggtgcaagaattggctcggacctaaagttaacataacaatggctccccaggtactcttttttagttcctcaccttatatagatcaaactttaagtgtacttttctggttatgtgttgatttacctccaatttgttctttctaaaaatcatatatctctgtactcctcaagaacttgtattaatctaaacgagattctcattgggaaaataaaacaacagccagaacacgatggaagcgacgtacatgtggaactaaatgttgatcatgagcatgggtcagacatcatagctaacatgacaaaagcaccaagggttaagtacataaccttttatgaagactctgagagcattccggggaagagaaccgcagtctgggagcttgataaaagtgggtattaaacatatgaaacatgctcccaaagtaccttgcattgttttttcaacttttgagtaaccgttattgtgcagcaaatcacaggaacatagtaagatctccagttctgatgagggagttatggcttcagatgtggcatgacattcagcctggtgcaaagtccaaatttgtcaccaaaggtaaaaaagaaacttattggctcttgtaccacttcttattgcttttggtgtaaatatgaataccgtgtcacagccaagcgcgggccacttagagatgcggattgctactgggattacgggaaagcctgttgtgcttggcaagaatactgtgaatacaggtatcactctcctcttcccatccaatgttttttaatcttattcttatctatgattctgaaatctgtattttactgatttggttgctgtaattgtattgtgaaacctaatattgcagatacagttttggggatgttcacttaggacaaagttgtagattgaggaacacatctgctaatatgcttctccagtacatataaatttcttcgttcaggtcacattacttctctaattttctcacattccaactctctctttatcttggatattggatttcacgcaaacaacaaactttaaccaacctttttttctctttttaatggttacagcaaatgaccattccttcttcttcattttcttctcccagtaagaggtaaaaaaaaaaggggtttaaaacggtcaattcttattgctctctctatttctcacgcaaaggtattctttgtgatttttttttctattacgagcaatatgatagacagtttgggtacagctaagagtgcagtcactttgaacttaccggctaaagtagtaaatccatatgaaaacaatgtagagttttttttttttaactacaagtgcgatttggtctcttccgttttgatggagagaaacagaacaattctgagtatgttcttgcttttggttggtaccatttccctctttagcttattgggtacaaaattgtatgatgattaaatcagaaaaaaaaaaaaagacggtgaagattttggttgaatttttatttctcatctgtttgattgtttcaaatgtagcatttgagttggcagtcaatatgataaagacgacacttttgtatttaacgtctgaagttatagagggatagatagaatataaagttccactcactttcttacatatttaattaatttaatatatatgtcgtaatgtattaaacagtaggcatgtatttatttgaataccgaaccagtttatcagtttatgtagtaattttgtactgtatacaatatgaaagtattaagatgtgaaaaaattactttttatggattttacgtttttgataagcaatttggagagagagaaagggaacaaagcataattaggtggaagaattaaagtgctaggtggtttgatggtttggttgaacatgagttttgaactttttatgtgagagttaatacttttatgtatcgaaattaaatgttttagtcaattttatggtccctctcaaatttggggtccttttttattttatttttctaaatttgcctcccttattaaaataatagacatgcattcgttttttctaaatttgcctcttaattttttccttttctttttttgtttaacattggcattattctttcagtctattggatgaaaggtggcaaacttaatgccaaactgtccaaaacccaacaaaattttcacaacttcaagtctaccaaaattttcagttctgttttttttttttttacaatgtatttaaggtgataatggtgtaaaaaaattgatatatttatatatcttaacgtcaggttattttagttatatattatataattaaattttataaaacaaatctaaaatactaaaatttcctacttctacaaaacactctgattaaaataagaaaatatgtgttaatcaaaacttaagtactacactttgtgcattcttcataaagttcattgaaatttgatatggtcggatatgctacatataaatttgtaatcgatgattattacatctcacttgtcaattagttatagtagggtaagatctaaatattctcaatagcagattatattaatgggtttcagtgttattattttgatgttaataattatataaagcgaaactcaaactaattgcaaaaatctgtaaataagggatttattgtcatttaaataatcagtgaataggattctcaaccactactattaagtacttgagtttttgcttgtcttaaattggtcgcttcttgaatttgatttctcgccatcgttgaaattttataatgtttaggttgctaataaataactaaaagtaaacgaggacaaagtctaaacttgaatcacttttctgtttctccctaacatttagcgtatatgcgtgttctgcatttacatataccatttggccacaaataaaaaggataaatttgacagaaacaaaaagtaaaaaaaaaaatcaattgtgtggtcgatcttgtgctgcacgcattagatttgcaaagctcactgataaaatttgacaacatttactaaaagatctgtgcaaacgttgtttgatcttcttaacactaaaaagtagtatatatgatttataatagtgatacggtacaaaatcatgattcacataacatataaacttagatgtctagcctaaacatgaaaataagagattcgttctttttgttttttaagagattcatttttagtagaaagtatatgatatacagtacttatgtatgtatgactttacgaggattggattccgaagcttctactttaaatatttcgcacaaactcataaaaactttatgccaaagaagcaaaatttcattaaatttgattccttgtagtctccaactttatacaacttttatgagaataaaaaggaacaatttagtcataaatttatatttcaatgggtaacccaaaattgaagaaacggtaaagcaaagaaggacaatccagtaaattccaattgagtggcattaatgtaattttattgaaaagtagagggtaatttaaacctccagcctctataaattgtcgtaacctacccattcccttaaactttctgttatcccctctttctcttattctctctctctcgctatctctccctcttaagtttttttttaaaacagactctccctcttaagttattcggtcgcaattaaaaaagaaaacaaaatctttataaattttgattttctctttttcacccgattattttgatttgactgttttacgacagtcaatatttcaattttattattgggtgctgacgtggcatgcatccaatagagtatcaccatgaacaccaaaacgatgcgtcttcccccacgtcgcgttctaacggcggataagcgcaaagaacgagacgccttcatctcctccgtcaccgataatccgccggaaatcgccaagtttccctctccgccgcctaaacttgttcctccgccggttaatcccatttccaagaaatcttcaaccgcagcagccgagccgatcggctcgaaccaactgatgttagccggttatctgagccacgagtacctcacccaaggcacactcttcggagagcaatggaaccaggctcgagcccaagccgagtccagtaagataaagccgagccatactgttgagccggctgaggaatgtgagccgaaacggaagaggtatagggaggttgctaatcttctccggtcagatggggcccaactgcccggcatcgtcaatcctgcccagcttgcccgatttctcaaactgtgatcggcgtaatccggtgtccacgtggagacagatcattggtctgtcgtccggcaagcgagacagccttaaaaccgaaaccttcttctctctctttttttttcaaatgtttttttagaatcctctctgtaaagctgactcgctcgctctctcttctcatcatcgtcttcctcggaaatcgactgagaaaatttagggtttgttgttgaggtagatgctcctcttttgtacatcagaaatatcaattagccaatggattatgttttcagatcagcaaaattgaacccttttctctgtgtgtatggattttgatgattccaaagtgattagagatctatacaaaacgatataaaaagttatcaatttcaatatcttctctaattatcgaacttcgtcgatggatctaagattcaaatgctaattgagattcaacctccggccagtttggtgtaatctgagatcatcatttttctggaagacaaaatttggtgatgccttggtatggccgaagttattcatgttaagtaaaaactctctgtgcatttagtgaatacaaattgtcttcggtagcttctttagagatttgatcatgtaaagaagctattcaattcaatacatttgagttgatagaaagatgatgatattgatatagaggtattttgttgaatttgaattgatttcaattagcgaaaagattgtgttgtgaggccagtaagcattgatgagatagctgggaaggttgtttctttttattcattgtagtaaaaaagaaaaacaaagcttgaaacttttgagattttctcagtctttcttcctcttcttcattaactcggctattctgttggatatgcagtaagcagtggactgaacggtgatcatgggattaacaccaagagctgtaggcagaacacttgcatcacagacatacaaatcttctgcctcccagctctctccttttccatcaatggctccttccttttctgtggcacccatacggcaacatcctatttgatgcgctgtaaaggattgagtccaatgcttactcatggacacaactccaggtggcgcgtttacggtatctaaaaatgcctctagatctttctgtttgattccatcacacttcattctctgcccgtcgctcctgtatgtgcctacctccgctgctcctgctgctactaggatcctcagtgcttgctttaacccaattgtcagattctcttcgtccgctttggttaatctgtatttgacaatgtctcctttcacctctccaactccttcatctctcaccatggcaaaaatatgagctgttcttgcgtatttggccattctttctttcatgtctgacccagagacccacggggtcagagctgcgaacgtacctggtcctatagcaggagtctccagtgtgatgttaggtgtagtggagtccattggatgcacataatgcaatgaagtgacgatctctccctcatgagccgctccttccaattctgaattcttttctgggaagtagccccaagccatcatgatagggtggatatggagaccgcgactgatgtttgaattcttcaacccgcttgaagccaacaatcctggtgtcttaagcgagccgcaagccacaattgtcactttggcattgatctgaagcttctttctggtttggtgggatagagaggctgcgactcccaaacatctttttcttcgtccgctctcctctcttttgttagcatcgttatccgccaagattagtttctcagccttgcactgtgttaggatcacagcattgttgttaactgcatcaaccagccaggttgaatctgtccctctcttctctccggttgggcatccatacgagcaactaccgcaataatgtttctctgttgaattccttggcactattgtcacatccaaaccaagcttctcgcaacctttccgcagaatctggttctgaaacccttctctgatgattttctcagtgacacctaacctcttgcagacaatacccatcgccgccttatatttctcactagaatatattgaaatccctcgatgtactgaccattcttcgatgatagcatcaggtgtttttaaggacgctgcccagtttaccacagagccaccaccgactgttgatcctgccatgaaccggaacctgccatcatgagtcatcatcaagctattggactcaaacagctcaaacatggaagggccctcgagagctgagtagtctctgggggcaaagtagttccccttctcgataactaccaccctaaggcccgactttgctagaattgcagctgcaacccctccgccacagccagaacccactaccactgcatcacactcgatcttgtaagtgtccctttctctgtcttctgtgactttgaggcctttgttgatcatacgttgcttgatggtcatctcatcttcttttgcagtctcgatgatcccttcatctagaggtctttccttttgttccatgtcctcattttcaccaatttccacgctataattaattgcatcccatactgggttttctgaattttcatttgtctgtccatgcatttgaattagttatacatatattcacaggtaataaaacatggaaaagttcttgctggttgaaaaaagttgttcgaaccatgatagggattagaaacacaaccatctggttgaagacatcgcactagtcctagtgacctagccgttttgtgggaatagaagaagaacacatcattactgagccaatcaattccagcataacttataaagtctcatgttgcaccttttttttatagtttctaacgaaagcgaatgacctgttatgcagaggaagatggaagacttacccatgtgaagtagtagaacaagaagatggctttgatcatcataaagccgattctcgctagtgggttataccactgtgtgttccatctctgaagaaccttttccctcttctccagggacatttcagagaacttgagaagaaaaggccaatgcttcttgtcaagacagactaacccgcaaagcagtaacgtccccagtctgaatgtgagtattctcaaaactattctcaccactaaaactgtcaatggtattgccttggtcgccagtagctctgccacctgattttttaatcaatttattatcattccaattgcacgtaagcactaataaattgtgcactgaagataacgtagagtaaaatctaaattttcatcactctatataccttagggttcattaaagattatgctattattaattatattcataatagtgtcttttactgagatgatagagaaagttggagataaacaacctcatctggtcgaacatgagactcagaagaagaagacttgaagaaagataagagtgcatcgttgcgcaaaaccttcaacttcatctcaagatttaagctctctaatggaacaggaggcataatagcgtcgcaaatggaagagagagcttggaggtcagattttgagaatccatggctgaagctttcttgtttcacactccatctcaacaaagggcttcctctcttccctaatcttcttcctcctaccatctctctcagcttttaggtcctttctctctttcttaattcctctttacgcttagttcttttttacacaaacatatatatagacatgcgaagagcttctagggtttgagcatttttcttttcgattttctctgcaaaacttgttgtgggaaagtgtaaggcggttccttaagtgttgggtaatcagaaagaaggactaaaacaaacttgaaagagattgtttcttttttgagttttgagatgattatgtttgtttgtttgcgtctggaaaaagagaccacagattacgtatcacgtgtgatgtatacgaatacgtatatgtgtcttgagtcaggtgtgggatacatcaggagtacacgtgacaaacgcagcatcgtactgttgtattacaatatgttacatgtgtatattttcgacatcaccgataaaataaagctctcagatattccaccaccaacatataaagtctctctctctatatatataaatcatttgtttttagctgtatataatataattatgacagccttttctttttcaggtgtcaataattgttttttttctggtatgtgtagcagccatgtagaaataacaacatttctgtgaaatcagataatatacatagtcttcaattacatatttcaatcgttttttccagctatatacatcatcctcaaaattttattaatagttatagtacgtttgtgaatatactacttatgtgtgtaacacagttttactagcgtcacaggttttttttttttttgagatgccagcaagagtatctatctcccgatggagatgctctaatggttattgcctacggttcatggttcttgggcctcttgggctctcttgctggcgaatcttgggcttctccctctgtttgggcatgtttcccctttatgggttttggccttctttgttttgttttatcttatcattctgtatgggtctggcccaatatgttgtttccatcttatcctcctaaaaagtcaataaacatgaaaaccctttgacaaaaaaattagtggccaataattgatttgtttttactaacaactgctgattttctttacagttttaccacattaagattgcaatagagaacaaacaataaaattagcctcatcgatttttttaaaaaaatctactttaaactaattgtcgttcacttaattagttttttgttttccctccatcacattgttaattagttccatatctggaactggaaacagaaaacttgatatattagctctccatgcacaatctccttttcctatttctttttgttcataactgagtattttgattcaaccttttttctttttcctggagaaagaaaattttaggtcgtagaatgttaaatcaaaatgctttcaaagaaatcactgacaatggctcttaatcgatcgagccgaaatgaaacttacgtgatttcttttcagttctgaattcatttcattcttatagcttccaggagaaaaacaaaattagtaaacacagaatagattatttttttttctcttagaaactatattgatttgtttggctatttcattatgtcaacctacaaaatgaagagcctcgtgaagggtcttaggtatttttctcaaatatttggtgagttttatatatatatactatatactatcttctctgaatgtagcctaataattttgtaaatttctcgttttaatattacattttatgatcaatttgcataacgcagaaaacgagaaagaggcagagatgcaaattggaactccaacagatgtaaaacatgttgctcacattggttgggatggaggctctgtcaatcataatccacccagctgggtatttaatttaattttcaataattttttggtctatagtataacattaactaataaatcattatcataaagtcaaaataatgaaattcaatgtagatgaaagatttcaaagtattgggtggatattcaccggcgcttatcggaaatatcaaggaggatgcttcatgcatttttgaaggtgagctatctaatatggaatagtactatagatatttttttttgtaaaagaagaaataattataaataaaaaatgcacatgcagattcgactcggtcacgtgatataccgagacttccaaaatcgtcgagagagcgttcgagcactttaggtggttcaccaacaaaagaacgatcacgacgacgtggatcttcacaatataatggaaaccctaaagtttcacggagatcatcaaaagaatcttctgctattcctcaagatggtggttttaataagaaatctcgtagaaaaaaatcaaaggactgtgtagatggtggatctagaagatcgtcacgacgagtacgtggatctcaagtagaatctataagtgattcttcatcaacgtctgatgcaggatatctaacttaagacgataaaaatttgcatcaaaataaataacataggttactagggaaattcaattaagctagctacagtgctggttcttgtgaggatttgttacctattttatttgattagtttaaaaccaacgtgccttcatggcttcagaataaaataaaataaacaatttccccagttgcaataaagaaaaaacagtaggtgagtcttagtcaaggtcaattagttttcaaatcaataattattttccaaaccgatccaaaccggctaaataaccatcagtctccgcggtttaagatttgactttaccaatcttctcttctgtctctctcacacaactcagtccctcttcgacgttttattgaatccgcattttgaagtaaatgaaagacttctctgcgaacgttactcttcttcatatgtgaagcattgctccattttttaggtagttcatagagagagagagagagagagagagagagagagctcttcttttacattgttttcgaacccgtccctgattctttcggcgcaagtttgctccatagtcaaactctgacaatgtctatggcgagtttgtatcggcggtctctttcccctccggcgatagatttcgcttcttttgaaggaaaggtgcgttatttctcaagtgttcgatccatggattcaattgaaaattcagggttctgggttttaactttttaagtatccttgtgcttctggttagagatgatcactgatttggtttttgtatgttgattgatttggttacttctctatctgtatagagtctagaaattggattttcttgggaactgtgtaaaactcgtaaaaccctaaaccccttgctgtttttacaagtttagttgttggtgagagatctgagcatgcttcatgataaatggttcacgaattattgatagccaatttagtagaatgggacaagttcttttgccctgagaatttaaatgttgtcattgtctttgcagcaaatcttcaatgaagcgcttcagaaaggcactatggaaggatttttcgggctgatttcttattttcagacacagtctgagccagctttttgtggcttagctagtctttcgatggttttgaattctctttctattgacccgggaagaaagtggaaaggtatacatacctctactggagagtacatttgttggtgggtttttgaatttttttggtttctctcagggccttggaggtggtttgatgaatcaatgctggaatgttgcgagccgcttgaaatagtgaaggataaaggcatttcatttggaaaagtggtctgtttagctcattcttcaggagcaaaagtcgaagctttccgcacaaatcagagcaccattgatgatttccgcaaatatgtggtcaaatgttcaacttctgataattgtcatatgatctcaacatatcataggcaagtactcaagcaggtatcatttttttggcctaaactctgtgtatattaacagttatatggcaattaagtgaaattcattagacttaatgttattacaaagtttgataatggtgaaactctttcatgtcttgctatgaagtcccatgctgatcggattctaatgtctatgattgcagactggaactggccacttttcacctattggtggttataatgctgaaagagatatggctttgattcttgatgtcgctcgtttcaagtatcctcctcactgggttcctcttaaacttctttgggatgccatggatagtattgatcagtcaacagggagacgtagagggtacatggatctctattctttttcttaggcttcacttgtatgattaaagaatgtaatccgtttctttttgctattctgctttacttccaggttcatgcttatatcaagaccccacagagaaccaggattgctctatacattagtaagtccaaagtcatggttctattagtagttgctgctattacaataacatttctttcgaataggactgagtaatgatatcttgattatcgatttcagagttgtaaggatgagagctggatcagcattgcaaagtatttgaaggaagatgttcctcgtcttgtaagctcacaacatgttgatactattgaaagaatcttatatgttgtattcaagtcacttccagcaaatttcaaccaatttatcaaatggatggctgagattcgaagaacagaggatgtaaatcaaaatcttagctcagaagagaaatcaaggctcaaattaaaggtattatcttgtccatttgcttctgaactttagttttccatgtttatattccatcagtttattcatcactgttctatggttcgttttgctgtagcaagagttactgaaacaagtgcaagaaactaaactgttcaagcatgtggataagtttctctcctctgtgtacgaagacaatctgccatatgttgctgctaaggtttattgtgacggagatgaaatcttatcgggatatgaatcagatgaatcctgttgtaaggaaacttgtgtcaaatgtatcaaaggtatgtttgttcttacattctggttatctttctaagcgcttcagaaaccttggcttgaagttagtagtgtgcaaagttctaatcaagaaatcacttttttctttgaatttcttgttttacatcaaggtcttggtgaggagaaagtgacagtggtagcttacccatccgggaacgatgtgttcactgctcttctgttggctttacctccacagacgtggtcaggtatcaaagaccagtcacttttgcaagaaatgaaacagctcatttccatggttagccacccgactttgcttcaacaagaggtacataactaagccaactcttcacttggagtctgagttatatatcttctaattcttaggataagaaacagaaatgaaactcagttatatagtctgaggattaccttctgaagctgactcttttttaaggctgaactccagaatccattagatgagaaatatgtagtaaagtcagctaagttaaatcgttttcctttggtgggttacaggttttgcatctacgacgccaacttgagatgctaaaacgatgccaggagaataaagaagacgaagaactctctgctcctgcctaatcaaacacaaccaaccactttctaatttgaatcgaccaacaaaattgttagggagaaaaagaatttatcccatctagtctggtccatagatatcttataaatcagcaaaaagctatgtattatccattacatcccttagatacattacaggtaactaagtactaaccatatcaccatcactttactatatagattataatatagtaatcaagcccatatgtttttattttttttacatacaaaagttttttttaccacacttcaccattccaaggaatggctcctgcttaagggcctcgacggtggccttggtttctcatcgaccggaatcagaacctccatgagcttcttgtatctctctttagtgctctcttcaatctccttcaaaagctgctcattctcctcctctaacttggcagccaaagtctctaactcaacctgataagcctgtttcctctctcgagacctagcagcggattcacggttcttgatcatcctcttctgtctctgagctgcagctttatccattgcctccatcatcactctccctctctttcctctcgttactcctccacccattgatccttcaaccatctggaacgaactgtgtcgctgcatcggaaaatcaaatgtatagctaccgtcgttgttgagtctctccgttggaatcttcacatcgatttcatctgaagctccctcgtccatttctgctttcgctaagaaatcctcaagtgtcattatatcttctggttcttcttccttcatcatgatcgtcttttgctctccagatacaatctctttccaaacatcgtcaacactctttccgttgttaacgctgttccgatctccgatactccgatcaacatcaatcgccatctcgaagggctttgaatcagacgcgaaagtgtaatcgttgactcctccgccgtaagcgaaactgattctggagtgatcggcgtgaggatttggtcggagatggtgcgatgatcttatagaaggggaagatgaagcagaagaagaattacggcgagacaagtcggaattggaagaagacatcaacttgaaggacgccatttccggagctcactggaattggaacgaatttttatctatctgggttttgtcaaagagaaagaacaatcggaaatggtggattttcttcgaaccagagatcgagagagatctttctagggttatctctagtgttttgcaatgtaaccacgcgcttactctctatatacaagtttaattaactaatcacgcgcacattaaacgcgtgacttgcaccttctatcaactatactataaggagatgttttttcttttctttttaattaagaaaaaagatttactattcagatttctttctctttttttttttatgaaaaagatatcagtgcaactaaagagatttacaattcagatttctttctgaaaatatattcgtgtgacagtaaagactaaaagagtttaacaattcagatttatgagtacattctgagttggacaatccaactggttatatggacactagatgatgtagagggagagagggcccaacttgatataatctttataatgaaaccaaaacaaaattgcaaaaatttcatgaatttggctgagactcttttggaaatgatgatgaaagcgtctggtaacaaccaacagtgacctccaatctctgatcatggatctctctccagggaaaacctcaaatcataagtctccttatttggttggtttctgtagtcaagatcggctttcgactcaataaatcacagaattttataagcatttgcatttcctatacacaagcagtgtgaacttaccactatggactaaaatggaggttcgagtggttcatcccagacatctgcactcccatttgagacttcatctacatcttcctccattgacaatctcgcatactctctctgagcaaatcgatcccactctgtcaaatttggatcttcccgttcctacagcaatgaaagagaattatacttgttctaattgcctcaatccgaactactacaaactgcctttagcagttaaaagaagtcatattctttgttatttttttccctcttgagtgctataaaaactccactggtaagccaaacttacctggcgaatgagaaatgggtcacgtgtttcaaatgccatgaacttattaaggttgaagagtatattgaaaacgtttgctgaaagtttcgatcctttcagatcctggagggtgatacagttctccttctgcaaggacatccaccatatagatgattccagtcaaataaatgataaataacaaaaaagctcggaaaaatcaaacaaccatgttctggtttgtaaagtaactaacctcgggtccaatcatgtcaattatttgacataggatatcactgaaaagaacagcttcctgggttatgcattccatgcgatgcagctgctcttcgaagaaaaactgcatttcgtttgaagtgattaccccatttccatccaagtctacgcatttgaacctgcacggaaaatttcaatcagtgtcaagtaaaatacacggacttgcaaaaatattgagttttgacatccataatagatagatgagcatactaggctataaactagtatcagattgttagattgttagtgcccgagtataaacaaggatcctatgttcatgaaaaaatggtaccatacaatgattactaaatatatctgaggaagaggacttgttacaagtaacaagtcctcaagtcactggttttgactccgttgtagtatatatatcaagatcttgtgatctaaaccaaggggcaacattcattaaggaaaaccaatatcaacacggagggggagatgtgtaccaatactcaagactaggctcggaagacttgtcttcctcagcgagaatgaagtacacaaaatcttcataactcatcttcccttcaactttactcgtaaacttccttggaatctaaaagagaaacatagccacaagacgcatggagatcaaataaaaaggatcacatcatactatataacttagcttttaagaaggtctaggcaggaacaattttgggaaccaacctgtgaaaatattctatcaacaatcctgtaggtaagggcattattaccatatttgatgagattgtccttatcaataaaacaatcatggtcaccatcaagttcccaaaatttgcagtatatcacgtagaagtgctcataggagaagtacctgaaaattaaaagaaacgacatgattgcaaatggtaaaatcaggcataagttctgttacagaagcaatatgaaggtataagccaatactcatatagctcttccattttgaactgtttaatgttacatatgtgataaaccctcgaactttaatatattttcgtaagcttgtttactccttatataacaacagaatatgtttgaatttcaaatacttattgttaggaaattatgaaaagaaaaaataaactcacctaataattttattaatgtcgtcctcttcatcaagttgttgcatagcagcaattaaatttccacgtctcagctctctaagagtaaggcagccagttccggatctgttaatgtagtaaaatattctgtagatgaccgtttcagctgggtaatcaacaaaggattaaaattagtacaagtatgaatctaacataagtacatatctagtagagatataaagatgtatgcacagaaagaacgtcttattgagtaggtttcatcatttttaacaccatgacaatcagtaagtcacaaatcaatggttcctaccatatctttcttgaaactcgcttatcgtcctcaaaaattctaatccaggatgtgttgccagaagctcatcaagaactggtttgaagtctgcctgtagccaaatccaagaaatgatcaaaatgtatggcacaatgggttaagaaaaggaagacaattgttggaaaataaatcagaacgcggttggagaaaagcgggagaagaatcacaaaaagacctgtctgagatagctgcagccctgctgccttagtatattatatatctgggaggctgtgtccatagttaacatattgccatcaatccaatacttgataaatgcatccctgaggacaattggtcaatcagcaaacattagtaccgcaccaattacccaacaaagctttataagaaaatagagcaagcacccaaagttctcatactacttttaaaaaacattttataaaagaataaatgagtcatatatggagctaccttgtaactatatcagtgcaattgggatcgatctttctgaaaagtgcaggagaaagaaaagaaggcagcttgcagacttgtttcgtaatggatttgaattctgcaagaggaacgagaatggtaaaatgaactgccttatatattccttagaaggacaaaaatagaacaaaaacatcaccatctacatgtagtccatcaatatagttactaaaaacttgatcaaccatggatagacattgctcctttagttcttttgctggtggacgcccgtgttggtagtagaactgcagaaattataaacatatgaacagttgtgagcgaaacttattatcatgtcacagtgaaggaccatttttcgttcaaatcaagtttacctacaaattagtagcctcggtttaaattgtaccctgcatctactaacgaaagctatctgtttcaacgaccaatccagtgaacatagatactagaccaaaatcacaggtccagaggcaggaaatgagaacaaacctgaggaatgagttggcgctttggctccttgagtgatctaagaggagagtggagagaaggagggctagtcctttgcctggagaaacgaggggaaccagaggagcttcgtggagatagtgggggagtgctgctgctcagaaacacagaaggcaaattcttggatttattagttggtgttccagatttagcatcatcaatcaaagacttgacctacagaaacatgaaaaatgggaaaccaaggtcatggaacacacttgtgtaaaagagaggccaaggaaggaagtgtagaaataagaaggtggctaccaatgtggcagtttcagggagtgagagccactgagagaagaggtcatcagcaataagagaggttggtttgaggggagaaggagacaaaccggggagctgcaagagctcaggatctaaaatatgaagatcgtcgtctactccgtcaatatccatgatctccgcaacgagaagccctacttgttcaaactccttgaatcgtaacaaaagcgccgggaaaatcgagaaattcaaaattcgacaacagcggctatgaaaagtcgacgctactgtgtgaaccaacttgaattattataattggagaaacaacaatccgattcgataaaccctagttatcgaatttgatataagtaaagtacaaaatcactgaggatttgtttccaaaaatagacagatgattggacacgtaagattcctacaccgagtaggaaggaagttggcagatgagcgaacaaagcaattccgatcaataatcggcaaagaaaaatggggaggttctgagattttgccggaaagttatcaaaggaaaggaggaggaggacctcgagagatatttattactcaccggccgtttctttttcttttttttttcacttctttctgtttgacccccctatctccttttgccaaggattaaaattaattttgtttttagattaatttaatcaaaacaaaaatataatattgtatcatatatttatttatttattctaaatagaaaatacttaggttagtagtagtcgtgtaaaaaaaacgatttaattacattatgtataacgttttagctataaattctcgtatttgtggaatttaataatcacagtaaaaaaactaataatcaaatataaataagaatatttacgtaatcgatgagaaaattaaaaccttcaaaaatttgctgcgatcacgtttgaagctaaatctctctctctctaactacctctgtggtacagagtctccgtgttctaaaagctttgagaccatcttcaatttcacagagaaaaacaaaacaagcaaggagaagaaacatgaacatcttcactaagaaacctaatcccagaggtttaattccaccggatttttcttttgtatcattatggattttgttttctcaattaggttttttttttctccgattgatcaacctaaatggaattttgatcatctgggtttcttccggttgacttcttctgtaattttgtggcgcgttcgtgatcatgtttcttttggaatctggcttggtttcgtctgaattcgagaatcttaatgtctattgaaatcggactgtcagaatctgaatgtttcgtttttttttttggcaattgcagaagtgcttcgggagagtaagagagagatgacacaagctaccagaggtattctttgttcatatgcttggattattgaatctagaaaaaggttaattcattgtttttgattgcttgattgataagctactatgttccatggctttaactagatattactcaagtatttatcgccatatacctaaattcctctcaaactgatgaaattttccaccttttcgtgttttggcttcaggaatcgaaaaggaaatcggatctctgcaatcagaagtatgagtgtggctcagttagtaacgttttcatccatctttttaaaagggacatatctaaaaaacgttttctttcatgtttgataggaaaaaaagctcgttctcgagatcaaaagaactgctaaatcaggcaatgaggtatttcaagcattccttatcagtaatagcatctagtttatgtacactacatcttttgtttttatgcagggagcgactaagattcttgctcggcaattgatccgtctaaggcagcaaatagctaacttacaaggtagccgagctcaaatgcgaggcattgctactcatacacaggtttcttaatttaaacaacttctatcctttcattctaaagtatttctgtttataaaccaagaagattgagtattggaagctttctctttggtgtttaggctatgcatgcacacacttcagttgctgctggaatgcaaggtgccactaaggcaatggcagctatgagcaaggtcagattccctatgtaacacaaatctgatttgtccatgtttaattatttgattggattcatcaagttaaattagtagaaataacttaaatccagtaggaattttgaggggctcttttgttaagatcttgttgtttctgtgggttttccagaatatggatccagcaaaacaggctaaggttatgagagaatttcaaaagcagtctgcacaaatggacatgactgtaagttctttcaaatccatcgtttctttaaatccatgaacactcaaatagtcattaatctgactaatgcatgtggaatccagactgagatgatgtcagattccatagatgatgctttagacaatgacgaagctgaagacgaaacagaggatttgacaaaccaggtacatttccgggctctatccatcaattcaatttctaaaaatagactgtttcaaagggttaacaaatgctttttgttttactgattaggttcttgatgaaatcggcattgatatcgcctcgcaggtttgtttataaccatcgattcttgtcattgtttccgtataatcacgtattctccgtgattcatattcgcttgtctctgtatttatccatctgcagttatcatctgctccaaaagggaaaattggtgggaagaaagcagaggatgttggcaggtatggtatccactaaacacaactagaacatatctgtatcgaaaccaaacctctatgtttctgtgcagttctggaatcgatgaactggagaagcggttggcggcgcttagatagaaagaagaagtaccatgagcttgaagatgtttcagacaaaaaatattatacattcaatgtgtcttctacagtttgctttctgggaagatttgtggatatatatataataaacaatatttaatgggcctaataaactaccaaagcccaattttaaatccggtgtacttgaaagaaatggttttttggttttcaaagttaataaaattctgaaaacccaacaattatgggttcgattgatatatcggcaagcaaacataaaggcccaacaaatgttttgaaaaccaaaaaaaatggtggttgtggaggttggggcacatgagagcgttttttcgaccaaagtacgtaaaagaatcaacttcttcacttgcccggtggtttcattttccttttataaaaagacaaatatgaactcagttcctcaaaacttaatcacaccatggtggctcatcttcaacctcctaagatcatcgagacctgtcacatctctcccccaaagggcaccgttccatcaaccactcttcctctcaccttcttcgatgccccctggctctctctcccactcgccgattctctcttcttcttctcttaccaaaactcaactgaatctttcctccaagactttgtacccaacctcaaacattccctctccatcactctccaacatttcttcccttacgccggtaaactgattatcccgcctcgtcccgaccctccatatttacactacaacgatggccaagactctcttgttttcaccgtagcagagtctactgaaaccgacttcgaccaactgaagtctgattcccctaaagatatcagtgtgttgcatggcgtcttgcccaagttacctcctcctcacgtctctccggaaggaattcagatgcgaccaataatggctatgcaagtcaccatcttccctggagctggaatctgtataggcaactcagctacacatgttgtagcagatggagtcaccttcagtcatttcatgaagtattggatgtcattgaccaaatccagcggtaaagatcccgccacggttcttctaccctctctgcctattcacagctgcagaaacatgatcaaggacccaggcgaggtaggcgcaggacatttggagcggttttggagccaaaactctgcaaaacacagttcacatgttacgcctgagaacatggtcagagccacttttacattgagccggaagcagatagataatctaaaaagttgggttacagagcagtctgagaatcaatctcctgtttctaccttcgtggtgactctagctttcatttgggtaagcttgatcaagacacttgtacaagacagtgaaacaaaggccaacgaggaagacaaggatgaagtatttcacttgatgatcaatgtggattgcaggaatcgcctcaagtacacacaaccaataccacaaacatactttggcaactgtatggctcctggtatcgtatcagtcaagaaacacgatttgctaggagaaaaatgcgttttggcggcttcagatgcaatcacagcgagaatcaaagatatgttatcaagcgatctgttgaagacagcaccaagatggggacaaggagtacgtaaatgggtcatgtcccattatccaacctcaattgcaggagctccgaaattgggactgtatgacatggattttggattaggaaagccctgcaaaatggagatcgtgcacatagaaacaggtggttctatcgcattctcagagtccagagacggcagcaatggagttgagattggaatagcactagagaagaagaaaatggatgtgtttgactcaattctacaacaggggatcaagaaattcgcaacgtagcagcccctttctcatccaataacttgtagcaacgaaatgactctatgaaaagcgttgttggaacggatagacttgttgtttaatatccatatccaacctcataaatacgggcaaaacatactctttagtccgaaatataaactcaaaacaagaaaacaaaaagataatgtgaaattgaaagagaataatgtagtgatcttgtttaactcaagtctcatggttaaggagacggaagctgatgagaacactgagaatttatgagttttttcagactacaagcactaagatacaagtgcaagtgtatagtttaaactcaaatagatttcaataaaaacgataaatgaatgagaaagtctcagtaaaatccattgaagtcaaagaaattgcagcttctgccaaggggttctccctgtaaaacaaggtctcagctccactgcacctcgtaagattggattagatcctcatcgacattcccaagaaataataactcagaagaaagacaaaatagcaatgaaaggctcggataagaatacagctttttcgatcaagaattatctgaagcagaactggcgtatcaagctgttacaattcatcatcccagccaatcaaaacacagaaacccatataaaaaaaaacaaaactttggctcatattaagaaattcaaccatgtatttaccgtatctgcttcattgaataatctcagaagcgcgggtaagtttataatcattgccacataaacaaacgttgataccaaatcgataccatcaacaaacacagctcaaagcaaaacatacacagaaaagagagatatagccgcttttttgacacagaaaagcctaaggaataaggcaaatctgcaacacaaacggcaaaaataatctagcaggagctttggggcttagttcctcaagtaccttagttatcagactagcccgggaggctcctgcgaaccataactagatatatatatatataaaaagtataaaacactacacgtctaaaaagaaccctaatctaaagatcgataattgtaagaaacaacggaaagaagaagatgattaaatagcacgcggctggtcaaaaccctagcctttaatctctatcccgaaaagtcgaaattgcccccgttagttttttgcggttaaataataaccgtccagtaaacaatttgttatattttttttcattacagatagatcgaagtagtaatttgtttaccaacaaaagtgtactttgagtctgcgtcatctgccaatgatgaagaaatttcggcttctataactgttttacatatacaaaataaactatataaagtatatatggaacattgtaatgtatctttacgcagattctcttacgattatctgtctgtttgttcttttggattgtacgtataataatgactttcttgtttgtcaggtttcattttctgagagtgagaagctctaagctcctccttaatggatcttctcgagtgtttctagcagcacgcgaaaaagacgacgtcctggattcgtttcctgcttggattctctggcttgttgatgcgcggttacttactgttccgactcctccagttgatgtcaccagacggctagaggatcgactatcgcttggtccacctgcggaacttggtcgagagcttgacggaattgctctcctcgaagagcttccatatcttgaggaactgcgtggtctttctgagtcaccaggctgtgagaattacagcaaaatacagtaagggattgcattctcccgtttacaaccaaaaattcgatctgacaaaagggtctggtaagggatcttaccggatgcttagacaaaggcccatcaacggagtttcttgatgccgagcgatcacgagtagtagaagttgccggatgccttcttgagaaagcctctactgcacccgagaaccggttctcgcgagtctcctttcctgcaaaagtttaaagaaaaaccagtcaacgtgggaatcggattgtgtttcaaaacaaaaggaacaaacagtttaccagcaatcctctcctgtttttcgagagaagctcctgcagttaagcccgggtttgcagttgtatgattctgaaacaaaaaagtgttttacacatttttaggcttgaatagagagaaacttaagaaccaaaagagaaagcagcataaactacccgtgtccgtgaactagaaccagagctggaaccaatctgaggatacttcagaactgtccagtcaaatacataatcaaactgataacctgccattgagaatgaaaataagaattatgaagtcggtgggacagagattatttgcttgagtaagaaatgtgcaataagaaccttctcgaataaacaagtcgcggaatagcctcttaaggtaagagtaatcaggtttgtcatcaaaccgtagagaccggcagtaacgaaagtacgaaacaaactcagacggttgatttttacacaagacctgttcttcacatcaaaggtaagtcatcaaaggtaaaactaatcataatactcaaaggtaaatgtcgaattttcaatacctctataggagttgctacttttttctcactaattctgtcatacttctgcttctttgtcccagcttttaatccctgccagggtaagctgaaagaaataatgtaaagagaaaaagatttcaacttctgttataaacagataccaaattgagaatgaagatcacagaagaaagtttaaagatcggtatggaagttgtagactcttacctccctttgaggaaatacatcagcacataaccaagtgcttccaaatcatctcttcgactttgttctttagagacaccagcaagagaaattacttatcagatccgaatacataacggttggaatattaataaattcatataggaaaacacactcaccgactccaaggtgagtgttcacacttgcataccgagctgttccagtgaggtttttgttttctctgccccaaaatgtgatattttactcttaaactatatcaatttcaataagcacaatttctgggaaaaggaaaaaacctttacctgtacggtatgtgcctgtgagtctgaaggtctctgtatttcttccccaatccaaaatcaatgatataaacctgacgggtcgggaaaaccaagtaactcaaaagtttaaccataaatacattcttatatcagcacatagttatactctccaagatgtaaaagcagtcacatttttctcaaagaagttcatatcaaagagcagtcacacaattaatcagagatggcacctgatttgctttgcgaccaaggcccattaagaagttgtcaggtttaatatcacggtgaagaaaacctctagtatgcataaactcgactctgttaatctgaaaccatggaaacataacatcaaacaaagttctcggttatgaagaaagacattttattaaaaccaaaagaaactgcaagatatatgtaatatactcaccagctggtccgcaagcatgagaacggtttttaaagagagttttctattacagtagttaaacaagtcttcaagactaggacctagaaggtcaataaccattacattgtaatccccttcaactccataccacttgaggttaggaacaccagcttcaacaaaaaataacaattttaggatgaataaaagtctgcctttggcttctttcctgtaaccaattggaactaaaatacattttgagatttaaaaaaatgagacttacttcctccttgaagcagcatatacaacttcgactcatagtggagttggggatgcttagttttcacagattcctgagaattgaaatgagagaaattgcaaatgaagaatgaaaaaaaaacaaagaagcaaaagtgaatggccacaagaaagttacaatagcttaccagcttgacagcaacttcttctccggtttgaacatttatacctgtaaaaaggattcaaacaacaggagacacttaaaacttagacttgagaaaatccagtaatgagataataacaaaggattgtccttttgttgttacctagataaagctctccaaaggaaccactaccaattttcctcccaagcttaaattttccaccaatcacaagatccatattttctccaacaatctctaaagcaacaaaaaccgagatttttcaaacgcaaatatacaacaaacccttcgtctcctagctacggccctggattcatcttccaatccaacatttaacacaccaacaacagccttccagaatccagattcttcaagtgacaacaactctcagattctcgatttcgacacccaaaaaaaagggaatagctttcaaagatccatcataacacgaactaaacaaggcaaattatggaaatccaggggaggcgttaatatcaacgacaaaccctcatggggaaatcggaaatcgaatcggccatgaaaacgatgaatcacgaaccgtctgctacaattgacagttcatattttcttctagggcccgccccgattgtcaattttagccaatgaaacccctttacttggataagaaatcgaactaactcttacagaccgacacacacaaataaaaacgtaaacttttgagctggattagacccaaaaatgtcgaattttgttgaacattaataagaagaagaagaagattcggtagttattacagacaagttaggaataacaaaggaaaactggaaaagagatgatttttttttgtgacattctgtttttttttttttttttcctcactccaattatgaccatgcgaaacacgccatttttaacagaagatgaatttggcagagtatttcatttggtacctttttttgttgttggtgcaaataaattttatatagtggaaaatagaggttaattatgacctgacatagtgacatgtgaatgttcttattagtagtatatgaatttctgtagctagtagtcatttgtatacatcaaatttgggaacaacaactgcccatacgtgttgtcgttgcatatggatttcatattctttttcccaatcaggaaaatacgagtctcatccgaatctaccagacgtggacgatactatatcataaatcatttgttccttagattattactataaaactaatgaatgaatatggataattaatttggcttctcaaagtgggattaaaaaaagacttgcaatctatttttctttgtattaaagaaagaagagtgtagttagttatcttcagtttacttacgtttttagtacatttaagctcattattttccggtttaatttggtttacatatacataggcataacagatatatatctactcagaatctagacgtctcaggttgggttccattccacgaggcgtcggattagaatagctccggttaatggtctgttgctccgaaccagaagatgacgagtctgattcgctctctgttacaaacgtaaacacgattatgattatgaatgaagacaattatacgagagaataagtaacgtttttttttagttctgagacattttcacgtaccgaatagtgacttaaccgatggtctctttgattttgactctttcttttttagttcggctgtagtaaatataaaccggaatgttagaggttctgatcctggtatccgattatgttcaaggactaagatacgtacctataccggggacttgataatcgttgacgatttcaaagtttttgtatgtgtagccgacaaaatttatgtcttttgaagataacatctaccaaaccaaacaaaagggaaagagtgtgttttaagaatttacagaaagggaacgagtgttttaagagtgtgagatcatcaatttacaaaacatttgttgtgttttaagaatttttattttatttttagtaaaaggtaattaactcaacttacttttctccatggccctgttctagaaggtgcttgagtttgattatcttcctaaacatgcattaagaaaaccaaggaatttgatacagtaattagcaattattagcttaacacaattaatgtgaaaaaaaagaagaagaagataaaatacaaacctcatcgaacttctcaaagttttgagtatccaaatcgtcgttgacctcaggaatgaacgcagcttccatttggtaaatcttttcccattgtacaccttcgaaccaaggatgtgcctgcatgtgacattttgtggtttggatcaactcgacttatgacatttgtgggcttaaatcttttcaacttttaactatatattgtaacttttactatagaagaaaaaaggagaaagataccttaatttgggaggcaccagtagagcctagtcgttggttaacgctacacaagagcttaccaataagatctcttgcccctcgtgatagccttgattcttcagggaacttcaaatgtgttttccaattcactatctgtttttttgcattcataaattctagcttataaatacataaagttcattagaaaaaaaacaaaagtcaaatgattaattttttacaaaattaagtattgaaacctttctacaagtagacattgggtcgtcggcgtaaaagggtggatacccaaccagcatttcgtacattatagctcctagtgaccacctggaggattttttaaaaacattctaaggacttacttttttgttctttgttaacaagttgaaaatagacaagtgtgtacacgtaccagtcacattccatgccgtatcctttctttaacaagacttcaggtgcaatgtagtctggtgtaccaacggttgagtaagcctgttaagtgatacaccaacaccaactacaagttagacacataatcaaagaaatatttcaaattagagatcttttgatagataagaagtacatacaagcattcttcgattcttctgccaatgttccaactgttcttgctgcgagcgtttaggagtggttgatacgctctctgaacctcctccgctacccgcatttcctaccgtgaaatcttctccgtcaataacactacaatccaatggcttacatagtccaaaatcagataaccttaaatgtccatatctatcaagcaacaagttatccggctttatgtctctgcaccaaacaacatcaaaagatctcaaattaaattaaacacatttttctttgtgatctataacgacttaattataagatccaacctgtggatatagttgcggttatggatagattctatagcgagaacagattcggcgatatagaacttagcttcatcttcacttaaagtgtctttcctcatcagaagagtcatcatatcgccaccgggcaaatactccattatcagataaagatactcattgtcttgaaaagaacagtaaagcttcactatacagttactatctacttctgccaatagattcctctctgctcttacatgctccacctacaaagaaattttcaaaaaaaaaaaaaaaaaattcgtaaaaccgaaaatgcaatgtgggtcacattatgtaacctggcctctgcgaagcatttctgatttcttgagtttcttcatagcaaaaacatgacctgtgttgatctctctaacaactcgaacctctccaaaagcacctttaccgatcatagttaagagttcgaagtcatcagcacccattttatgcctttggagtctcatgtactctgtttctttcttctcaagaaacttcataagattggtttggtcttcttcacatacatctgcatccgctagcttcttctctaacgttgttcgtctgccaaatttaaataactaaataaataaacccatcaagaatatatctaaaatatttgtacctctctttcctctcgttgaggttcttcatctgttccttataatgattctcaatgtactgtttggctgcagcaactttctgttttgttgaatttgagagtgcttctccgtcaccgcctagtggtggaagtttcgttgccgtttctgtatcatttcctccgtcggggacggtggtttctgtcacgccaccgccgtaagtgcttccggagaacatatcctttttccgaggcttatctcgtggttgaaacttgtgaaaccaacttcttgcagaatccattttttttaattattctaaaatatgaactcttcttaatctaaaaaaggaaataaaaacgaaactaaaacgaattacaaaaataatggataatctaaaagagatataatcgaaccctagattccagaaatttggtagcaaagaagattgtttggagaaaaagattgaacgaacctgagttcatcaaatctgaaaatctgatagaagcggaaagatcggagattaagatacggttgcctaattaattttatcggaaaaggaaaaaaaagaaatcttttattgaggaaaaacagaaaatgtcgggttaccgtagaagtttgaaagcgattttatcatatatatatatagagcgtggaattgttaatatttttattttcagaatatattaatgaaatataacgcacactcagttttatagggaattgtttacaaatttaacaatacttgtgatgttgacgacgaacaattaatttagtggttatctccactctctacgcactagtttttcattttcaaaaagcttcattaaacttaaatggtggatatatacggaaaatttggttatgttagtttgttagtaacgaaaattagacataaatataatattcagaatcgagattattaaaagaaatgcaaattttaagtaatacgaatacaaaagaagggttttttttttgtcttggagtggaggagagtttggagaaaaagagacatcaaaaggaagatgaaaaagaaaggaaaagtcagaataaataatatcttctactccactacttaagttaccaacagaatctttttataagcattttgatgttgagatctcaacctaataagcaacttcaacaccttaactctctctctcttcgtctctctcgtccccaaccaaaacacacattcatgtctctacaccaacttttccatataacactcattcaccaaaaagttcttgcagaaacaccaactccagatttgttcaaattatttacgtcacattttgttagttatcatcattacattttcgattgttagtttgtcatgtgggaaaatcattttctattcggttctgtttgatgatcagcttcaacaaaatatccaaatacagctcttacctcagaaattaacttgagagaaatccaaatttagactatgtatatcgcccttctcttacaaacaaggcttttaaaaacatcagccaaagtcttacaagtgccactttcgtcttctccagccaaactccgataaggttatcgcctgtacctatgtcgtttaaagttgaagtacaaatgcagaatcccacgctcaaacgtgcatttgaaacctttcttgtgagaatactcccattctttattcacaatccggaacgcctgaaaagcaaacaaaaataaatttgagcacaatgataacacgagaggtgatgatgaaacccacataatggttacgagtacttacaatgtcttcataaggtggaccagcatggaaccggatcatacacgtttcagcacttgtcccatctttttcgatagtgtaaatgggagccttaattttgtctactaaatccgggtagaagatgttaaacttgtatccttgaacgatttttggaggcggattatcgtggtcatagtgagtttggttatacttattccattcgtaacctgtgtgaacccgattgaaatacttcggttttcttggccggtacttgtcatgccaccagtatacctagaagatgaaaattatggtatttttgttctacaaaactgaaaagttgcagagaagagaaaaatagtgataagggtacctcggaatcgaggttcacttcagcattagagccaaatatggcatcaccttcttccattgctcccattgctttcattgctttaagctccaagttatcttctacaggtgctggttttgagtccatagcttctttaagccgtttcttctgtttctccagcacaatcatccgtttcatttgctgttatagccgcagtcatattttgggtcagtagaagcaccaacaacaataattcatgtgtaaaattcaattgtaggaactgttaaatataccagtagcttcttgtcttcctcgggatcgattgcttcttcacgatcatcaccgtgcatgagctctggcgaaaacgaaccagccgcttctgctgcctcatcagcttcttcttcctccgcaacaggctctggagaaaatgcttcttcagcatctgaaagattcgtatcatttatctcctcctcattttcttccaccacacgtgttaagccaggattaacttctacatcatcttcaccctctgaaagttgctcgaggcgatgtagatgacgtctcagcatctcagcgtgtatttccttcaagcaagcctgttgaacatcaatatagtcagtgaagatgcgaaaaacaaatcctcagttttcaaaatctaacacaccatgatcatccacgagcaaatacctttgccttgtatatttcgaggcgtttaagaactgcttcccaatactctactactttcgcagacccagaacgcagctgcgattcgatgtccaactgcagttctacaagctccgcgtgggtcttcccatcgagaagttttctcacatcagcttcaacaccagcgtgtagtcccctctcttgagcaagcaattctgcaggaggctcctcccctctaactctagctcgatcaagggcatccctcttacgagcttcagctaactcccaatcgcataccacaataagcgcctggaaaatttcaatggtattaagcccaaatatttactcgtaagcagcaggtaatataacatgaaaaagaggcaagaatactaatcaaccatcaaaaaggtacaacaagatggtccatagaatatgtattttttggatcgaaattccatacatgcataataactttaaatgcgtgaatctcctcaaatgcaaaatgagactcagttgtagaacatacctcccaatattgtacacgtgttggagttgcccgatccaaatccagatacatcttgatatcatcgcgaagctcttccatatctttaacagtaagtccctgcatcatacagatcagggggtcaattttaataataagaatcataacaatctgataaaaccaaaccagtaaaatcttctttgtcaaccaaaaaagagaacaactacacaatcagagactttatttaacaagatgtccactctcgatctcaaaagcaagcatgcagaatcattcttatattctgcttctacatagacgttggttatgctgagctggaaattcagccaaattcctatacgtactttttttttctacataggttcacagagttataagagatactcagaaaagctaaccagaatagatgctatcccagcatctaaattgctcatacttagacttgcagaataacttattttatctcaagcttgttccctgtctactacggtcacaatcgaactgattgcatagactgaaactgttatggaactggactgggcccaagaaagtataaacctcagtgagaaagctccacaacttaacacgcctatggctttacaatataatataatctttttaaataccttgaaaaccatgtacggttcactgagctcgatatccaaatcatctgaaccatccaagtgcttgcagaggacgtcgattggcttcagtcgaccttcacgtaatctaatctctgacctcaccttgctttgatcgaaatggaactgtagatcaagcagatatatcaagcaacatacaccaaacaactgtaaagaagaattaattgcaaaagcaaagaaaacgcagttatacctcttcctctttcttctcccaatcatggaactcagcccgagcacgttctctagctaacaatgcctgcagaggatagaacgatttaagtcaatagctatacagtattaaccaaattagagaggtaactggctaataagaatttcaattgtatacatccttctggataccagaatttaccatttcttcttcatgtcgagctttctccactgctctctcttctctcctcttcttaaccttttcaacctctgtctgcgcgttaaaccaaagtgcttaagagttaatacataagcagaaagctcattccaccagaaaaaatagcaaatagttacaagcatcaaggaaatgaaaatttcatcgatatttttaatcagtaatgcttattgtacataccatcctttcccggtgtcttctcttctcagctttaacggaaaattcttccagcggtactcctcgatgaacatctttttcaatcttcttccgccacacaaatctgatattaataaaattgcatgccatgagaattgcagactcttaaaaccaagttactcacaagtacatctgtacaaatcgataacacattcaatttaagccaacttttttaactaccagatttcaaaatttgtacaagtagaaaaccaggagagctccataatcctcctacatcctatcatcaaagttatacaccactaaaactcagaaacaataatcatattttcttagtacttacgtctcagtgagatttgaatcaccaaatgggtttgaatcattggagtaccctgacactgactgcgtcttcagtttctttgctgcacgtaatgcctacaaagaatttaacaagtagcataaagttagcaaccagctccaacaaatacaagggttaaaacacacaaaaaaaggacaaaaaacaaaataacatacaacaataagtttaccttcttctgagcttttttagacatatactccgtaactttttcctccgagtaatccttagatgaagatctcttcttactcttccgtccaccatcactgtcactggaatcatcacttgagctacggcgtcgagtccgacgactgctgctacctttcttcctcctggaactcctgggcggcgacaaatcatctgagccatcagagtcagaagtgtaagactcggactcagacccagactcggattcatctctccgcttcttctgccttccacttctatctctcttacccttaccatgagaacccatatctctctgtcgaagataaattgaatcattcttaaagtgcaataaacaagtattcaaagagagtccctaaaagaccaacatctaaaccctaagaacacacgaagtggttaaatgagcgaaaagagaagctccaaattcaagtttcaccagcagtaagagaatctaagcagaaattgaaaccaataaacagcggaaggagaagagaattgcaaacctagttggagaggaagatctggagtcagtgacgatgagtgttggtgattgcggcgtctgcgcgacggtggtgaaggcggtaggattttctcctccccgataatggatcgagcaaaggagggttaagatttattaagtttcagggagattttcgtcattcggacgtcggttcttctttccttctattttaatacgacgtcgttctgtcaataaaatcatgtggaaattcccggttcaagaaaaaccgaccgtctatggaaaataacgactggttaagagcaaaatcggccggttcatattgtccacttatatgatcaaaaacgttaaaaacacatttcagagattttggttgaaatttacacaatttacacaatgtttagagatcaagtatatagaattaagggtttgaagcaatcggtaaaataaattcacttcccattttgtgaaaatcactgtggtatatatatcagcacaattgtaagtacaatttgttgtctattcttcaatgagccaagtggtaaatagcagctacacacacgaaatctgaactactctcgggtgtctttattcttaccgattatcaaattcatatataggatcaatgatctcactggtaatcaccaatcatcggtaataagccatgtgtctcgatgatctaaaaggagagttatcgaatggagatggtttccatggcgccacaggcttcttcttcttcttcacgagtttgatttcagaacggagccaagattctaccacggagaggaggttgggtgaagttttcagctcctcaatatctgtcattttcgataaacgattcagctcaccgtcctgaatgtaggccaaatgtgtcgcccatgtctctagcccgtcgaatatgtgagttgcatacacgattgtagctcctctctgagttaatcaatggtataaacaagtcaaagatcatgcaataagtcatcagtaagaataagtgtgtgagttgtaatcttccaatacgaatacgtgctcagaactcaagaagtgaaactataaaaaccggtacaaatttgcacttgaaactgcatgatacatgcatgctactactaaattatccttttatggtactaccacagatcatagacatgcaaggaccctatagtaattataggcaacatcacttagcagcaacaagaaccgatatgaaaagcttgtccttgaatggttaagcattaatattccagttactaaccgacagaaacatgtacacaaacggcttgtatatacttaggagatcatagatgatattaaagaggctggtagaatattacctgatcacattcttctttgaagaattccagcaaatccatccttgcaacgacgtctaggtcaacagtgacctcatcgagtaataacacctgtgatcagagcatgagagatttataagaagtttgtaaaatcagattaaaattagcgtcagcaatgatgataacacaatcagaaacgaggttcttttttgcttaaagccagaggagaacataactgacaatgaatcatgtgagattttagaggatgcagaataatcagcctctctgaaacagtattgttttcaccttgaatggatgtaagagtcccatacatatctgcacgcgccgtttctgcccatcagaaaccttatgcatacgccattgaagattgatatcaagaagatcaatcagtttttctcttctcacgggatcagttccttcaactagaaggacaacgaaagaaaatctccttcagtttataagcctgaaaaaaggggactaaagataaaacaaatcaacttactgaaaattacctccaaatatcatatgttctgctgagaaatctccctggagaggaacctctccctaaaatgtagcagaatcaagaaagtaaataacatcagattgataatgcagtcgagcggtagtcgattagttactctctaggcaatcaaattcctaaaagatctcacaaaagcatgagaaatggaaagaagataagggactactcacagctgaaccaacggttttactccatgatcctccaaggtaagacaagtcaccactgcaaacaagttgagtatcatggaaagccgagcggctaagaacttgtacaacgttctttcctcccaccatatgctttccagccagaatcttcaataaggttgtcttgccttaacaaatttaccaaaggaacacaagcattagtcttccagaaaaaacaaaacaaattcaatagcctggagtagttttgaacatggtaaatacctcaagctaatcgcagtattaagatcacatggcaaaccggattctactacaacgacgtcaaaaaaacccaaccccagaacgacagaaacggatgattccaatttcagactggcaaataaattctgaaattgcagaggcatagggccaattttcaaagttccaaactttaaatcaaatcaaacaaaagatgtctttaactttccattctcgccgaaaacataacaagtcgaatcgctgatccaaaacctgtgaccccaagacagaaaaaaaatgaaaactaactacaaggaaaatctctctctagaaatcgatcatcgtaccagatccattggcaccaaccagaagacagcgagaaccagctggaagatcgaggttgaagtcgaagaatattggatcctcaacttcgtatgcgaattgcataccgctaactctaatggcgtcatcgccactcgccgtcgcatctttctccgccatttttgccagtctccaaaagctctcaagcggtcagatacaaggagtaggtaacgattagttggtggaccgacattgtttactttggtcaaatatgcagtcctttaaatatgtttcgttcaacgctaaatccacgtcataccagtaccttttcgccacgtcagtgatataacgattgtatctctttgcacgtcgccacgtcagtgtgctggtcatcacgcatcgtcaaccaaacgacagcgtataagggagtacaaaatgtttttttttttttttttgtaatattttcttgtacatttatttgcttagtcatgcaatagcaaacagatttagcattttagttttacgtagaagcaaaagttgaaattatgaaaaagcctttttgtatatattaatatctcagtgatacaaatgataatcgataatgtaacaacgatgattataaggaagaaaaataattaaaacagggagtgtgggaggattacaaagaaacacacatcaacttaccattaacatacatcaaaaagactgttggctgaccaccattgttgtctattgtctcgtgctctcaagtcacaagaagatgaagccggacttgtccaataacttaaattttacactccattcatcagaaagctgcccaacctgatgcagctcctgttgacttgctcgatcctgatcccgccgttgaaggaagatttttctgccgagtattaccaaatcaaggataatttagagtaaccttagagaataagaataaatgtaattaagaagacaaggtttatttaccttgagctgagatagatcagatagaggctcgttcctgcgtgattccttgcagccatcagatgcaatccttgaagcgacgggatcgtttggaggaggaggtaaaggagacctggttactccggcagctttggggggtggggcaagtgctagaggttttggcttccccgttcctgaaagagcagctgagagcatcccagtgccatttgttgttggtttcggcttcacgttgattcttatggtttcaccttccttaaaacccatcaaaacaacaatcttttcaggttctaccaagtccaaatgccaagaattttccttttccggataaatgatggagttcaatcagaattgaaatattgattctacagttacggttcccagagaaagatattgagtaaacaaaatcaaatgagtatgttctgcaactacgagtggatgctaaaacaaaacttgtgattatgaaccatctgtgaagactaaaagagcaaaatcaagacatatagcagcatcaatttaagattagagatgatgaacacaacacaagatcgagaaaaattaaggctggtactatttactcatcctaatatctacacagagcatacaaactacaaagatcttccaccaaataacactacaaataaaggaaattagaaaatccaaataacgaatagctaatcaatctcagcagataatgcatccaaaatattctcatcactgatacaaacaccaagaccaagcaacttttagctatagcctactagcaagataagaactttgcaatgagaatgatactacaaaacgtatctgaatcaatcaattccacattggattcgatagttgtttttccaaaatagatctgaaagcttcaatcagatttctccaaattatcagattccgcattgatcctatcttaattccaaaagctagcttatgaacagatcagtttaccttcaatctgtgattaacggcaggatggatatcaatatgattatcgctctcactcgtttcccctgtctccttctctttctccctcctaacgtacttttcatgatccgataacgcaacattgaaatcaaacgcttcgttcctctcagcgaatcctagcccgataaacgcatacttccctctcccgtcatcgatcctgagaacgaaatacctagacgaatcgagagacggctctacagagttctctctacgtccaggatccacaaaacaagctgcgaaaagatcaccggaattcgaatcctcgaggcggatctcgcatcgatccttgcacgatacgacgcggagtctaccagaccagatcttatcggattgaagccattcgccgcacttgtatccgccggatgtggttcgcggcgggatcttgtaaacggagacctcacgcaccacgagaagtgtatgctcgaatgtttcctcctcttcttcttcctcgaacgacatcgaatctcagagcctctctcagacgagtttcggagaaagacgtgtgtgatcgttgcggacttttgaaagctttacgagaccgtaaccttcttcttcttttttttattagtgttatcattatcctttcaatgattttaatttaatatatacactaatcaacgtaatcaaatttaacaaaataaaatcaacgtaatcataaaagctaagatgtgtatgttagtaggaatttttaatctgaaattttgttattgaagctttgtgaaaagttggttattagtctcatctttatttatttcagtgactggaaaatctaaaaaaacattaaaggaagcaattaaagagcttaagaagaagagcttggtgtcatagacaacatggtctcttgctgactaaacttgatcctcttggcttcttcctcgttcactccatatgacgctttgatcacatccactggaactgctctcaagtacgatgtttggccgctcagtgtgttaatgtaagcgttatcgtttgtcttgaatgatatccactcgaaacccgtttcaccagccgtttttgaaactgcaaagccttgtggaatcacaatgatttggccttgtcccacttgctcattgaacaccgactgaccattgtcgtccaccacttgtatcttggcttgacctcctgtgacgtatagcaccgtgtgcgcgtttgccgtccattgtggcaacaccattcctccctatctccacgagaattcattatatagcacataaagaatttgtaaatctaatttaaaagtgggatacttacgctgtagagataacctctaagggcgttaagtctgactagacgtagaacagggagattaaggctgttaagagtgctgattcttccggctcgtgtgctaaaatggtcagaccgttctggatcatcgatattctcatgaatcttagccgtgcaataagtctcttcgatgccattagcaatgccatcttgctgccattcacgaggcggtgggatgacgaaatggagaggaccatttgctcggattatgtttcctctgttgtccttctggttttgtagttgcttagctgtctcgatgttgattttgaatgcttccgcgattatgtttgggtcgaaaccgctgaaagcgttgttgcctgatggccacgttaatggttgttcttcttcttgcgttctgctcccggctagttggaacatctacatatgaagggttcacaaaaaaatgacattatgtgttatatatatgaatcactattttaatcactgagtggtagtcatatagtttgcatgcagtacaaatttggactttcttgaatttgatgattaccctagggacttggtcaagctggttttctctgttggtgacatcaagaacaatgacaatgacggcatcggaatcaccgcggttgtaccaccactgtgaaactccggcaagcgaagcaaacacatcccctcgccggaaattctccaacttctggtgcatgtcctcaaaacgtcgacccgggtctcctcctcctcctcttcctgatgatccttcaacttctgcaaaagtctcaggacaaccagaagcaatcgtccccataactccttctcctgaaaacaattaaaataaaagaccactttttttagattttctataggttgcgagtttttaattaggtcttgatcaaaaagcgtatttatttattttcttaccttggacaacgtaagcaagggcaggtgggctaaagaaagcgggcaagaaaatggaattgggctgaagggtgatgcgagccaccgttacaccggcgcatcggagctcagggctcatgtggtcccatacttccatctgaccggcttcgaacttcgtcgcctgagcgggcgcgaggctgttgatttggctgaaatggcaggcgtttggaaacggcgcctctcgctggcgtgcctcggcgccatggaagaagaggagaaatgagagtgagacgacggagagaagagaaaacaaaagcttatgcatatttgggtgtgttttgttttgtataagaagtttagagagcgtcgtagactcgtagggaaaatggtatttaaaggagatagttagtgttttattctggttgcatacaaatgaaaatatgtattttgtttaaccggaaaaaaatcaagagttgtgactcgtataattttttggagtttgcatgagactgatttagttaccataatctgaatattaagttgtatgcttttaatcagttacttttttggtgtgttaatttaactttcctatttacatcaatccatctagatgatttactaataacatatggtggaaaatgctaagatatcttacgagatcatatgatataaataattatacatgttcataaattaatcagtaaattagaggataaacaacggatactccaagattgacacattgtgatagaaatggccacaggagtcacattgcatggcaatggcacagtctatattgtaacacataatcttgccatgtatgccaagtgtacacatgtacattcagtgtatatgaaagaaaataacaatcaaatgtgtgccttgtaagaaaaacctatagcatctattaatgaacttatatagcctaatttattcaataatggtaaattatttgattataattgggtttctaccaaagctagatagtggttcatataatcatatccctattattaatgcgtccggatttcagtatatataacgcgatatttgttactgccaaaataatgcacgtatgcacaaataagtgaaataagtaataaagttcttaataaaaagattaattggtggttccgctaaagaattaagaagatcattatgatttttagtgtgtaagtgcgagaatgtattaaaaaaacaaaaacaaaaacaaaaaatcctcgagatgcaaatggcgtaagcccagttatatccaagttaaaatattcttataacgatattccaaagaaaatgagctttatattaattaatattataactcattttctttggaatcactatatttagcccaaagtctcgcatgttagtgaactgatttttttttcttttttatttatatagtaacgtttatataatcctaaaagatgtagaaattaaagacttaaagattttttattcaggaaagagttacatgtgcagagtcaacgatcgcttatacacgacgttcgttgttgtacactagacgtcctaatacaaagctcaaaacaaaacagttcccttaagcgtagaacttctttgtacattattatttcatattacaagtcgtaccaaaccgaactttagattcaaacgctattccaccacgcgctcatcaagcctcaagccctaggccttccgtagctcattggactgctatgggtcagtgtggtctcaatcgtgctaaactttactcgtttagcttcttcgggagagatctggtacccattggttataacctcaagcggcaaacctctcatgactgaggtacggcccgcgagtgtgttgacctgtgcgttttcgtttgtcttgaattcgatccactcgaactgttcgcctatggcatgtttcatgaccgaaaagccttgtggcacgactagtaactgtccgctggagatctcttggtcgaacactctttctccgttgtcgttcaccatttgtatatgagcctttccgtttgtcacgtagagtgccgcgtttgcgtttacgttccattgcggtagcaccatagcgttctgcgtgcaagatatattttttaaattgaaaacgattaaaaatgcaagatatatatatatatatatattttttaattaaaaacgattaaaattgcaagatatatatttaaaccaattgaaaacgatttagattatttagagtttaaaactccaaatcgcaaaatctattagtttatcttgccaaatcaaattattgcatatgtcacataaaattaattttctaaagatttgttgagcttactttacggatggagccacgaagagcgctaaggcggagaagtctgaggataggaagattgtagctgttaagtgtgctaatgtatccgagtgatggcttgtacacgtcagcatccgacgggtcatcgaggttttcagtgcatcgcatggtgcacaaagtctcctctaaaccattagctatttcatgtggttgttggccgccttcgccgcgtctcaagggtggcctaatgacgccgaaaggtccgttgaccttgacgatgttgccacggttatcttgctggttctggagctgctgagccgtctcgacattgatcttgaaggcttgagccaagatctcaggtgcgaagccattgaagatgttgttttgcttctgttgctttcggccttgtagccattcctgcccttgtgggttgtttccggctatcaaaaatggctgtaaacatgaaaatatatttctgaaacttttagtggcgaaatttgaagtgtagaaatgtgaaactaacgcaaaactaattcaccaaactaaagttttatgtaaatcgtttgagcttatataattggttaaaaaattagttgtaaatcattttctttaaagttataattaactgagaaattgccttgaaataacgattaactgaaaactaaacaaataaatttcaagaatttctaactcggcaaaagatctatttcgatataattaatcaaacaaacaaaataagaattttatttttgtgtttggacttactctaaggttgcggtcaagctggttctggttgctggcgagatccgcggctgcaacaagaatgagaggctcatttccattgttgtagaaccattgagctacaccagatggtgttgcaatggtgtcaccgcaccgtaggtgctctactttctggtgcatgtcacggaacccttgactctgaccctgaccttgaccttctccaaataccggtgactccatgaacgtctcggcgcatcccggaataactcttcccattagaccccttcctatttatcatagccaaaaaataatatcaaacatttttacaaataatgaagcttttggaacttctactattttttatgatctatgagaatgccaaatatttttttcatttgcagtacttatactggacaaggaaatgtaagatttatattagttactatttttcttgtcgatctatatattattataatgtagtatatatataaacgcaccgtgaacaacaaacgtgagtttgccggcgttcaagaaagtgggcaagaaaagaccctgaggctcaatgacgaaacgctcaaaggcaaagccggagcaacggagctggggtgcatggtggtcccagacctcgatgcgaccaccctcgctcttgatgatttgggatggttcgagcgcattgagttgatcgagctggcactcgttgggccactgttgggcagtgtagccattgaagaggatcaagagtgtcaaagagaaagagataatagatgagactcgacccatttttcttcctctttattgatttactttcttactttgtgggttatggagtttatgtatttataggagacttgttgtaaagagttcttttaaaaataaaaataacaccataacaccaataaaaatagacaaatccaataatcgaaaacaaatagacgcataatccaataatccaataatcagtaacatacttacattcgataattaggtctgatattattttagttttggtcaagattttattatttattttttaaaataaattattcaacattttgtaacaaaatgatagtgtagaccaatttgtttcatattcgctacagtttagtcttggttatgatttattcaataaacaatgaaatcgaattataattgtcgacccatggtttagataattaactaatttgacaccaattggtttaagggaaatagctctcttgatcggggtgacactccacatgtattacgtttttctacttttggcattaaacattttttggaagacatcatattatcagtgaccctctaagtaatgtgtattctcgttttgtttgctgttctactagtaatttaaaatagtaatgacgaacggaaaatgagaagtacttgaacttgtaaatggagggagtagacgagtagtagacacatttcagcttgcatgcctccttaaagtgcatgttcttacacatcagcatctaatatgggcatcgaaaaacagacaacggggaacaaaaacgacaaaagagtttaaaagttattattgtatctaaataaaaatttaatcgattttttttgggagaacccggttttaatgttatagtatagtaatcgattgtttttgtgtaagaaaaaattaaggcttgtaataatgtaagcataaataaaagtaaagcttgtaaaaaatgtaagaatcagatttagacgtttaaaaactaaggttaaagtttgagttattactgtattagaaaagaacactgatgagagtctagagagtaaacacgtgagaaccacgtgatgatgtggcggacgcgacgaaccgacgtgacgagtgtatggctgcatgctgctcggatgcttccacttggatccttgtttctaaatttggtctgtcttcctctgttttgtaaacaaatattagcaaggacaaaaaatacataatatttattttcccaattcattattttagagttttgtgttattatgggtttttttatgcgtctttcattaaacttaattttgagataaggccttttaattctcaagatttcctttcagacccaactaaacaaaaaaaaaaacctcaagattctcaatatgtgtgggcccgatttagaattaagcccattataagccatctacaaaagcagtgtctaagcccgatatagcccatgcaactcaggttggaatttcattacttttgttctccaactgcgtgccgttttcacatcaacgaaagggagagacgtcatgcatgcattctagaacaaatgtatacacattttctatgttgaattcatgtacgggatttcatggtgttggtaatgaaccaattaattagtttattgtcttaaatatgcaattgttagtgataaggcaatataaacttaagggtcttccactctcccacatgccaacttgtgtgttcccagctgtcacttagtcagcctgtccactcattttgttcttttttacaaaaacacacacatcatatattcttctaacatacattacatgctacatgtctacgcatctatatgtatgaatgcatcaattgtatgtatattgcggattacgttaattacattatttgtaagtcatttatgctgtaaagttttgtattctattctcagttaacttctaatgatgatatagtgatgatactatctataaaaaaaaagttctgatttaataggacctatctaggtgtaggcttgtagcaataccaaatgtagaaggttttatgtccaaggatttttcaattttctccatttcattccctaaattcctatcccgatttacgtccaccttacaccgtaagttgtgttgtcgaacattatcttccacacatattttatgtaaattattgactctctcgatcccattacatgtgatgtgggctctacctacggttccaccaacctcatattctaatctaatatttttctcatatgctaattttaaatactaaacgaatcttaacggctgatatattcgtatatgaattcatctacacaacatttatgttaatgatatatctctagtctagacattatttgtctacaaacgttttgtattgacttggccatctcattccaacaagatacaactcatcactccaaacattcaacttccatataaaccattcccttccgatctcactttccaaatcactcttcacactttaactaagcaaaccaataatggctaccactcgtctaactctagctcctctcctcctcatcgcagccgtactactcgcaaccaaggcaacggctcagccggcagcccccgctccagagcctgctggtcccatcaacctcactgcgatcctcgaaaaaggtggtcaattcactactttcatccatcttctaaacatcactcaagtcggtagtcaagtgaacattcaagtcaatagttcatccgaaggtatgacggtgttcgcaccaacagacaatgcttttcaaaaccttaaacccggaaccctaaaccagttaagccctgacgatcaagttaaactcattctctaccacgttagccccaaatattacagtatggatgatctcctctccgtgagtaacccggttaggactcaagcttctggccgagacaacggtgtttacgggcttaacttcaccggccaaacaaaccaaatcaatgtctctactggttatgtggagacacgtattagcaattcgttgaggcaacaacgtcctctcgcagtttatgttgtcgacatggttttgttgcccggtgagatgttcggagagcacaagctttcgccgattgctcctgcccctaaatctaaatccggtggggttaccgatgactccggctccactaagaaggcagcgtcaccgtcggataagtcaggctccggtgagaagaaagtcggactagggtttggtcttggacttattgtcttatgtttgaaatttctcttttgaaaatttaatagcaaagatttgttttgctttctattgattttatcctgcgatgtgaggtataaatatgaaatttgttgattaagttccgtgaaataaaatgtgagatttttaataacatacgtcgtctatagttgtcaattgtgcctgtcgaagtggataactcttttcttggcgaacccaaaacaacaaatttgtgatgtgaacaaaatattttgttaacttaattactaaagtacgtatacaattgatgagatgcttatttgttttctgttttaattgcaagttccattcacgacattttaactctagctacgtgaaaaatggatcgaaggatcggtagccgatccgaaaaactagccatcacatgcgattactagacatagattagtagtattatttaattctgaccagcagtatagatagtattcataataataaagtgttcagataatcgttttactgtaacacgctttaaaataaacatgataataactacccagttgccattaaattataattcatcgtccttagcccatgtgataatgggcttagtgaaacatattttaaaataatgggcctgagcaatgtctttaaaatttgtcaaacacttgaggacggaaaacaaaaacataactaaatgcctaaaatgggcctctcgaaaaagataatgtgtttaatgaaccatatttgaaagtaatgggcctaagcaaataggcacgaacatactagaaggtagtttgccaatgcatatctgaccgatttctcatttctaaaaccctaagcttcgccggcagctccgatcgtgatctttcataaatcctaccatcgccgtcgattaagagctgagctcaggtttatctatctgctttttcctcccagttttcactgtgtttcgttgtatgctctgtttggttgtcgatagtcacacagtgcctgatcgtcggtcaatttgctaatccttgtgtgatttagagttggaatgatcatttggtgaaatctcgtggatcttttcttgttgaaagcttgttgacttgctcgtcatatatattcgacgatctatgggtactgtatctagttgataatgttcaaaggcttgatcgattttagccttgggatctgctaccgatgctttcaatttctgacgcttttctatgcgatcttttcgaattcgtttttctctccagtttttgccatgtcaattgattctcttagtaacactacttctttgtttgctctcttggattttttgtttcttctgaaatggaggcttgtgcattgattgttctatgtgtgtgatttcttatgcggtgttaagtcctttggatcttcgtataatgatgtttttaatctgctgacaaacgaatttatccctgcggcgttttagtttgctacatataaagttcttagctgtgaactgtttctcctgggtatctcattgcggtttgaattctgttttgctatcaggaaatgagtttcaacaaagttcccaacattcctggagctcctgctctctctgcccttcttaaggtcagcgttattggtgggctcggtgtctatgcccttactaatagtctctacaatgtcgatggaggacaccgtgctgtcatgttcaaccgattaactggtatcaaggaaaaggtttgtatttctcaaactaacaagatgtacttttatatctgaggctttgaattctaagaaagcgttacttttacttggatttgtgttttcaggtgtacccagaaggcacacattttatggtgccatggtttgaaaggccaatcatctatgacgttcgtgcacgaccttaccttgtagagagcaccactggtagtcatgatcttcagatggtgcgttttggtttcttcttcttttggcttcttttctgtgtgtgtttgtacaatatttagcccagggatttaattttaaatgatgttactgaatgtggtgctatatagatcatactagatattccttcttttgacgttatgttaagacccttcaatgcagcattaagagcatgttttagaaaattttgggtgtggtttgaggttatggagctgtagattaaatatcacttactcttttaggatattacacgatcaatgttgatccttatatgaactgtgtgagtgtatggataagtggaaaaacaagagacaagttacacttgctttcagtagacttaggtagagcaagaaagaacttagtctccattttctttcttaaaggagttgctgtgtttctgatatttttcttgggtgttgcacaggtgaaaattggattaagggttctcacacgtcccatgggtgaccgtttgcctcagatttaccgaacccttggcgagaactacagcgaaagggttcttccttccatcatccatgaaaccctaaaagcagtggtagctcagtacaatgcaagccagctcattacccagagagaagtacgtatctcaacattctttttctacaacttttctgctcttttgtttctaatggtggactctgtttactctctcctctaggctgtgagcagagagatacgcaagattctgacagagcgggcttctaactttgacattgctcttgatgatgtctccatcacgactctgacattcggcaaagagttcaccgcagctatcgaggcaaaacaagttgctgctcaggaagctgaacgggctaagttcattgtggagaaagccgaacaagacaggagaagtgcggttatccgtgcgcaggtatagcattggtgatcttgattgcaaatctaatgacatgagattagtggttttggcctgaagcattagctctttttgaatctttgtgcagggagaagctaaaagtgctcagcttatcggacaagcaattgcgaacaatcaggcattcatcactctgagaaagattgaagctgcgagagagattgcacagaccattgcacaatctgctaacaaggtttacctgagctccaacgatctgttgcttaaccttcaagaaatgaacttggagcctaagaagtaaaagagaaggaacgagtaagtttcttcatttcatattcatttcatttaaaagatctctccgccttggaagtaaaggatgggttggtgtttgaccaaatgaccctttctcgtgactgattctgaaaatagtctttaagaggacatattgagagagacgcagattggctttggtcagtattattcatcattttcaatgaaactttttgttgatattttcctgtgtttccccggacaattgatgaagttgaatttaaaactcaataatattcatatgatctgatctatgccaatagttctttttagtatatgttacatacgacatgcttatataaatatccgaatataagatccgtaccaatcctttcataaaacttaaatataaatatttcttgttagcttgctattcaaattttcttttttccactagttgccaaccttatctacctataaggatttgtattggagagcagagaaaataaaatattgcatacgtataataagattttgtatgagcagagcaacatggaccctttgtatttaatgacgtcttgccggcgccaccatgatagagacgtctttttctttctttcaccggtgaggagttttatgggggtgacgaaactccggcgaattttccggtgacgtcaaattttaaaattttgaccaagtaaactcttatttcaatatttgtatataaccgacggctgctttttatgatgtcatgtataattaaaattagctggaaacgagtgatgaccgttaaccaagataataaaatgttttgagcaataaataattccaaaaaaataaaagcgttgtggattaacaaaagacggaacgacttgctgtttcgtaaagttaaagggagacgtcatgtcgttttgtcaccatgagggtccatttttttttgtcagtttttcgtacttctcagctgtttcttttgacgaaaggagttgttagattttccacagaactgttgacaagtcatcaccttggctttgcggagttcgtgacgtatgtgcaacgtattttcgaccatatcataagtttaactaatcctagacaagatgttcaaaatgtataattcgatggaaaaaatatgcgtttctatagtttatgcgttttatcaaaattctaaatgacagcttaaatccatgataatagacagatgcttaatggaaaagaaataaaatctataggacgtgtactgggtagtgggtacatatatatgtttcaaggtgcaactagaatataaaacacaaattgatatcttaatgttagagaaaacaagtcatcgtcatgacgtaatagagatgatctaaaatctaatggtccatacaaatgatttgcctttatccataaaacgtaaccttacgaagacaattttaattgtgacataagtttctaaacaaataaagatatctcttgacatcagccttgtcgtaagccccttactatgtattcgtcatcatttagtttaatataatctatatataagtcactgattttatgaatgctacaattttctaaattacaatatgtcaaaaatgacattcggttaagataatcatagttatattctttaaaaaattgagttgtcgcatttgagttccgacaatgagttcgaaatttatctttcacacataagttaaatatatttttaagttttggatgatttacactcaacattaataaataatcataagtttagttatagatctttattttggatacggtgacatggcttcggatatcaagagaatacagtttacacatgcttcattgacccccaaagccaaatgctctccaaaatcctctatataaattctttaataatcacatctcttaccaaacgaacccaactacacaagtctctctctcttttcccatttctccctctctctctttgtctctctatcatcaattatgcaaaaagcaattcgaccatacgagtcaccgtggacgaagaccgtgccgggcaatagcattttccttttaaagaatgaagataaaccatcatcatcatcatcatcattatcatggttaacatcaggatcaccaaagccaacatctataagcaataagagatcaagcaacctagttgtgatggagaatgctgtggtggtgtttgcaaggagaggctgttgtttgggacacgtggcaaaacggctgctactgacacatggcgtgaatccagtggtggttgagattggtgaagaagacaacaacaactacgacaatatcgtaagtgataaagagaaattacctatgatgtacataggaggaaagttgtttggaggattggaaaatctgatggctgctcatattaatggtgatttagtgcctactcttagacaagctggggctttatggctttgatttttaatcctcctaaatctagttgccttcttatttatttctatccctttttacattatttgttaatatatgtgaacttgtaaaagattgttacgtgattggtttgatcataagaaaaacacagaaaaaaacaaaaaaaaaacatcatattttactttattttggtaattaaaacattatttacgaaaaataaaaaatcaaaaagtaaaaaatatatatatatatatatatagatatatattttcacgtaattaaatttatcacttagttttctaaaacaaaaacattttgtaaatcgaaattttttagttaaaaatcaaaacactattacttatactttatttttgacatcacaaaaaaaacattatttttgaaaaccgtttaaaacataattaagtgttaaatttgtcttaaaaacaaaagcattttaactaacatatcaagtgaaatttaaacggttttactttaaaaatatatatatttttcaaaaaccttgatatttagtttaaaatcagacgtgaaaaacatattactttttctataatcaaatcattatattttatatttttatttttaaaaaaagagagagaaaagaaagttttattaccttgttggatttgggtagtggggagggtcctcacaggaaagcccattacgaaggcccattgatgagctttgactgcatcgttctgtatccttcttgtgacatcttcttcttcgttcatcctcaggccactccatcaagattcgaaccgatacatggtcgtcgttctcagtcgccaccgtcgaccgaatccgctggtgagaatagcgtaagaagcatccacggtaacgaatcaacaagaagggttaaattagaagagaccataactaaatcacgataagagaatgctttcctccgctcaaatcttacggataggttctgagatgaagaacgaagttgtttcagagataatttagtaatggatcatcatcggagatcttaaaattcgtagataaaatatggatttattttttgtcgtttagaagaagaagaatagcaaattttcgagtatttccttttttccgactaggttacgaaaaaggaaatttcattaattatgctaaaaacaaaaaaatatggaaattttctcacaacggtcatatttgttgaaacagagaatgtgccgttgagatcgagaggagaaattcgggatcatgtgagctcttttcaaccgacaagatcctgcaaccaataagatctctaccgatttttgtagttgcttatctttggttactttggtcaaaacacaatcacaaactcgttagatacaaaactgttcagaaaaaactttcactctgataccatgtcaaattcacgcaatgataagaaagttctctgctttattgatcgacaactttacattatatatacgatgatatggaaaaccctaacaatgacttgccgactaagatagtatattacatatggcttaagcccaacatatatcccacgttaataagaagactaactaaccatcatcatccatgatacaaaacagaacagagcattctttaaccatcaatgttgctactgtcttcgttaacaaccaaaagcttcaagaaataggttagtaatgttatgctttcacaaccaattctttgacattttaatgggttaataatgttatgtgagaacccaatcttgacaaaattagtatggcccaaacccaatataacctacgaatttaagctcgtcctcatttcacttgttaaaatttgaacaaaatggtccttggcgaaaatccccaaaactagtagtatgcctgctatcataattttttgtgttaaaattttaaaagtatagcataatatttttttaattccatataacctaacgatattgttatcgatgtatcacgaccagagttatctatgccctcgctctactgcttatgttcatccgaattcaaattctatgttattaaaacaataataaaaaacaaaaaatcttcaaagatataggcagattctgtcgaatcataatcataaaataatacaaatgcatatattggataggtgtgagtggtgataagaaaacaatactaatgtattttataagaaattaagtttgaagaaaccatacaagtgactgtgacatatttgatgaggccaacagtcaatcatgaagccaataacatttttttattactatattatattgcgaaaaaaacaactttaagtaattatcaccaactttttctaacatgctttttgcgagcccgaatgcatcaacgaaccattatggatgaaggtggaccagatttgaccgtttggtagcaatttcgatattttaactagcctattcaaatctctaaccatatactatacgtaacatgaaaaatgccatgtcctgatcaccatccaatgattagccgtcaaataattcaagaaaaaccatggaaaatatatttatttttatatatttttgtgaagaagatttgtgaacttgtaatttaactttctgagctgtataagttatcctccatatatatatatatatatataattttaaatatcttgataaatttaaaattatttttttgatattaaacgtatccatatatatatatatatatatttcatggatacgtttaatatcaaaaaaataattttaaatttatcaagatatttatgtacgaagcaaagttcaaatatttcaaaacaataaatttatcttttataacaaaaaaacaataaatttagctgaccaaatatatgttacgttttgcatccaccatcatgaagcacatagttaaatcacaaaaatttatgattatatcatttgataccgtgattcacgagagtcatatacaccttcgatcactctcaaccggacggcaaaatttgtggtcatacacgtgattatatatattagaagaaaaaaatgaaagaattttcttttgttaattgtaattgcatattccgtattaacttttctctgaagttagacaagccattaccatcagatttaaagcaattgatcgtttgaaacaaatagtggcgccagtgctaaaactaataaatacattgagacttgaagcccagacttggttaactcatatatacgcagatatatacgttgaataaataactatgatggacaaattttagtgaattgtgtaagattatacatattgtaactgttgaagtttggtttgcactataggtgtatagataattgacattgaagattcatatacagagacagtgaccatttcacttaactaccacttttcttttttctctccattaaaatggagtaattaactaccacttgatcctatgtttaggtattactctctttttctcgctttgcactcatgaatagtttctatcaactttgtggaaaatggttggaaagcttgactttatcttttaattactttaggacccattaaaaaggaatcttttaaatatcccttttttattaaagattttcacatataattgcatgaaacgtaacctttttttttattcgggtaataagaacgtaaccattttgtttattggttccataagcttgtcaatctatgagtatgagtttctcttatctgtaaaaaaagtatacacatgcactcgtatttctaatttcctagcaattggagacgataaaccctttaaaaataaaaagcaattggagacgatatatgatgataaatatgtgaactattaaaaaaaaaaaaactaaatatcaatttgaagttttgatcacaaataaaatttaatacaaaaatttccaattacaatcatgaaattgctttacaaaaaatttctatcatttaaatatatattaattgtatctgtgttataagtaacaatgcattccaagagtttaaaatagaacggaaaaggtaaggtggttggaaaaaaaatcaataaaagatatagagtgattttgattagtagaatgtcgatatcaatttgaccgaaatttattggattggtcaagtccgagtaaaacaagaaggccattatcatccactaagtgacatatgtatactttaagtctaatcatatctccattatattcttatttgtatttcatatatcgccaagtttctatgctatggtatggatctaacctttgtcttctttgaaatgtcgtttattgcattttattttttataggcatacgtttaatacagtatatatatatatatatatatatatatatataattgtatacacatttattcatggcttagtttgtactttttattttattttcccaagaatacgtatagatggattctagctaatgttgttttatgtgaatccattttaatactttttggcctatgctaatattattctacatctacatatgaccacatgaatctttgcgttataaatatgtggatgcatctagtatatgcacacaagcttatgctggtgataatttttaacgcaagttgcttacttgttggaataaaacattggtgtagatcagttgaaaatttgattaattaacgtttgcagcagactagctaatccgttcttacactaataccattcaaaaattaaaataataatggggtaatatgtgagtttcccctacactatcgtgggtatatatgtaatatatatagtatattttctaccaaaaaaaaatatatatatatagtatattgcgcattttatgaaccaaaagcctgtggtatatctgtaatgtaccctctggatctaaatctgtcttatcaatgttattctctttgagtttacaataaaggaaatgtagaaaataaccgagtaagtagtttaggtccggcaagaaaaaaaaatgctccaatagttttatatatgatgttgaaattgatatagccagctaaattaaaaataattcatatgtatttaaactcatgaactatgtttaaatatataaacgacgaccatggaaacatatgtaaatgtagacaaagaattattcttgactaaatttgaacttttttatttgtgttgatgcgttatatctccactatcatcattgttcacaaattttttttgaactatactcaatttacaattatattgtacagattcaaatcagcatttctttagaaacttgaaacataggatttactattcgaactttatttaaatatgagcgggatagaccaaattcaaatagataattatcgtgtaaattcatttgtacgtaggagctctacataacaaaaaaattgacatatttttgtttttggatacactcatatgaacgcatctctttatactttacagtaacaaaaaaaaatcccagtttcccatttgtgtaaatgcccatctgtatataaatcttgattatataaagggaacaataatatactataacaacgtctcgaaaaataagggaatattcttgtgccgccaaagttcaagaagaaaaatccaaaactaaaacactaaactaatgttattattttataggaatcttaaaacatgattacattatgattaaagtgtaaattacctaaagaattggtaattaagtcagcccacaagctgacgacttctcttccttccaaaaattcacctgcattttgtcagttctctgtctcttcgtactttcgattaattaactaaccataattatcttactttcagctaggggtaaataaaaaagcacatttagtttacttttctttgaaaatcgatatgatcgagattttgatatggtcgaattgtttaccgttttttttcatctacaatattattttatatataggattttatccaaattataacacgataataataatagactagtttatacaactccgatacatatgctcagtcttaggataataaactacaaaataaattttcaattaaaattttggtatgagtttataatagttatgatctccgagagaaaatttactagcttgcacatatatagtaggttagaattacttttttggttcaatctttttttttttaatgggatttcgagttctgatcttttttaaaaataagttaagattctatttttttttaaaaaaatacgttagaaaatactttcatttgtagggcgagaaaaagtttgctaaagaaaaagacgaatagggagcattgcaaaaagatctttgtaagaaaaagcatgaacaagatactcgtacgtatctactaacttctcttatactcaattccacaaacatgaattttttcacaattattaatatcgaaattagcaatttttttgtttttgtcaaaggaaaattaacaattttttgaaggaaaatcgaatatcaaaacgaaaatttgaagtggggtacttgacgggaagagttcgcatggttttcgttttcactgtcgaccggacgattattctcttttgcatatttaggtttttaatttcgttgtcgtatgttgttggattttacctcacgagcacgtgcatgggtacacgtgcattgcaggctttgttctcaacaataaacgagagatgtgacctgcgccgttggatctgtttacttctttgaccgcctcaatttacggtcaaattaaaatctcaaattatatacaccatgactgtgctttatatacgactttctactaaaaataacattaagagaaactataaggagaagaacaattaaagaagttaattttacctgaggatgatgaaaaaaagaacggagaaaagaaataatgagatcatcattccaaatagaaaaaggcagacatagaaacttttgtgtgtgtcatgacgcactgccactgaaaaaccaaataatcaaatatttccagataaatatagttaatttccaccgccattaacttttaactgcgaaatataaataaaatgggaaaaatatatgaaagtttaataatttatgacaatagctgcgacagttcttacagatcaaggtgcttatatttttttgtttgaaagaaagaggaatattattttttagtacacatatggggcttaagtgtgtagggtgtatatataaagtgatcacccaatataacttatcttttgtgtttgcctctcattcataactacatcagattctaagtatttctatttattttctcttcattacctttgctcatcctccatctcttatttaaaacttaattaattaccttttcaatctcttccaacaaaacttttgtccaagaagaagacatgacaactgaagatcagacaatttcaagtagtggaggatatgtccaaagctcatcaacaactgatcatgttgatcatcatcatcatgatcaacatgaatccctcaatcctcctcttgtcaagaagaagagaaacctccctggaaatcctggtaacaattaattaagtttaatagagatcacaaaataattcaaccctaatcaacatttttttttctgtttgctgaaaagtcatgttcttttttttttcgatcttgatctacaaacatgcatgctttctactgtttagatctttcacatgatcaaatatgtatccagaatttgattgttatatttcgttctctatagatccagaagctgaggtcatagctctatctccaaagacacttatggccacaaatcgtttcctctgcgagatatgtggaaaagggtttcaaagagaccagaatctacagcttcaccgtcgaggacacaacctcccatggaagctaaagcagaggacgagcaaagaagtaaggaaacgagtgtatgtatgtccagaaaagagttgcgtccaccaccatccgacgagggcacttggtgatcttaccggcattaagaaacatttttgtcggaaacatggcgagaaaaagtggaagtgtgagaaatgcgccaagagatatgcagtccaatctgactggaaggctcattccaagacttgtgggactagagaatatagatgcgactgtggtacaattttctccaggtacttagtgtatatctacacacgtacgtactaatagatgatctttacatttcctcatcacggtatcatatatttttagtggcgtaacaaatattttgatcacctagctgtaagcgcatatcatgtttaattgcattatatatagattcaaatatgattttaacttcttaaccagtaaagttaatcatgtttgaatatattagaatataggaagaatatatatatacttatatacatatcttaaaactcatactaaacctagctagagcttatattttaccgggtgaatactatgatgaaaaacaaaaaaaaaacgaatctgttacctcaactaacactactgtaccactggaccacacaaacaaatttcgttttaccacgttgtttgtaagtaaataagatttttttttttttttttgtgaaacaatttgtaagtaaataagatacatgttttttgttggaagtagtagctcatgtagggtctaaaacaaaataatttggagttacttttgtatagatattgccatattggtcattctctgagcatacgtgctgcttgatttcttgaataagacagtttcttggattgacatattttggttaaagtaagatatacaactttatttatctttttttccttaattgctatctatattactatatacatacatattaaacacaagcataaattagcgagtgtgtatagacgatattgatcttattggtgtgtataatttggtcaacaggagagacagcttcattacacatagagcgttctgtgacgctttagcagaagaaaccgctaggctaaacgcagcctcgcatctcaaaagctttgccgcaaccgctggtagtaatctaaactatcattatctcatggggacacttatcccatcaccatcactaccacaaccaccgtcgtttccgttcggaccaccgcaaccgcaacatcatcaccaccaccaattcccaatcacaaccaacaacttcgatcatcaagacgtcatgaaaccagcgtctacgctctctttatggtcgggaggaaatattaatcatcatcagcaagtgaccatcgaggaccgtatggcgccgcagccgcattcaccgcaagaggattacaattgggttttcggaaacgcgaataatcacggcgagttaataacgacgagcgattcactcattactcatgacaataatattaatatcgtccagagtaaggaaaacgctaacggggcaacttctctttccgtgccttctctttttagcagcgttgaccaaattacccaagacgcaaacgctgcttctgtggctgttgcaaatatgtcggcgactgcgttactccaaaaagctgctcagatgggagcgacttcttctacgtcaccaacgacgacgattactaccgaccaatcagcgtatcttcagagttttgcatcgaagagtaatcagattgtagaagatggtggcagcgacaggttctttgcttcgtttggatcgaacagtgtcgagttaatgagtaataataataacggtcttcacgagatcgggaaccctagaaacggcgttacggtcgtttcggggatgggtgaattacagaattacccttggaagcgtagaagagttgatattgggaatgcgggaggaggagggcaaactcgggattttcttggggttggtgtacaaacaatatgccattcttcctctatcaatggatggatttgaaacactctttaatggatttttctaccttatttatgagtgaacttaattatcaaagctgatttctttaattaattttaaaaatgatttatttcaccagaccaaaatcataaattaattttacgatcgattgtggttattagatttatcgtatcttctcaaattcaaaatgatcacctacgtctcaaaatttactcttccatcagatttttgctaaatttaggtcaactagtctatacttgtagtactcttcttattttattttttcaatttatagactacactagacacaagtataatgtagtgtgattcacatattggtattattatatgagcattttcgttgaagaatttttttttttttttcgttgaagaaaagttaagattcattcatattcactatgtgtagaaaggtgtttgatatgcttttttaaaaataaataagtacttaatcaattgtatgtattttgtatatatgccatagaaaaagtgtggatcgagaagtggtgggcacacaagaaaaacatgaaggcttttgagctcaataattctaaacttaacttgcagggcaattcatagtggaggaaaacattaagaaatgaaaaatgaagagagatagaaaaataaaagagaaaagattttctttaaagaatagctaataataattctcaccaaaataaaataaaattaggtaataatattgctagtggttctggaaaatcttaatgggcttaaacttatgggcctttgattagtacggaccaaatcttcagtcggtctttgggagatctttctctgtctatctctccaaagtttaaatctttcctcagaatcttactgtactttgttcaagtttagtactttattctgtacattaggttgttgaaagatcggagaaaacccattgtgaaattaaaccgaagctattcagtgactcatcactaggaagaaaaggagacgcctttggagggttttcatgagaaatccaacggacgagtcgggtcgggccgtccaattggtttacgttgatgaaaatgggaagctgaaaacggacccggaagccatcggcgctcttcagaagcttaagggtcctgtcgctgttgtctctctctttggtaaagctctccaaggcaagagcttcatctggaatcaggtttttttctggctttaggactttgattgagggtttagggttttagtattactttcgtttgtggtatctatgattcgttctcttcatgggtaaaagacaatgcttttgggtgtgatgataatgctgatgttctaagggagtttggttcttaattgtggaaatcgtttggcttatttctgcaaaaattctgttttctggaatttttgcatgtgcttctctctgatgcattgtcttatagtgattgaaatttgaagctgagagtgtctgatgttgaatgttgatctgtagcttcttagcaggagcattggatttgaagttcaaactcttcacaggccatgcaacggagatatatggatgtggattgagccagtgaagaggatttcagaagatggcactgaatatagtttagtgttactcgatgtcgaattggaagacgcaaagagtataccggttagtattgttttatctattcaaaagttcgggtcttttaaaagcttttaaggtttactatagggataagcagtctcatgaagtgttaactgattttgatatgttaggctacacacaatagccagattttctccctggctatcctcctatcaagcgtttttatctatggtccggtaaattacctgtgattgatttttctttctgaagaaagttttctaaacatacattgtataatgaaaattgctgcctcatgtttcagacacttggtttaaatgacattgcacttgatctctctcgtctacttgagattaggaagcaagaccacgttggagaagctaaggacaatacatttttcgagcttgggcagttctctcccatgtttgttcaacttatgatggtgatcatccccttatcatattacattcttaaggatttagaatcagctagtcactgatgtttgtgaacgatttttaacgtctttattatcaggatattaactcagaaacagtggaaggtggagaagatgtaactcagaatagcaaagtgggttaagccttcttgtctttcttaagagtgtttttttggatacgagaactcattttactattgtttccctaatcaaacctcaatgtcttttttcttttccattgtctgataaaactcgtggtttctttttttgtgaatagctcaaaaagctacgacctctgcttctctacggtgtagatgccctcatgaagtttgtctctgagagagtaaggcctaagcaaagaggtgataccatcgtcacagggccacctcttgctggtttcacaaaggcgttttctgaaaatgttaataacaacatcgtgcctaaaatatcttctttgtggcaggtaattaataagtcaattctgtatatttcgttctcatattattttcagcatattcttatgcatcattcttctgtattttcagactgtagaggaattagaaggtcgcagggcccgtgatacagcaactgaggtatacatgtcgtctttggagcgttcagagactcctgatgaagtaagtttaaattcgtgtagcattcaaaaatcacttagatacattaataaaatgaattattcacatgatcatctgcagtcgatgctgttagaagcacacaataaggcagttgtcgaagctctgaccgcgttttgtgaatcttccattggaaacgtcgaagtaaaacagaaatacaaaagagacctttggagtttctttgcaaaggcgttggaggttatctttctatctcccgccctcccctttatttatctttgtatacttttttgccaatatgccagctcgtttttgaggctattttgctaaatagtgtttttttttttttcaggatcacaagcgagtggcaaatgtggaggcgtattcgagatgttgtaatgccatagaagatatgggcaagaaattatgggccttgccttgttcacaagatgctaatataggcgatatgatcaaggtgcttttttttttctgtcttaaactgacttttccatcacagtatagtagacatagtaaagcctcatgcagagcaactcttagccattacattataaacattgttgtaatctgtatgaaacaggctcttgataccgcagttgcggagtatgaagcatccatcaacggtcctatgaagtggcagaaactatcttcctttttgagagagaggttctcattatgcctttatacttccacaaaataaagattaaattttatgtttatatttttggccttcatggaagattaacctgcctcagtttctaattttcagtgtacaggacattctcgtccatcgcagagggaatcaaatggatgaacttatgtctgagaactccaaactcaagctgcagcagcagtccttggaaagcacgatgaatttgctcaagaaacagcttgaaggtagagagaaaatgaacaaggaatatcagaagcgttacgagagtgccattgatgatatatgtaagctttcagatcaattcaaaaaccggattaatgacctggaaagtaagtgtaaatcaattcacgatgaacactcgaaccttatggaggtgctggggtccacaagacttgaggcttctgagtggaaacgtaagtatgaggggactttggatgagaatggtgtgagcaacattcgggtaggggtagatgcgtcgatcactaggtgcagtaataagttaattgattggaaaattaagtacgagaatactgttagtgagcaaaaagctgttacagagaagatagcggcaatggaggagaagttaaagcaagcttcaaccacagaagatggcttgagagctgagttctcccgtgttttggatgaaaaggttagggcttatattcgaacgcagtagcttaaccatttggctgacttcacagtaaactgatttaagttgtgactcttcttggttactgttaggagaagataatcacagagaaagctgcaaagcttgcgactttggagcagcaattggcctctacgcgtgcggaattaaaggtgagattctctgaaacatttgagtcattcataatctcttaagattcttgtttatttgctgtattaatcttggtgaaaagaccttggcaattccattactctgagtctgcgtactgtaacacgtttttaattgatgctttattgcagaaaagtgcgttgaaggtggacgaatgttcttcagaagcaaaagacgtgaggcttcaaatgtcgctcctgaatgagaaatatgaatctgtgaaatccgcatctgagttacttgaaactgagacagagacgttaaagcgagagaaagatgaattggacaagaagtgtcatatacatttggaggaacttgaaaaactcgttttgaggctgacaaatgtggaaagtgaggctttagaagctaagaaacttgtggattctttgaaattggaagctgaagcagcccgggacaacgagaacaaacttcagacatcattagtagagagatgcattgaaattgaccgagctaagagccgtatcgaggagcttgaaaaagtttgcacgctcaatagtggggaaggtgaagcttcagcatctaagaaacttgtggattcgatgaaaatggaagcggaagcatcccggaagaatgagaacaaactccagacgctgttggaggataaatgcattgaaatcgaccgagctaagagccgaattgaaggacttgaaagagactgcttgaagcttaaatatgcggaaagtgaggctgcaacggtcaaagaactagtgagttcgatgaaaatggaagtggaaagcgcacgaagcaacgaaaagaaactccagctgtcgttgcaggaaaagaccatcgaaattgacagagctaagggacaaatcgaggctctggagaggcaaaagatggaactttctgaaacgctggagacaagagcgaaacaaaatgaagaagaggttactaaatggcagagaatcatcaacgctgagaagtcaaaaaacattcgagagaatttgatggagaaagaagactcttttatggtttgggatgaagcaacaccgatgcagcgagtaaagcgtttgaaggtagaagcagcagtaacctgttcgggttcagattttgctcaagagacggaagaagattcagtttcacaagagagcaggaaagttaggacaatgactccgagaagatgcacaagctcagaagctggagcaacgtcttcttccacgggcacggggcattcgaaatacacaatgaagaagctgagaactgagatactagaacatgggtttggggctgagttggtcgggttaaagaatccaagaaagagagatttggttcagctctatgaacgcaccgttttgcgaaagtgaagttgtaataacacataaaacaaggtcaagtttctcgttcttggaactttctgtgaattttgctgcttcgaaatgaaaatggtattgcagaagataaaagcttagttttttcactgatgaggttattaaggtttttaatgtcgaacccgcgtttggcattgatacggaggtcggaggggagtctgttagaaaaaaagtcaagaactgttaaaagtcaacagctgttacttgacggcgtcatgacgtttttaactgcttagtcatttggaaaatgggctggactggtacatgggcttgtgaaacttttggatcataagaaaacaatgtgtggttgttctaaataatagttatccctttcacattaaatgttgattcaaaatttaaaaaatgtttaaatactttttgtattaaaactgtatatctgatttgtccttggttaaaattagtgactttatagaaatgtagacttaaacttgattcgtgtgaaaaatgtaaaaaccacatatgctatagaatgaggtattgcatcgagtatgtttctccgacaacgacaagcttaaaaaagagatggtaataaataattcccgacgatcacgggacaaaagctgagatagcttcagctccacactaagcaatcgtcgagagaaccatcatgactcgtcccattggcccaaaagtcctactatccaattatcctattctttctcttatttccaaattggacctacttaatcgtcattgctttctctctttaatgttgtgtctatatcagtttcttttgttcttaccaaaatactaaataaaaaaatcttgcacttcaaaccttaaaacacgtgtaaactcaaataaattttgtatcaaattatttactagtatatcataaatctactagtataatataatactgtatatgataatcatggctattaaaaacttgtgataatcattaaaatggcattttagagatctatgtatagttattattaaaaatatatttccttttaacattataacagctttgctaccacaaaacattatctaattctaaatttctaatcttcatttttcaactaactcaactaccaaacagtggaataaagtcaaaagcatgtgtaaataaataataactcgtaatttattttcttgggtgcttttcttttttgaccaaaacatatataaataaaactaacaaatgcaaaatatcctcgtatgacccactttatgaattctttataaccttttcaaattttattttaaatcactcgccgcgaatgacgaatgtcccctcctcaatcttcgcatgtttgctcgccatttaactacttctttacttatcataccaaaaaaaaaactacttcttaattctatttatacataaactcactcacacaccaaaatcacatctcaaatcctaaaatctttcactctctcacattattctctcttcattgatggcttcttttgctctgaaacccattttttgtttcattgctgttttttgcttcatcgtccacaatgttgaagctagagagggtaagctcttctttagcaagttcactcacatagatcgtcctaacaacaaagatgtcgctctatctccagctccagctcccggactagcccaagctaatggaagactcggaaatgggtctttcgggcctggttccggtatgattcctcaaaccaaagagtcatggccaagttcatccactacaacagacgaagagtttgagaaattgatggctacatttgacgaagaaaagaataccaagttacccgaggcattcgaggaagaagaagaatctgaagattcggaagatctcaatgagccaaaggataagtacaacaacaacaacaacaataatggatacacttacactactaacaattataatgacaatgggagaggttacggtaatgaagaagagaagcaggggatgagtgacacaagggttatggagaacggtaagtatttctacgacacaagaggtaggaattcagaaaacacccctagtcgcgggtatgagaatgctcgaggaaatgatcataccaacgagtttgaaactatggaggaatactacaagagcttggagggtagtcaagaagagtatgagccttagaaggaaattgtatttgagaaaacaaaacacttttttggagcaattaattatattgtgcaatctccatttacttgtcttttatgaaaagtgaaagtaaaaacacttttaagttatacaaatcaaagctgtgagttatattatgtttatgctaaaattttttaacgtttatcttaatctcaatttatgaccatgattaataccagcgacgagtatgtgttaaaaatagaatcaaaagaccaataataccaatttaagagaactatgcaagaccaaaactacaccatcataatctcaaaagtaatcataactgaatataatctcagtgacctagagagttctctgaaaatttaaattaaataataacgaagagaagtagagacagacaccggttgtagtcattaagcagtaattacttcatactcgaccagagagagattgttggcccggttaacctcgaacgaaacaggaccggttatttcaatgcgtccccatctgtcaacagccattctcatagtgtccttgaacaagtcgatcttcgcattcctcagtataactgttgctccagtcttcattagatcaactgcatttgcaaccccaaaagaacatcattaattagtaccatacatattctcacatattgaataggaagttgtataaatgtcaaacacaaacacactaatcaaagcttagagattaatgaagtggaacatattgaacactaatcaaagcttagacatatataaatagatatactctgttcatcaataaactaaactataagcaaaattatctataaaaaaagttaaactttatcaaaatctctgaagtataaatgttttagatcttcacaaacatagagattccaatcaaggcatatataaacctagaaacagagaaattatggaaagattgaacgcaatttcgagtgaaaacgatagagaaacgattacgaaaccctaaccaagagaacttatatatgtaaataattaagatccttaccttggtcgttgcgagcggtgaaaagaatgcatccagtatcgtcaccaattaggcactcagcgatacgaggagatgaaattggctgctgcgtcaacgaacttttacgaatcgccggtttaacgggattcgattcaaggactttgacgatcagagtatggccgctggttcctggtttgagctgatccaccttcacaaacactggtttacgcttcggcgcagtcgtcgcgttagtattcgccgtcgtcgacatagtgtcgtaatttgaatctccttagggtttttcaaaataattgacaactttgacgtgatgaagagtcgcgctggtagattagggtttagattcttcacaatggtatttaaatgagaaaattagaaacaaatcttactctggattattatctaaattactggattataaattaccactaattcattttttgcgatttttaaaacggtatacattttattggcgcgttcaaaatttgaaacttaaactcattatattttcatattatgcttaatattagtcgaattttctttttttgacatccaatattagtctaagcagattgtggagtaataataaatcatcaaattttgttataatgtagcaatgtatcatctactcaatttttatgtattataacttttgtatcaaagaatacaattttagattcatcaagctttctcgaagtatatattcgacatggataatttctaagtacttgtttatcagattctcagataaaatatgaaaaagcccaaagataataacctgttaaagcccaagcaacaaatggcgcaaaactgcgagacgcaagaacggggacgtttaggttaaaacataaaaaggcgtcataaaactgttttctctttaaggcggcgcgtcagtcaatccacgtggacatttctttccacatttttgtcactttgtccttttgtgggattacgtcacttctataaaacaatagttttgtcctttatctaaattattctcccccaaccaaaatatgaccacagaaaaagagaatgtcactacggccgtggccgtgaaagacggcggagaaaagagtaaggaagtgagtgacaagggcgtaaagaagagaaagaatgtaactaaggccctggccgtgaatgacggcggagaaaagagtaaggaagtgcgttacaggggtgtaaggaggagaccatgggggagatatgctgcggagatccgtgatccggtaaagaaaaaacgggtctggctcgggtccttcaacacgggggaggaagccgccagagcctacgactccgctgccataaggtttcgaggatcgaaagctactactaacttccctctaatcggatactatgggatttcttcggcgacgccggtgaacaacaacctttccgagacggtgagtgatggaaatgccaacctccctctcgttggagacgatgggaatgctttggcttctccggtgaacaacaccctttccgaaacggcgcgtgatggaacacttccatcggattgtcacgacatgttatctccgggggtggctgaagcggttgctggatttttcttagatctgcctgaagttattgcgttgaaagaggagcttgatcgagtttgtcctgaccagtttgagtccattgatatggggttgactattggtcctcaaaccgccgtggaagagcctgagacttcctccgccgtggattgtaagctgcgaatggaaccggatcttgacctcaacgcaagtccctaaagattgatctgatgttgttgtccttgaataagtttgttatcttgtcgctcttctgattgtctgtacttctattggttgattcgtgcttttggaggacaaaacaaacatttttttatgtattaaaaaaaggtaattgaactattatcgtatcataacctagccaatggatttcgtgttgacgtgggggataaagaagtattggtgtcaggtgggtcgcacgtgtgtttttcgccgtccacagtgacacgtggaatacaacttatctcactacttaccttttttactcacgcgctctcttttacggtgatatacactagctccttgaattagttataacttataagagcaaaggtaaatatcaaatgagagaaagaaaaacatctgtgacaatgattgtatttaataccccagtaacaaactgatccaaaatcaagattctcttgataaacagaaatatgtatgtttcatcactttgtttatagcaatgagtatagagtccaccaaaaggagtatatatgttcatagatcccatacatgcatgtatgtgctcatatattataatattatgtagtcaacacgtctcgatatgtacatctgtcgatgacatacacatgcctcatatgaaagctactagctttcgtgtggtgtccaaagaagaacaattggagaacttgtcgcacctttttatatacaaaaaaggatgtgacatataactttagggagacggtactaacacaactgtattctcgtctaccaggcaccagcataaccaaaacataacacatttcagggtgagggggatgaataattcgagaattgtgcataggtacattcataaaattaaatcataaacataacacgtttcagggtatacgatgagatgaaacatttattttcaagaaacgcatatcttaatatcatttataaaacttaatagcgtaaaccgaaaacgcaatgtgatcaatcgtccagtgatattttatacgtttaaaagcttaatacaaattaactataaaacaaaaaccatcagttaatcaatatacatatcacaatgatgaaaacagacgaagacgaaaacaaaaaagaagatcaatatacatatcaatattcaattgtgaggttgtaatgttcaaattgatctattaaagatttaacaaagtatacatgaaaagggaaaaatatctatagaattggtgaaacattgcacaatccgagtccacaagatattacaagttcaacatattatttggtaaaaatcccatcagaaaaagaaaattctaaaaaataaacgacaatacacaagacacttctgaattagctaaaaaaaaaaatcttcaaaataaatttgaacaaacaatctctccatgcattgaccaaaccgttacgaaccgattattctcccatgattcatgaatgtgattaaaattcttccaccgaaatttacattctcaagtcagatctcctcccggcgaatctccaccgtcaatccctcaagtcaagagatcattgacccatcctagatcagggtcaccacaagaaccatcctcaatgttagtattctccctaacggccgtcatcgccgtgaaatcgttcatctgtctccggcgaggagtgaaatcatcactgaagaagttcgcctgaggtgagttagttaggtaacttggagtggaaggcgaaagagcaaattgcaaagggctacttggttgttgttgctggagatggagacgctgattgctcagaccgcaggacgacgcaaacgcggcagccgcagcggaaaccggagttgtaacgggcgacgaggaactcgcctgcagcgcttccgctaagctcatggaatccaaagaattcacaagctcgctcaaaacgtctttatagttcattgaaccagcggctgcagcggcggaaacggcagaagcggcgcggttcctcaaccgtgaaaaagcagcggctttattagccggagacataggtggagacagagacggagatcgagaaagatgagacaaattacccaaaagagtgctcgtgggagagctgctacaaaacaagcaacatggattcttcgccgcaggagaaggcgacgctgagacaccggaaacgttctccggaggaagaaccctaagctgacgtggcgaatgagcaaagaaacagactttccttttacagtgtttaccgtctttacaagcttcagtacggtaacgaataggatggagccaacactcgaagactccatgagcaaactcacaatcatctccacggctacaatcaccaccacgacgaaactcgggacaaacctcaccggagtattgaaagcgacgagggtcacgacggcgagctttctcaccgggatgagcaaaaggacaatcagtccaatcgtggcttcggctacgagtgcaacgacggatcttgaattcgaacatccggaaatgatcacttgcgtaaggatcatcagagtcagaatcataacagtactctttattctctctgttgttgtcttcgttgtcttcttcatgttcagatgtaatcttgttgcttttgttccagttatgtttacgcggcgagcgaggggaagaagaatcagaaggaaaactcttggaagataaaagaagctttctcggaggaatctccaccgttggcttcctcatttgatgttccgtacaaacgacatccatgatgatataatatctaacttgttttttttgtttgtgatgtgttttggttttgagggatttgtgtaagatgaaagatgggatattgtggtttatatatatgtggattgagtatagatatagacatgagaataagttaaaacgtatatttaaatattgttagctttggattattatcattaaatagaattttgatgagatgtaataagaagacaagagattaaaaagtggaaggagtcgtgtgaagggtatggggagagggttcgtggcgagataagagaagagttttagagaggtttcatgcaaaagaagcaggagctgcctttctctccttgcttcagacctaacacatgtgcctatgttttcatcagcatcatcctctctttctctctcccttatcaacatccatttactttctaatttgtttttttgttagaattatacttgaaagtataaggataaaacaactaactttataacaaattaattataatgtatgaatttgtcttctagtttgttaccaagtaggcaagtactttgtgactttgataccaaaaataagtaaccaccccatatatatgattatgttactgtttgataagtattcttgtttgttaaagcgatcagcatttgaagtattatttttccttacttaggattattatttaaagcagttttacttattttttcatatattaatttgtatttttggattttaagttaagtgttcatatttttcttcttttacttaattttatctcttagaagaaaatattttaacaaaaacttaaaatcattaatttttactctcttggatacgtaactgctatgtaaaataacgtagtacataaccgaataagtatcagtatgacagaaaatcgatcaatatatcatctaaattaaatgagtaaattggtaagaaaacaattaactggtagatttagaaacattaaatttggttcatcccctcggactataggttcaatcacgtttcaagatcataaaagcgacgaaataacaaatataacgaaattcaaatataatattcttagcttgttttcctaagaacatagtttcacaacttcgaaaagtttatatgtaaagaaagacgttcttcaaacttaaactgtagaacactttaattatgtaaagatcttccatataaataatttaaccacaactaaactgtagaacactttaattaattttaacttaaaattaagaaatattaatgactataataaaaagaactcgtacaacctatttataaaagacctagtttaattaatttcttgatacaataatacaatcgcataatttgtctgaataaattatacacgaacttatagaagatcttgtatacaacgaatctaagaagactttacaacacagaaaggatatgcacgagattaaatacaaaacacgtataaaaaaaatacgtttttttattttgtacgccatttatcagcggaaacaaatgatatttaattacttttataattttcagtctatctattaatgtatctaaaaatcgggtgcatgtgtatgtacaagtgtcactttttccattgttgcgtggctctgatggaagcaaatacatttttggtttctaccttcacaagtcttcaactccataaattaattatttaaaataccaatttctaacttttatgccaaaattttgaagaataaaattaagttccgaaattgtgtgttttcatttggaatcggatagaagaaccacgacaaaaacagatatacagatgaaagcggtaatttacatttaaagtataaacgagaaattaactaatattgtttcgacggcaaatagaacactggttttgttacatgacattatgtttcggttttggcaagttcaatgttttgggactggtatctcattttgtatctaatttttggttatgtccttacttaaattatggttccacacaatccaaagcttctcattttgtatttagtgatatgattacttatatatacaaatagtaaacaataaatatatatatgtttactgaaaaatgcaaaaacatgtaccacaaatttctataatagttacaaatacattaatatcttcatagttctcaaaaataactatctagatgtaatatacacataacacaacttgtaatttgttttctttcttcttctcgattcagaaagagatcttacatacttttctcagtttctgataaggttaatcacgtggttgtgataaagttctaaaagagaggaagaagaaatctgtagggattagttttgtagaagatgcctcctttcaagcaacagcgtttaattttgagcctaattgttaaatgtgacttctggaatcaccagaatctgtatttagggttttgtatagtatagcttgccagatggaatctgatcagaagtagattgatccatcaaatatatgggtaatggaccaattcaacccatttagctaatggactgtactaatccatttggatatgaaacttatattttctctctaaagggaaaatagtaacatgcagcccatcaaattctaattggggatgaaacgacgtcgttagaaatgggggcgataagcatccaaaacgacacagtttagctaaaaggaaagacttcgaaacgacacagtttcaagaaaatatagccgttagagacaagagacgggggaaaggaaaaaaataaggccgttaagagtaagtatgtgaagaagccattattcaaaatatatatgaccgttagtgatccttccttgtccttcttctttttttatttctggttacagacagatacattccctctgagaaccaagaaaacaaaataataataaaaaaccctaattccccgctccacttctctctctcacgctctctctgtgattttagtatggaagcaacggcggaggaatcagttagtactcttgttacgacgatggttgatgagacgtatgagttcttagcgcctcgatggtttgatttcgttaatggagagactgaagatgagtctcgccgagcagaactctggtttcaatcggccttaagctgcgctccttctcgttagtttctttcatctcttattcttttcatcgtctacgaagaacacagtttattagggtttattgattctgatctcagaaagcgaaatcacgaaatctgaaaaacctaatttctttcttaggcgttagattttttagattctaggtttcgaacgaattgggtggttcagatctctgaatttggattatgatttgatctcagttttgtggatttcgtttcgtgaaattagggtttactgactccttttctgagaatcgaaattaggaatttgcaatctctctcaattcagaaaattttcgtcttttgtatgtgcagcttcggttcctagaatcaaagcaaggagatcgttcaaggtagaggccatgtgcaacttcaatgaagctgaagaagagacgctcaaggtttttttcttacaatcaacactgatttatcatccattacaagatcaaggaaagatcattttttaatcattctgattattgcaggataaagagccgttagaaccagtagttccaattgtttctttacaatcgcagccttctcaggccaagaaagcagaagttgctccttctaaagcaagcactgttaagccgtctcgcatcagttccaaggacgcagaggtcaacaacaagaccgtagatgccaggttctccatcgttctttgggagattgtatcgctgttaagtgagtaagaggcaattctaatgatctttcttctttttcatttaacagcgatccgacgactgagccaatagaagacaaggagaacattgctcctgcttgcacacccaaaccaccaatgcagttttctctaggggcaaagtcggtggatcttaagaagcagcaaactgctagaaagatagctagtctgctgaagaatccatctacactaaggcctaaaaaccagtctcaagccaaaggcagtcatcagaaaagtgtgaaagggtacctcacattcttaataaccaatctggttcacgtttctcttgtgatagttgttttaatgtgttgattgtctcactgcagggaaacgaatcttaacaacatagctagcactaccaatctgattcaagaaaatcaagccatcaaaaggcaaaagctagatgatggaaaatcaagacaggtgagccaaattgttttaaaatcagcatgtcattcactccatacctcactgcatgactgaaactttttccttcttatcattgatttatctagattctcaatccaaaaccagcaactctgctccacaagacaagaaatggtcttgttaacactggtttcaacttatgcccttcagtcactaagcacactccgaaggaaaacagaaaggtgtgttgtgcttcatggttgcttgtatactttttctgtcagaccctctcaaaccttgttttcacttttcaggtttatgttcgtgagcaaattgcaccttttgtttcaactgctgaattgatgaagaagttccaaacaagcacgcgagacctattcgtccagaatcgacctaagctgacactgacaagaccaaaggaacccgaatttgtgacgtcccaacgagctcgtcctttgagagttaagagcagtgcagaacttgaggaagagatgttggcaaagattcccaagtttaaagctcgacctgtgaacaagaaggtaatccatctagtttcaccgaggtatatttgtacttcagaaatagaaaactaaaagaatccaatgcattatattatttgatgcagattttggcagctccagctttgcctgcacctcaaagaagtacaccacatctgccagaatttcaggtaaataacctctccccacccacatcagagagtatcatcacattagaactgactcatagctgaatgatactgttttattattctacaaggatctcatttcttactgtcgcaggaatttcatcttcaaacaatggcaagggctaaccagcatgcagagacatcttcaatagcttcaacagaagtgtctaagcaggtctggagcttcttttcactcccagaaaagttgtatgtatacataaattgatttcatgccatctgatattcctctgttttccacgcagcataatgatcagaagcatcaccttactgaaccaaagagccctgtgctccaaacaatgctaagagctcgtcctactatagcaaaaactactgcagaacttgagcaagaggaactggagaaggcaccaaagttcaaagcaaaacctttgaacaaaaaggtactacaactactgaactggtgtagtttaatactgtttacttcatttctctctcttaatctaacttgaaatcacatcaaatcacccagatatttgaaagtaaaggagaaatgggtatcttttgcaacaccaagaagcacataacgatacctcaagagtttcactttgcgacagatgagaggatatcacgaccagaatctgtcttagatatattcgacaaggtatacttcaattaacagaaccactgtattctttagtattttcctctggatgtctcggtctttgacacaatttttcttttcagctctcactgaactccgaatcttgccatgaaaaacctctaccaaggaacactgctccaaaccccttcaatcttaagacagaagtatgtgtacaacgaacaacctctctaaggtccaaatgacttgccaccaatctttgctgaccgttctttgaaaactacttttttgtggaatccaggaaagaggcgctgagaaagagaagaaattttatatggaactcatgtataagaaattaggagatgtaaaggcaagagttccaaaggcaaatccatatccttacacgacggactatccagtggtatgtacatcctaaacttcttattttccttccttggttttgtttttgtgttgcagaagagagagatggtgttgataaatcttacgtgttccaactctcaggtaccaccaaaaccagaacctaagcaatgcacacaaccagaaccgttccagttagagagtctagtaaggcacgaagaggaaatgcgaagagaaagggaagagaggaggagaatggagacagaagaagcccagaagaggctcttcaaagcacaaccagttataaaagagtaagtgaccttcccttttactatttgtttatctcccgaatctttatcaacgttttcaaaatgctcacaatggctttgatcacagggacccaatccctgttccagagaaagtacgaatgcccctcacagaaattcaggagttcaatcttcatgtagagcatcgagctgttgaacgagcagattttgatcacaaagtaagcattcttttcagtcatttcagcaaacaaaagaatgcttcaataacctctgaaattgatgaatccattctattttggaaccagatcaaagagaaggagaaccagtacaaaagataccgtgaagagagtgaagctgcaaaaatggtatgtaacattagtaatgcctagcttgaaaatatactctcatgaactttgttcaataatatctgccaacttcgtcaggtggaggaagagagagctctgaagcaaatgagaaagacaatggttcctcatgccagacctgtgcctaacttcaacaaacccttcttacctcagaagtccaacaaggggaccacaaaagcaaaatcacccaatcttagagtgattaaaagaaccgagagaagaaccatgatggctcgaccaaccatctctgcagctactagcgcctctgctggtcagatgagatagttgtttgcagtaatgttttctgaagcagcctgaaatgttcatgaatgcttgaacctacattttcctttgtaaaaatgattcagtactaaattttcctgtaacctgttcttactaatatagtacattgtcttatgtatcctggttcaagttttaataaactgaaaaaaaaaactgttcttactaatatagtacattgtcttatgtatcctgattcaagtttattaaactgaaaaaaaatacttttcaataaaacatgttttatgtttgtgtcttaaaaccacgactaagaaagcaagctcgagcatatcagtctaattcattcacactgtttgaattacttgcttcaacctcttctacgcgatttgctttctccggtacactacaatctgaaaagaaatccaacaaaggaagtttcagaaggcatcactgcaagagacatgtttctagatttagaataaacgaattatagacactaatattagtgacagtaccatatatccattgctcgaaatgcaatcaacttttagctttgccacggtctcatcatcttgcaggctttgcatcttctctgttgaggtcttattcccaatgaccgtatccccatctttagacaccaacaattcaacctcttcagccttcaattttaaatggcgtgccacatactgttcaacattcagataatacaagaatcaagttccatgtcactgcaacaaatttggtttctaactctcatctccacaagtggagactccaaaattataataccagagggagagaactcacttcgcggagttgtttaactagcaaagtgggccggaaacaaagatatggctcatgtaagtttagtaaaccttctgtatccagcgagacaagcttaagatgaatatccaactgcagaatagatttatgtttcttaaaaccaaaattgtaaatcataaataatggtcaacaaagatcattttcttttgttacctcgacactattaccctctaagctcccgagatattccacaagtcttttcaagcgagcatttctcttactaatagctccttggttattatttccttgccttgtgttactccttgtaccgcctcttccccatgcaattagttccgagttccacacaagcacaggtgatattactctgctgtccctctgatgcgtctgctctgtgccattacctgcgcagttatcgttgttgtttgcatttgaagaagaaggctgagttgctgaacgcttttttcgttgcctctcacaaggctcatctgaagaagaatctttgcctcttttgttttgatcatcatcatcattggcttctgatgtatcctgttcaatgtttctgcagttccttcttcttctggagccgccaccactacgtcgtgatctcgataagatcgctgtgcctttaccaacagactttctttttacaagggccttagattgtcgttgcgatacttgagctatagatgcttgaatctacaaaacaagaacaatgatgcacagatcacttagtcaccgtagaagcattctgatctacttaagtgagttagtcttatatgcgtcgggtttctgacctgcttattacgagcttcatcatcttgacgaaaattcaattcctgaacaaaaatgaaaggcatttatcatcagtaatctctgttaagtaacccttctctaaaactgtcgaagaggaaaaagaaaagttgatgcttcacctcctcctcaaatttatcaatatttttgaataaagctgctattaaggcatcaaagtttgggtcgtctcttaaagaacgtcggcttgcacaatgttttctgcaagtaggacactcattgttcctgaaaatgcatttgccagttaatataatacagaacaagctttacattagactccctaaagaatgctgaacatgcaaatggaatgcataccccaatctcattgacttatcaatgcactctcggcaaaaccggtggagacattccatcacagtccttgttttccttataatccctaggaaatgaaaaccagtgctggcatcagtcgaatttagtaaagatagagtgaatgactatgtaaaaacagggtaatgagaaaagttggcaagcctgaacagtctacaatgactaccagctttatgttggttgatgaaagtagctgaagcctgatttttcttattaggtagttaaacattcacaataatggtgactgagaggcaactgaagctgattgactttgtaatataaatgtggagaagagtacctaaacatatcgagcattgcacgtccttacagatatccgctagatcaacaaccatatatctgcaagggaagtcaagactttatcaaataacaaagatcaccaactactgtgttgcctactataagaagtctgtctcagtcaaaaacttatgttaagctaaaaagagactaatcaacacagatcaatcctcggcatttaaacacaacagtatcaataacatgcaagcaagaaccaaacaatgcatcggatcaatgaaaacaaaacactgaggacatcagagaccacatgttccgcttaaaacctatcaaacacaacagtgaaaccaatcatcagaaaatgtcgaaagggaaaagaattgttactctgattctgataactctcctgctgaagaagattgacttctttccttagaatctgaaactgttaataccaattaaagactttcatgttgtacatactaacgcattgattgattcatgtatctcacatcacatacgtatataaatatatccacgactataaacaagagcaaaaaacgaaactttcaccttcttcttctcctaacgcttcctcatcctctgcttctacttggtcacgtttcacgtcgtcttcctcatctccactttcgtccttctcatccattttgtctggatcttcttctttctccacagcttcaggattgaatctttcagcttctgagttccgacccagttggtcatcttcttcctcggcggcggagaagctcttcaaggaaggcattgttgattgtttgataacagtgatctctgcttctaggaagagagaggaaaaagaataaagctttgacctttatctctccatctacgtctctctcttgtgggcttatttgtatttcctcgttctttgttgtttcggttcggtgccgatggaaagagagaaaggagaacaaaggaggacgaagaagaaagagagaaacttctttaccttttagcatacttatattattttataatattttttttttgttaattatattaagatccttgggaaaaaaaagtaaaaattatactaagatcccttatactaaaatcttattatacatgttgtgaattcttaagctaaacctcttattttctcacaaatccttaatcatatttttgtttttttggttcatactgacgcgtctaaaaagtttggactttcaccataatttttctaattttacgagataaaagatacaatatacgtttttgaagagacgtatattatccgattaccaaacaaaatcaaaattagaggatgtaattcacttccaaaagtgtaccacgcgtataattgacccgtctctacttctgcttggatatcacatacttagtttagattttttttttcgtaaaaggcaaaatatcaaaacttatttaggagaatttgaccacaaaatatttcatatgtatttctaaactaatataatttcttcttattttattgttactatattttttcttttttttgtaagttagaaacctattaaaaacactatttgggtgataagttattgaaatttagtgataacttttttcattatggtagattgtattagttaaagtaactttgatgatagatcttagttcaaattttttttttgtttctcatagtgtttgtagtaaatgatgtgttattgacttattgttaaacatatattggatatataaataatatatcatttaatatgtattgtcaatagctagctcaaaactacgaaatattggaattgaatacaaatgatattgaattgaagtaacacaacattgtcggccttcttctcgtgtgttagcctacttgccaacccaattccattatctccacactttgcattacatgtgacacatgtgtgaagtgtaaataatatatcaactatcaggcatcataattctttaaataaatcaagattggtaaaaaatattacaataatttaaacttttaacatttgttactaaaaatatcaacgataacacaatttacaaacgttaataaatttgttacagacaaggcaatttttattttcgaaaacataataaaatacattgggccatattaaatcggcccattaagttcactataacttagaacttagaagcctttattgcttccctctcaatttccattttttttttggttctttttttctttctgcaatcggtcgtcgtcgttgtgcttaaacccttaccggaatggagccgccggcgaaaggaacggtgacgccgttaggattttcagaggaggatgttcgaaaagcagcaagttacatggaggagaaaatcggagagaagcgagtagagatgaatcgtcttcaacagtacgtcgacgaaaacgataatctcatcaatctcgtcaagaagcttcccgatcagcttcatcacaacgttatggtgaatttttaatcctttgacttcctctccttatgattcaattttgctcccgtttaatgtagttggtgcttttgtgtaaacaggttccattcggtaaaatggcttttttcccaggtcgattgattcacaccaacgagtgtttggtaagtttcatgatgattatatgttctctcttctcgatttcaatggcaggatacatgtaatttgattctagtatcgttttgctatgaggtttaagagtaagctattgaggttagtgtaaatttcaaatttaaaggattatgttttgtgatttcatataggtgttgttgggagagaattactatactgatagatcatcgaaacaaactgttgatttcctgaagagaagagacaagactttacagtctcaaattcattctcttaaagctgagattgaagatcttcaaacggaggcttcattcttcactacaactgcttctgaagtagcggtaggttttgctgaaagagtggatcgtgtgttcctttttcttgattctgcatatgtatcttaaccggtgttatcattttttataggatggacttgttgagataagagaagagtatgtagaagaagattcttctgcacctgttgtgatacattcaagtgaaaaagagccttgtaatctttctgaaggagagactgaagaaggtgaacttgaagacgatgactttgcaagaatcatggccaggttgaatgaacttgaaatagaggaagaactggagggtgaagatggggatagtagaggtgaagatcctgattcttcagtagaaagtgtggaacagatccagcatgatttggtgaaaggaagtagaggtgagacagaccgtggtagggttgaatacgggaaacaagaaactaccatatctgttcctaacaaagcttccggtcatagctcttcaccgagggtctcagaggtattttccaaggaaatttaacatctgggttcatgtttatggttaatgggttttcctaaagtttatttacttataatccagccaagggtcgaagccaaaattattcaagtgttaccagagacacatccacacaaagatctagatgatccgctgaatgtaagaaaaccccttcactttgatgttctctgatttcattagcgttttacagctccttctcagatattgcctgttattgcagcgtatccgaccaatggcacaatatctttccaaaggttagcgttatgatctaaagcatttcagacatcagaaaagtgtcaaattaatatattcaacattgaatcatcttcctgaaaacaattctctaaccaacatctatgttcttttattaccagaaggtcaatcacgtggcggaacccctcagcaaaacgctgaaacatggaaagactttcgaacgaatgcaaaaaccaatgttttaggaccacaaaagattgaggtatttagatctatattcgaaatcaagctaactaccttgcattatggacatgttttctgcaacaaaacttatcattcacaagcatctcacaaataatcatgccaactttttttgggtgcagccacagaagccagagcccgagtttgattctaccaaggttacatacacatctctttcggccaagcgttagcaagttgtatagttgctcagatagatctgattttcctttaagctcactaaatttctgatccaactcgtgcaggcttttactggatcaatcgtagagcatgcccatattctagagaccagcgcacacagccaaacgcaggtactttttaatcactcgaactacacaacactcataaatgcaggaaacatgattcttattacattttttttgtttgttatcttgttatatgtcaacagtcttctacgtctcaaccgtctaaaccagtgtcgagattcagggcgaagagaaggtagccagtcagctctgtgtacaattttttgttgagttgcctttatgatatgtaagaagtaagaacacatgcaaatgtgcgcaaccttgtaagcttactctatatacagttaattaacaaaatctacataaaaaaatctgacattgttacttgactctttctaaaaagtcttgaagtagcttctctctgtcaaatggagacgctgacaatacccatctactaaactccaatatctccatgcctttaaactcggctaacatcttgtacttctctcgtttttgttccctatttgaagaagacatatcctcctcttcactacaaccttttctcttctttttctttcgatccgcactgttaccgtctccatttaacctctgagatgttgatgttgttgtctctccaatgttgatgatgtcttcatttcgatgtgcatacacaatgcctatataaagagtcacacaagcccgaccaaatattgtaaagacttaagaaaatgtagtcaaggatagatgagcacagatcagtcttattcttacccaagtccttaaggataggtttctccatttcgggtttgtaagagcacatgacctcttcttctttttcatcttctgaaacacctgtctcaagcagtgatctcttcttattctcatcgatgttactatccctatgcaactcaacaatatcgctagtgaagagcttatcagagagatcacggaacagatttgaaatcccgaatagctcgccttgaaactctttacagtcctgatcacaagacaccaaaacattagaatagcgaacaatctctttaataaggctaataaattaaagactgtatatttctacatacctggacgccttcaaagtaccttgtctccattttccctgcaaccgcaatgtttgagagctgttgtttgtatacttgtcttgtataaactagttcctcaagggaaccagcactcaacaaacgaaaaaccaccacatgacgtttctgtccataccgaaatgatctatcttgcgcttgcaagtcatgagacgggttccaatttgggtcaaatataaccacacggttcgcgctcacaaggtttagtcccaacccaccagctttagttgatatcagaaaaacctgacacataaaagctcatttaatcatcagatcagaagtaggtaagaagaaacatgatctctatcgaaaagggttcggttaataaaaacctgtttgctaggactcgcattgaaatcatccacaagagactgtcgcagattagttggagtagaaccatcaagtctagcaaagctataaccttttctaattagaaacttttccagtatgtccagcatcctgtaatttaatggatcaaaagcttgcaacgacaaatattctcctacattcatcaaactaaatccaaaaactaacctgacagagtaactgaatagaagtatcttatcaccctttgaaatccaagaagccatcaacttctccaaagctctcattttcccacaatgtttaacatcactaaggtccatgaagctcttgcttgcagatattccgcctaatagatcaatatctgtcccaaacactgtagatacaaactctgcgtccttcttctgtttctctggctcatcttttgggtttggtttaataagctccagatgattgcttatctgctgaagtttcataaggcatggaagcaccaagcagaaaggacaagaatcacaaccatcgtggttgtctcgatgaaggtaactccagatggttccatcaggaacaatccttctgcagcactctgattgcttaagcgggcttccacaagcgcatggattgtccttattcacaaggcactgaatttctgggagttgaatcattctttgataaacccgtctctgcaattgactcatttgacaaaagactacattatcttctttccccatcatgagatgcccaatggtttcctcctttgtcctcctcaacatatacttacggagaagactgcccaaatgctgtttcctcttatctgcaatctggacaaatctttccggagcagtagctctctgccctagcttaagtggttcatcatagaagtctcggaaatgttcacgagtgcctagtgatcccggtgctacccactcaaaaagattgaatagctcactgatcttgttctgcatcactgtacccgtgagaccaatcctcttcttagtcttgatctcaaggcatgcttcataaagtttcgatttttcattctttaaccggtgtgcctcatcagcaatcactatctcccaattaatcccggacaaaacggggccttggattcgaaacgtatcaaagctggttacaagtacctcaacaccgcgtgccttgagtttctccagaatcatatctctgtttgatccgtggtacaccgaaaccttgaagaagcttgcccatcgagaaaactcactctcccagttgtgaataatcgaagatggacagattattagtacaggacccttatcagactctaaaagacatgactcaccagcgtcaccgtcttttccatacactgcagcaagaaatgcaattgtctgaatggtcttgcctaaccccctgagtcaatacttattatcagagttccattatcacccaaacataaactattacagctacagattcaaatgcacaagaacattctcatgtaagaagaactcacatgtcatcgccaagaatgccaccatggttgtttttatagagattatacataaacttcactccctctcgctgatgttcaagcaatctacagttgatagaagccggtacctacaacaaaatcataaggcaaattcaaataatttccagaatttgagaagaaccatcaacacttgagttccattaaacatgagcaaaagttaaagactttggtaagaaaataacatgtatgatcggaatctctccaattgatgacagcataagtggttcataaggaccggaatagtcaaattcagcccggcttaacccgggtctcccgaattcaattgatctctcatcgtcttcatctacttcttcttcgtcgaacttgatgtttcttttgtgatcatcttcgttatgatcaaaatcttcgacttgggtttttgagattttagattcgtgctttgagggtaaaaagtaagaatcatcgagacgcagaagctgctgcgagagcgacgatttgggaggttttctcgacggttccaattcttgtgtggatgaaactcgcaacgatgatgatgacggaaaactaccacagggcttcaatgtctctttgaaagtgtgtaacaacgacatcgctaatcgatcgcgttgcgagagcaaaggaaaaagacttgcttttttcgagaaactgaaataaagtcgtaatatttagcaatttgaaaacttacttgctgttattctaatttgaagaaaataagaggctagaaagggaaatacattatacatgtgcagttttaatgggccaaatacggatagaaacgaagcccaaactgtacttgtggcagtaataatgggccgagttcgaatagcatccaagagaagcccaaatattatttgtttccaaacatgcttttaggtttagggtttctcgtgcatctcttatatatagcaatctccttcttgataacgccgagaaaagtcaccatttgtcgattcaacccaatcttggtttttggtttttctttaatgttttggtgaattatttgattttcaagaggttttgtgtagaatatgatgaaagttgtatatcggtgatggtcttttgattcatatgatcgacaaaaatttcaactcgctacgttctttctgattcttacaaaagttggattttttatatttttgtttgacggttttggagaattctctcgacgtttttgtttaaattggatttgtatcttttggtattggaaaaatagtaatgctggagaaatgatgagaaatcagataaatcttaggacaccttctgacacagattctgtgtatgagaatgacatcatattctgatcttcagttaaatttcttttttcgtttcaaaaacaagtttttccgttctgtttgtaattgaattttatggttttgaagataggttaccttaattctcggtttattaagtggataattcaatttgaatctacggatgttcttaagctgcaaagagagattgtgattctgaggcaaccaaatattacaattaaaccttataattacaacggaacaacaatcaattttagaaggaataatgaattc

SEQ ID NO: 8 - DNA, 78259 bp, Arabidopsis thaliana
atcctattataatcataagaaacaaattcctcaaaagatttaagagaaaacactgaaacctactttgattagctaaattttcaatctaaaaggccggagaaggtaactctaaacgctaatttcgtaggaagagaagaagagtagttactttacgaatcatgcgaccgatggaacgaatttgattcttgagagaggaattcttcggttttttctccacgcgcaatcctttcgatctccgactagttcctgccgtcgtcttccgctctgcaactctccgcctcgcatatccgccgtgcgccatcgccgaagtgatgatgaccaaaccgtgtgcagtcaccaacaaaagacaggttttaagtttctaaaacgctgcgtttctcacaaacgttaaaacgttgcgtttcataaaaattgtaaacagctttccaacagacttttttttcttaataggctttaaagcccaacgtcataactgtctttattaaacatgataaacggtagcataaaatctagacgaaaaatcaacattgttagacatgtaaatcatatgttaatagatttttgattattgggtacagaatttgtggttgttatagctacatgcatttatatatgtagtactattcaacttttcttgttgttacatgatttctatacgcttgattcgcattaatcacacttgttctattcatttgttccttgtttagctatcaccattcgatctcgtatatgtacccaacccaagtactgagtaactatttttataaatttatccaagtacgagtgaatcaagtatttatttttttagaccaacttttattctctacatatacttgaatcttgggatacgtataatataaaccaaccctctttagattttaggattgtatttttgtgcatacacagaaatctgagcatagacaaatggatagaaaccacatttgctttatttctatagagtttggacattttttggctatgattttgtaaaattgttgtgtgctccgtgttagcgtttgccgaatgtgacactaattttgatcgaacaaacaaaaaactgaacataaattaattaatttgcacacatgtttaacatctataaaaaaattaaaaaaaattgcacacataaatatagacaaatgtttggaataagtaaaacatgaatccaagtgttattaaaatcagtattttgttactacaattgcaccaacaaaattgtatgttcaaaaatttagcgcagtacgaatcattaataacttgtccctaactactaactatattcagatgtatgcctaacttgtaaatgttactcatggttgagtagttgaatgttgaagagcttacgttataattaaatgctcgctttgattgatgcaaacaatttcttcactataataagcgaaaataatagaaataataaagatggaaaactaacaattaatagtagaactatatatatatatatccacatataaattctttttttttttgaggggtggtttaaaactagctatttagctggatgctcggctattcggatttgtgtaaaatacttctaaatattgagcaataggtaaatatagtgaatatttaaccatgacaaacaataaaacacacacacatcagaggaaacttgggaatgaacgtgaacaataaaaaaaaaattaataatgataataatagtgggcatagagatggttcttcaacgaattatttcttgcccaagtagcaccgtttggttagaaattcttcgacatttatagttcaattaaaaattactactccataattttgggtgacttaccacacaatctttccacaaatcttcgacacgcaattcacaacagtatcatagtttattatcacactttagtaatttatgccaaacctcactacgcaagcaaactatgattcattagatgtgtggacaattacgacgacagcaaaaaaataatatgtgtggacacacaatgacaaactcacattgaactatcttgaaataaatttatactaaatcgtagcgaatatataatcagtaaatagaagttaaactgaagatcataatcaactaaaatgaatatcgtaatcaaattgatgataataatgatttcagacacaataatggtgacggtgttgatgatgaaaaggatctgtggcataacaactgattgaattcaatgcatcttcatgggttttattccgttagctttatctttcacgtctttatattctttaaactttgttatgttattgacatttaaattcatttgtatgcatgttatgaagagatcgtataactacaaaaatataaaggtaaatctttcattttaaaaagaaaatgtttctatacgtgtaaataattagtaaataacacatatttcctcctgcgcgtagcagttcaacaaactctcttcttcgcgtagctagaagctgcaataacataaagaaatgatatatttataaattatgtgaaaatgaaaaaaaatattagtccgcaatatccacgtatcattatgcgccacgtaaacaaagtggacccagaataacccttgtttccagtagaaggaatcaatcagtggcaagaaagaaaataatgaatttcattaaatcgccactctcgagccatcaaagtatcaaacaattgattggagttagttgtatccttcgcctacaaatttttccttactctgttttataagtatataatagttccactaaaatcattttggatacaacctcaatagatctcagcgtattgtttcctgtatgttcaatgaatccatcctccatgcaatctggagactggagtataaaataacacgtatggtatggtatttatttctcatagctagttccttaacagttggaagaatttatacatgacccggccctttaaaacctatccctactacaagacatttgggttactttccatcgacttttgaatgtgcatcaggcatgaaaatcctttaattatgcatattttataatcaatgcttaaattactataaacacaaaaattgtagtgatatattagaaagataatttaaattgttacattgaaaagataataaaaaattataaatagacatctgatataaaaatggatgaagtatagcatattaaaaaaacatatgtttttggtcaaaacagaatcaatgcatagttagctcaccgctacaacaataaccatagggactacgtaccatccataactacattttcttaaattgcatcctctttctaaaattttgcctataaattcacaataacacttcaactttttaggccataagttatctctttctctacaataagcaataaatctcacctcccttttttttttttttgtctcgctacttttgattatcatttaaaaccaaaaaacctaccatgaatgagaatcacattcaaagtgatcacatgaacaacaccattcatgtaacaaacaaaaaactcccaaacttcctcttatccgtacgtctcaaatatgttaaacttggttaccattacctaatctcgaatgccgtctacattctcatactccccgtcggcctcctcgccgcaacctcctcctcctttagtctcaccgatctcacactcttatacaaccaccttctcaaattccacttcctctcttccactctcttcgccgctcttcttatctttctaaccaccctctacttcacaactcgtcctcgcagaatctttctcctcgatttcgcttgttacaaacccgactcttctctaatatgcacacgagaaacgttcatggaccggtctcagcgtgtcggtatcttcacagaagacaacctcgctttccaacaaaagatcctcgaacgttccggtcttggacaaaagacttacttcccggaggctctcttacgtgtcccgcctaatccttgtatgtctgaagcaaggaaagaagccgagacggttatgtttggagctatagacgcagtgcttgagaaaaccggagtgaatcctaaggatattgggatacttgtcgtgaattgtagcttgtttaatccgacgccttcgttatcggctatgatcgtgaataaatataagctcagaggaaacgttttgagctataaccttggtggaatgggttgtagtgctggtcttatctccattgatctcgctaaacagcttcttcaggtaattatttattcaatgaatttagtccatcattacaacttcacaactttttattttttgatactaagattcgctttcaattgaacattctgatataagaaataaaatcttgtgacaaagagaaaattaaattttatttaggtggggaggttgggacttttctagttttctcacgtcatgtcgttatcttataaaatttggttactgattttatatgaaaaatggtaaaatctctagcttctattattactatttatgaaggttgtgccaggcttattttgtaggtaggtggtagttgtgaaaatttgaatgactatagattgtctttatagcaactacatatttggtatacaaactatgtgtcaatgtgtgtgtatacaatctatgtgtcattttcactatacaattacacgagaagaacttgacaatgatatgaaagaccaatttaaggttgggattagtcaattataaacattgattaaggtaaattatattcctttttttggtaagtaggtaaattatattctagtaagtacctatgaacagttgtacaaaattgataggtgacgtgtcatgtttagttatattcaatcgagaaaaggttgttgaacaatatcaccgaaaacaacaagtttgtaaagagtataagtttcataaataatcaatacacgtaaggtcttacgtatggtgccaatgtgccatgcatctgattttttttttttttttggttctacgatatttacttttccaaaaaaattgtcaaatggcgaaaaaaaaataaaattgtcaaacataaattatttttatttagaacaatgaaaaatagcaaaactgaaaacagtttttaaaaatacgttaaaaaatagacatacgtacacatagacattcatcgatttacatacagtatcatttgtcttcatatttttataattatatatatgcatatgcttttagagtcctaattttgtaatgaattgtaatatggactaataaatatgcgttaagggtcctgttttttttttttttattgtaatatgcatgcaggttcaaccaaattcatatgcactagtagtgagcacagagaacataaccctaaactggtatttaggcaacgaccgatcaatgcttctctcaaactgcatcttccgaatgggtggcgccgccgttctcctctctaaccgctcctccgaccgctgccgctccaaataccaactcatccacaccgtccgtacacacaaaggatctgacgacaacgcctttaactgcgtttaccaacgcgaagacaacgacgacaacaaacaaatcggtgtctcactttccaaaaacctaatggctatagctggagaagctctcaagacgaacataaccactctgggaccgctagttctaccaatgtctgaacaacttctctttttcgcaacactagtggcgcgaaaagtctttaatgtgaagaaaataaaaccttatattcctgatttcaagctagctttcgagcacttctgcatccacgcgggaggcagagcagtgctcgatgagattgagaagaatttggatttatctgagtggcatatggaaccttcgaggatgactttgaaccggtttggaaatacttcgagtagctcgctttggtatgagcttgcgtatagtgaggctaaaggaaggattaagagaggagataggacttggcagattgcttttggatccggttttaagtgtaatagtgcggtttggagagctttgagaactatcgatccgtccaaggagaagaagaagaagactaatccttggattgatgagattcatgagtttcccgtgccggttccaaggacatctccggtgacatcttcctcggaatctcgatagttaacttttttaaattttctttcatgtataatactatggttcacatcacatctatctcaaaatcttcaatccatatatttttgcacgctaaaaaaaatattgtacaaaagataacggaatctcgaaggggtttaaagaaaagttgtccatcaaatatgtattgttcaaatgctctttgtttaaataaaaatttggaagaagaatgatacaatggcgtctacagaatcaaatgatacaatctaagaacacttttgaggcttacaaaatgaagaaacaaacaaagattacaagaaataattactacctaccgatctgtggttcccataagcttacgaagcttcaggcccaaaatcttggccgtaaatctaatcttaagaccaaatctttctatcttttctcttttaaagcttcaaagccttttaaaggcttgagctttgtgaagaagtgtaagtacctgaaggagattggtttactctctctttttccgtgaaagaatcatttcatggaggtctcctgcgtttagacggtctgaaggagactcctcagtgcactggtgaaacacgtcaatcagaaatctcattgtgtctaagtcagattcggttagatcaaacacttcagagagcttgttcgttgattcttcttcctctgtttcagagatcagtgtctctagtttctttggtagctttggtcttttgccattctggttaagagtaagatagaacaaacttattaaactcatgatgttaagaagatttcgatcatgtaagtgagagtgagacaaacctgtagcgattcatgaatctgaagctcagataaatcaaaataaggattttgtagtgtcaacaactcgaagattaagcaaccaaatgaccagatatccacttcctgcgaaaacaaaagcaacctcataagagaaaaggagtaaagataaacgttgacgaacaagagagtcagtgtttggaggaacgtacaagtccataaaagttttgttcgtgcattgctctgaagacttcaggggacatccaacgtggtgtgccgacacagatattaggaggaggtattcccacatgggcaatacagcacccgtgcaagtgagacctaagcggaacagctctatcaaaatcacaaagcttcacaatgggttctccatttgcactttgattgtccagatcgatcaaaacgttttcgcttttaatgtcacggtgaattatatcctttgagtgcagctccatcaaagcccctgagatatctcttgcaatagacaaagctagatccatggggacatggtgcttaccagcttcggagagcttctcaatgtgaccctgagtacaataaaaccatttagaaggttctgattgatgttacaaagactttcgatatagattgagtaaagaaagaattttacctttagagatcctcctttgatgtgttccatcagaatagaagattgcaatactcgatgttcatttccattttctgaggttatccacttggacgatatctcatgtccatataactccacaatgcagtcatgtttcaaagctcctaaaatccgtacttctcctaagcatgtatactcaaaagtcctaatgtcatctaaggaagctccagaaacctctaatgtgcgcatctgaggaaataagaaactattcagtaaatttactcattcgtgaaacagatagagattacaaaaggtaaaaacaaaaccttcacaactgcttcagttgagcctagcttgcatcggataagactactattagctctttcaactccttttcccgttgacagagaagaaacagaacatcctggttccaacttttccttaatgcgaatggattcatttagccgattaaggggaatgtacctgtggcaatcagaatatacaacaattaaataggtcattcacacaacagtaactttcaagagattggtcatataagataaagtttacaattataaggagaaacatggcattttcacatcattaacctaaaaagaaaagatcattacagtatgcaacaaaagatagaaagattcaagagtagagaatctagtcgacagtggtaaatacaagataaaatcgcaaaattttctacctgcagaaatattcttgatctgtatcttctctgatatcatgaggacgacaagcatcaactaccatacgaacccacgaggaaccttgcttcacagggacaatattccaggcatgtggcatgaaatctagatagcctctaacaagttcacatggtacaggaggctccatgcgatcacaaaggtactataaataaaatataagaaacaagaattagcaattaactaaaacgaaaccagatggtcagatatccaatagcattagattaaactgagtaccttcataagtaaggccctgtgcctacagatgccaaattgcagtttacctagaggaaccactatagagttccgcttggacttaatagaacgcagagatttttcacacacatcagacaaaattgcatcttcagccgttgttgagacctgtttgttgagagcagccaagtcgtcttggttcccggtcaaacaggtgcaaataaaaggtttctggtagtttgtaccagacactgcctttcgggttctttcgataatagcagttctgtcactccccccaaagtgatccgaaacaaaaagggcaagaaatgatgcaacttgcaagttgtcgatggaaacttgatctacatctggagttaaacagttcaatttcttcaacctagctaccaaggctcgagcagagagagtgattgcatccaacacttcatcctttgccctttaacaaaaccaaaacaagggcaaagtaacatttagctcatggataaatgattattctagtcgatataactgaacgtgatagtaactacctgtccaagagtatgacttcacgtgaatcaagaggcaaaactttctcatatttactaagagtcataaagggcctatcacgtccagcatcaaaaaagccatcaggaagagaatcttctgtgctgcaaaatgagttgctgctgtatttgcgcgataaattagtaatatcggtagatagtttatggcatttagagccttttgggttatctagatacttctcactacatcgcttcgacttgttatttggcttctttctctctgaagaagaattatagtctacagtaccaggtgcatctcctgaagagggagaagatgtcttgatctcacaactttcatagttatccctttcactcgttaattgggtttccacacattgggaattgtcagaaacaacatcagctttaagactgctctcttcctcttcagaagtaatgacagaagcctcctcgaacagtttatcattctcatccgagcagctgttatcaactgaacctctgtcagtgttctgaggaaccttcatgccctgtttcccagtttcttcgacttccatcttcagacttaaaccttctggagggacttcccctttccatttcctgctgttgttcaagcgttcttgccttgccctttgctggaagtaatattgtctccgcttccacctcttacttgattttcgagccgaaaagcatctactgatggaagagattcccgttgacatatttaatgggttacggtgggagcctgcatccacgtggaaatagagaaaacgtaagacgataaaagttaaaaagaaagaagtatcaaaatcttactgttatatgcatacacagtatggatggcaaaggaaaaaaacattaaactctaacctttatgaggaacagttatgacgttgttctcatacggggtttcaaatacatccatttcaaccatagagctgctacaagtatcaacccccatctcttcatagttcccttcaaaattacattgtatccatgtgggaatccagcaataactcgggagcttattgtacttgaaacaaacagaaaatccaagaagctctatcagatttaagaattcatgaactcctgtagaatatatatccatatattacagcaatgctatgaaacataaatagaaacaagtacccgtaaatttaaaatttgaagtcgaggcatcaagtttagatcgagaggatgcagagttgtcaatcggttgtttgatacgtccaggctttctaagttttgtaataaagctaataccggtgatagctccatcagtctgttgtgagcaaccttcaagaacgttaatgaactcagataacctatctcgttaggcaaactcttaatcttgttaaaggagagatccagatactccagactcttaagacatccaatctccgggggaagatatctacaaacaagtgggagacagggttaaatgcaatccaatgtaatttgaagcaatgaataccctaaactcaattctaaagtccaatcgatttcacaaattttcttcataacaacaatctagatatccaattaaacatcaaaagtaataaagtacaacaatcacctagagcatgctaaaaaacacatcattaagcagccaccaaacgtatcacaatcaataattttctaacttacgtttcctggaaattctacacggaccaccaacagaaactgtcaaaatccaccacatgcttgagttatcaatgctacgtagtattaagaagcagcaactaaagcaacagagcataaaggagtaagctttttacctaattgagaagtgacaaacagagagcctcgtcaaacacttgagcccagaaatctcgctcaaaagggtcaaagccgaagatcgtttagggactttagtaagctcaagctccttcaaacccttaagcttgtcccacgataaaccgtcgccaaaacccggtgacgatatcttgacctgaagatactccaaattcaccaaattccctaactccggcggaaacaaatcgatctcgttactgaaaaacttaagcttccttaatctcccaagccctccaatcgatttgggaatcaaattgaatacattcctgaagaagtagagacctttcacagaatcatcgacattatccagaagagaaaactccagattttgaccagaaacatcaaccacggagtcatcttccaaacttaaaacgctactaatggtagaatcactctcggaacccccatcaatgtctgcgtcttcgattaaattagcaggctttttgatcttcgaatccattttaatgcacccaatagcttccgttgaagtaccgcaacgaatcagagacctccactggatctccgagaaatcgaatcggagaaaattcaaaggttttgaaagtggataattaggttaaacaggcggaaattctcaccgagatctgtaaggtgaggacgagaattcgaagtttaattgaacatggttaagaagcccgagaagaagaatcgagcccagaagctatggagagatggagaaagggaggcgctacaaatccatggaaggagagagagagatagagagagaaaccctagattctcgacaagacgtataaccgatatattacaaacgtatctgaaatttgtaaaaatgtcttctttacaaactcatcttaaatcctttcacgcgcttaaggaaagagttaaaaaaaaaagaaattcttgagaatagtaactttctgtaatttgggttttcctctataaataatggaaattcttttaggtatagtcgtgggattaagcgggttattgatttagtttcttagatgtgaaggttgtatactttgtaagatcattttaactttcgcaaggttaacttttccgaggttatggaaaatatttggtttaagactccataagctcaattcgttattacacaagagaggatacctattaatggattgaaataaaatctatagactgaaagctacattgttaaaaaaacatataaattggataaagtaattaacgtctttttggtatttttttcttatttgaaccctaaaccgtataaatatatacacatacggccccaatccaagctctcctatatcgaaaaatatttatgggtcgaagacgattctctgttcgttcaactcttgtaccttcgctttcccttctgattcttctcctctttcgtcttctatctctttctgcacatattccgttggaaggatcaattcaagtgccacttccaaaacttacaaggaacgatctaaccctagtgattgttgtgtacttgtgtttgcgttggttgtgtattaactctagtgaatccataacatcaattgcaatgtttcctcatgcaaacgcaaaacgcagaaagtacgagattcagtcaaaggctaacttttggatggaattaggtacttacttcaactgggtgtggcactgggaataagttgatggcgtctgggttaaaaccgaatccactgcgaacaaaaagaaacgtgagagaggaatgtgagcggtgttctttgttacaacatcgtgatgacaagtagtatagaagaaagagataagtttgtttatattaggttggttaccatcgggaaaaagctagttgccaaacatatggaataaaaaactcttccgggtggctctcttgttcatatgagaagtgaagctgagtaaacatctgcggtaacaaaaagaaaagtggaagaaagataagagcttttaacaactatagctaccgggaaaggattcaaatatttcagtgatggatatgtgtagaggttgcttaccttcatgccttcacctcgccaagaccggcaattgttgatgatgaattgaagaactttctgcactgaccattctcgatctgatctttgagaatccatgcggctgttgaaaaagtctaagacctatatttgatcagttaggcaagtgagaaacaaatagatcaatcagaaactctgttctttctgaattttaagaggaagtcgtagctacaaagatcaaacgagtaaagcctatgcagcatactgtatatatattttccaccagttcatggaaccgtggatgattcttgaaaggttggaacacttcttgtcggtgcataatcgcatagacaatctgcagaaaccaagaatcagagcaggcaaaactagaaaagatttttgcgattcatgctgctgagaaaaataagtgatacctcaggatttctcggcaatgcgtacgtcaaaattgcatttaatatatctaggacaagtctcaggaaatcagtaaagatctgcaactctgctgcctgcagttgccaagatacatgtaaaaaagtgtaccagaaatcaaggaatagcaacgatcacatgaaatattcttgtgcttgaactaactatgtcataccagatcttctgaaacgccaacatcctctccggacaagtttattttgatactttggagcttatcacctgttaagtccgataacttgttatacctgtgttaaacaattcatgatccgttatacaggaatatgtacaaaaacagatttatgaagtcataaaaagacgaggaactaattgcatactttcgagaaagcatgtagaaaaggctgacaagcctctgtgaggcatatgcacttaaatgatgggcatgaggtgccatgttagccaacgtagcaaggcaagtagtctgcagatacacatcctgtaacagcccaagaaacagaatttgtcacaaaagttattttgatatctggctaagattttaacgtgacatcactcttataaagctgcacctagcacctacccaaactgccaaactaaaacgaatttgtctgaaaaaaacattttcattgctaagatatgaatctaaagccatacccgaagtttagaaaggttatgctgcactgttcttatgagaataatgaccattaaggaaccaagagacgtctgatgaaggagatgctccttgtaccatggcacgcttggcagtatctattcaaatgacacataatcagaaacaatactgaagttgagaaaaatcgtttcaaccctatgattggaaatagcacgtaccatcttgtgaatgcttgaattgaaagatgaatcctgactaagtatgagaagtacaattagcatcatgtatatttgattagatgatgttctctttgaagcgttatacagcgtctccaggatgggcatcaactgtccatcaaaaaatattaaagcatagatcattaatatgaaactataaggacttcatcttaagggttagtaaaacagaggaatggatttctacttttaaggacaatggaacaaaagaatgaaatagacccatggaacttattgagaggcatttatgaatcataccaaagtatccaaatcagttcgcaccaacacatactccttaaagtcggaattcccttgcaacaatgagtagaggagcaagacggcgccctcatcagctaaaaacctacattgccagattgcgttattacacagtagcatagaaagcattgaattaagaatttgatacaggatgcatctctatcaatacaaaaataaattattgtagagaaaaagctcaagaaaatataacttacatgccgagagtatcaaatagtgaagcaaatggtatccgaacatgtggaccagcagggtgggcatttccctccacatctgagcggtcaactgcaatcagagtaatagtttagataaacacatcgaattcttcttattcagaataatgaagaaaaaaaaatctcacattcaacatctctagcatttgctagagccttgctaaaagtattgtcagaggaaaatacatggactttagaaactgattctgaggtcgcactgtcatcacttttatccgtcatagactcatcactcatgatagacttgtgatagttaattaggataagtaaaacatgcaggctgcactccgctagtggatttttagatccgccactgttacttacaagatagttcaaaggcaagagcactaaacttgctgtatatgcaacagaaaagttttcatgagtacatggactgtttcatgtagctagttaggaaaacataattgaacggaaagtcggaaaggcaatagaaaaagatcaacatttacaagttagtacaataatacatcatatatgaagtaatatacgaacacctaccagctgcagaaccaactctctctaaaatgccttgtgaatctccatcagaatacatataggattttgcatttggaggagtacggtgtcgggaaatataattaagtagcaaccttctgactactagagaaactagagacttttcctgaaaatcgttgaaccaaaggaaatggcggaaattgatatgaggtaatatctatgctaaagacaaagaaaaaagtaattaatttggttacctgagtcattgctgcatcaataaaagggttcgcatctgttggtccatgtgaaggtccagagagaagctgtgtcgacattgtaacaagcatgaagttgagaagttcctgatgtagaacatacgagttgggacttgccaaataaatgatgaaaatcaggagaatgaaacatctaatactgaaacatataaggaataggtgatatagagaatcagcattggcatacctcacttcatttgatccaatgaagctcagaacactatgcatgacaaaattttggatgtcttgatctgccatcaaaacactcttaattagccagcttagaaataccttaacgctggaaataactattatgagagtcattacccattacaaatccatgtggaactggttcactttcgtccagagaaagatgcaactcctgaagactgtcactttttccattctcaatcaaatactttaaaaagacggatgaaatatatgttgcattaacagctttcttatagagagaagactgatcatctgaagcttgaagaagctcttgcaaacaccaggacagatgaatcaatagttttgcaaggtgcctagtgtagccattactttgtgctgaaacaaaaaaagaaaataagatcatcctcctactttcactaggtcatcatcaacattcaatttcattagctcaaagtgaattcgacaacacatcctttacaatttcaacactaaccgaaaagttcacaggcttgttgaacccgatcactaggccagcgagaactcaacggaagctcaagtagcttgttccagaaatcagacgctaaaggaaacgatttctccccaacaaaagtggcaatgaggtactcggccaccgaaacatcatcaccaccggtttttcgcggcgttgaaggcacacctcccatgtctcctaagccaagctcgccgagtcaacaaggatccaaaagagaacgagtcaattgatcgcgtccaccgagtcggttacgatgaagaacaacggcattacaaagcaagagatgaacaatgcaaagatcttgctctcaatttggtctctctcgatctaaatctgagattaattgaagattcaaactgttaaaccaaatgcttcgataccaagggtttagacttttgagcaaaaaaaaaaaagagaggacgcgttattttatttgtttatttatattataatctttttcttttaatgttggaaaactattattcctgcgtaagtttatttccaaattgattttttgatacaaataatttagcgactaaatgtgacaatttttgattattcattccatcagcacttgtaattaatgaagttaaataagtgttttcctaattttgaaaaatacaggctacgtgctaccaaattaattcccaccaaactctcataaatatgattcgaatactttatgggttcttacgttttctcttttacaagagcttatataatattttctgtatagattaacctcaaaccaaatcttgactttttttttgaagttaacagatgacttgttctattctactagagaaatgaaattattatttactagtctacgtggaataaaaacagagataatggatttgggataattcaaacgaaatggagtcaaattgatgctagctactaccgtctttgaaccgtcggttgtcggtggagtgggatgtggccgaatcttttttactgtatttacaaatttgaggcccatttattttcttgggcttttcatttcttcaatgattctagaactgaaattgctcaaggtattagttcaaacttaatcgttattgggcttttccatatgttcaatattcttagttatgtttaattaaaaatatatgcacaagtgagagaactcaaatgatgaacaaaaagtaataatatttagagaaaaaactaaaagaggaacagagcagaagtggaagtctcttgtccctctgtaaaccctaaaatagaaaagcaaatcacacttgggggattcatgttctttggctttcttacaaacctctagaaataatggccgagaaagcaggcaaggcaacgaatggtggagaagcagagaaatctctaaaggaaaaaggaaatgagttcttcaaagctggcaactttcttaaagccgcagctctctatactcaagccatcaagctcgatccttctaacgctactctttacaggtttccttttacttgtcttctacagtctttcgaatctgattgttgggtttcattctatttgagctgatttctcagaaagatctgattttgttctcttgcgatatgtttagaaaatgagattgtttaggtggagacaaattaggcttttaacttgaataatagtattacaacatttttgttatatttgggaagatcaattgtgatttagaatactaaaagttgaggtttttggttttaaggttctgtgaattggaacagtgttatgtgttaatgtgagtagatttttaaagtgtaataaagctttttgtttatccggtgcagtaaccgagctgctgcatttttgagtctagttaagcttagcaaggccttagcagatgctgagactaccattaaactcaaccctcagtgggagaaggtaaaatcaatacatgacaatgtttttttgtgctttcggtttcatcatcaataacataaagtatctgtgtgtgtctttacgtaaacgatggtttttctgatctatcttcttcaggggtacttcaggaaaggttgtgtgcttgaagccatggaaaaatacgaagatgtatatgtttctcttattttggttccatctaaattttttctatcacaaagctattccatggtagttaaaactgtgatgattgtatctcaggctttggctgcatttgaaatggctctgcagtacaacccacagagcacagaagtttctagaaagatcaagaggctcggtcagttgcagaaggagaaacagagagctcaagaacttgagaatttaagatctaatgttgacatggccaagcatcttgaaagttttaaatctgaaatggttagtcctctttttctcttcttgtgaaattccagagaatcagtctaagccttcctcgttgcttatatttgattgttccaactcagattctgaatttaacacatgcagtctgaaaactatggaactgaagagtgttggaaagagatgttttcttttattgttgagactatggaaacagctgtgaagtcgtggcacgagacatctaaagtcgatactagagtctatttccttcttgacaaagagaaaacacaaacagacaagtacgcaccagctgtcaacatcgataaggtattaagggcatccaacttgaatcttatcaaaaatcttttttttgtctgataaaactactttgtttccctacttcaggcttttcagtctccggacacgcacagtaactgctttacgtatctgaggcaatacgcagaagagtcattttccaaggctgcttgcttagtaacaccaaagagtagtatatcctacccacaggtgaatcaaatctgtctttttctaagcttgttctttctggtttgtatatatggactgacggttaaacgatgtctcacaggtgtggaaaggtgtaggctcaaggaaatggaaactcggaccaaatgatggaatctttgttcagtttgaatctccctctcttcggaaagtttggttcatatctagctcgaaagaaaagggacaaactttgtgcaggttctttctctaaaccacttattatgtttagttttgcaatgtgctttaagaatttgatgaagtacccttgacttcacacaagctgttgaattttcttgggtgtattaaagaatcaaacttttgcatctaactcaagattaaaagagttggagttttgatttcagggaaccgcaagctctggatatcggcgcacatgagattctccctcgcattttcaaggagaaatcgaaaagctcgtagggcattgttttgttgcagtatgattctctatatccagtttttgatcaagactaaaaagataaaaaagagttcttgcgagtgtgtgctacttagaaaatccacctttttgttgtatcttatctaatgatcaaacaaaactttgaacttttgagtcaaaaggctatcttcgaatcaaaatctttactcgaccgggctaggttcaacataggtctgagtaggtcttaaatcggacggtgttgcctccaaatctgtacatgccatcaacaaatctgggcctctttgtaatgggccaatttctataacgagctaagcctgttaacaagtttcttcgaacttctctctcttgtatttgtttgaaggaaatgcccaatgagacaaacactaattttgatttacctccataaaggttttacataagcatatatggtaaattggtaataaaaaaaaaataagagagccacatcatcctaattttacaaaacgcccctacagctgtgtaataaaaaaaacaggcggggacttcaggagagggctctctttactctattttacatttttccttttgtatatttttacaaataaatcgatttatttatatatatcctattgaaaacccctaacgtgaggcttaagcaactgagatgcatcttcggtgacccacatttcttctcatcttctgtcgtttggtctcttctctccacacatttccaatgtcttgagcgatgttaacggcgtctactgatgctccagccaacccttttctcgtgaatccggccgcgtataatcccgatttccctttccacgcgtttggaaacggcgatttcggaaacccatttttcgaaaagaactcactttcctgaagccaagaagggacgttgctacgataaccggtggcgagaaccacagcgtcgatatctagcttctgaccatctacgagctccacgtggtgacgcgagaactgtttgattgcaggtacaatttctacgtcgccggattttatcttctccagagcaccgatgtcaagaaccggcgtctttcctgtcatgcttttaagctccattgggccgatgtcaggccttttaagcccatagtttgataagctccctagaaccaaccacgataagataagcagaagcttgtctacgagccataaaggtagccacttcatcatcatcactgagattccaaatgttgatttccccataatctccctcggtaaaacatgaacctggtcgaattaaaaaacacaagaacactattagctataaagtttcatacaaaagttatgctttgtttaaaaacagaattatcagttttgttttgcttaccgagcttctaacgaccatggaagtaattgcattgtggttagcaagatcaagagagacttccatgcctgagtttccacatccgacgacaagaactctctttcctctgaatttctcgccggacttatactcacaagcgtgaatcacttctccgtcaaactccgtcataagaccattaatctctgggacaacacgttcggcgttttctcccgtcgccaccaccaaccaccggcaaatatattccatctcctctccgtctgaggttgttctaaccctccatagcccgctagtttcatcaaaccgagcagactcaacgcttttattaaactccggtttaatatcgaaccggtttgcgtatgactcaaggtaatcgatgaactgtcgtttcgttgggtattcagggtagtgatccgggaagggcattttcggtaattggcagaatttcttgggcaagtgaagcttgagcctatcgtaggttcgtttttgccacagtgacgctatgcaatctgatctctcgaccacaacgaatgggactccttgatcatgtagacaagctgctgtagctaaaccggatggaccagctcctacgataaccggaccgttgacccaaacacatcgccgctctgagaaatattcttcacttgccatgagtctaaacatattctccattttcttgagtgagtttttgaatgaaagcaagtatatgttttgagggtgggttttgatcgatttgaaagtatatgtagtgaagttgaatgttagtttttgttgtattatgagaaatgagatctattggtttggatttggagtgagaagaggagtgtctatatataggggttaagagttataacgagactgcatgtgatttgcgcgttctatggatttgattattttattaatgtgaataatttgtatgcaatattttagttaggacctaacttttgtcatatgcttttgcttaaaatgcgaaataatttaacattctttacgttttttgtataaaaaaataaaaatattcgattcttttattgcaaagtgcgactttgattagagtaaatctcacaataatccttaactataagctgtattattttatcatttcataatctgattattgatagtatgaattttgattcccatcggttttcgttaccaaatttacttgaattttagtgatgtgaaagggttataaattggagagtggaccaaaagataatgatatgatagatacataacatgtacgcatcatccaaaaaattgatcgtatggtccagtaccatgagcttcagtatgatcatactcacgcgaatgaaattgatgagtcttaatagtacgtacgtgtgatactgataggttttttagatttgttgatcgaaattagaatttgagatgttattttcttcgtggtgattgaattatatggtaaactcaacctgacatgcaaattgctaaatttagtttcataaaatgcggttaaactaaaataaagtgttaaaaacgtatgaaaataaaataaaattaagctctaagtgtggaacctaaacgaccattgtagagaaactagagagtgtttccttttacttttatttttactttaagactaaccttttttcttaagacagattattcaaactcttctcatttatattggatttatataataaatttgacaaactttttattttttttgggcaaaactatgacaaactaatattccctccaccatatatgattgttattttctatggccaaataaaagagagtttgaataacttgtttgttttagtttatgccaactatctccacttaaaaataagccaataggttaattactaacctatagaaatcatttaatatctccgagttaattcaatcattggtcttataaatccacgtggcacgtcatgctgacaaatactaaaccacgtggagaaggtgatgatgagtcaagagcgggtcctaattttgttggcccactttttaattttttactcacccgccgactacctaaccacatcaaatcaatttgcaactttcttaattttattattgcagctatctttttattatttttgcaactatatcattctcttttgtccttttaagcaatttcaagttttatatcaatttccactccctgagaacatttgtataatctccaaagggaatagttggaagtttgttacatcttttaccccacttgaatacttgattatactttagtggatcttattaaaaatattaatatcacttacatggaaattggaatacactaaatttagttgaagactttcattggaaaaaatgaaataaaagttggcactcatttccttaaatgcaattgtataacaactttttttgttcctaataaaaagatatgttaataaaattagcattcatagtattaaatggatcataaacgtacctaggtctagaaactcgtagaattcctcaaaattcgtcacatataatatttttgggaagtacagtatatatgcatgcatggatgtaatccactaactttaaattagcaaagatgaaaaaaatattcatggggaaatgacatagacatgtgcacgaatcggtattcccattaggtaagtactagttttagtaattagagtttcattcatccgaatatgaaattatatataaagacttagatcaaaaagtaaatatctataaatatttacacgatttggctgtattatttgcagctatttacatattgtatatttgtatgtcgtaatgcaagttctacgtactgacccgtttctcctcgtataaaattctcatgtcgtaaagttcatatgtattgttgtcatgatataaaattgtttgattattcgagaatatggaatcaagcgtacgtaaaatatgagttataaaatgaaaagtagacgtaaattataaattcgaaatagtggagaatttcactaactatatacgccgacatacattcttctcccacagctttgtatgtacagacaaaaaattattttgtagagaaaaaagcaagtaaatcgggctagtgaaaaaagccatttaacaaaaaaaaaaaaaaagatcgtgctagtgaattccgttgtaaacaacaactatcgataatactataaatatataacgttgctaataatagttatttatgagtgtaattcatccatcaggatttgaggttggtggtacgtcagcaataattttatatgagccaatgtatagtgttgcataatttattttaaaagcagaagagtactataatagtgtctttgtatatagatacattattatttttaagttttttggttaggttcagtgatcgtctctctaaaaagggacccctcggagatactccaaaaggcttttgtattgatctttgtgaaaattatccctttctttgttttattttatttaattatatattaaacctatataatagtatagctgtataattgtggtggttaagatcaaatttgcaacaaggacatatatatgttcacatgactcttacccaaaagctgctcacagtgtatatattaaataaattatgttcttactaataattagaaatctcattctaagaaatgagataagtagaataaaagttacttgttaattctaaactggtttctaagaacattatattcttgtaaaatagagttctagtgggatttaattaatgatgcagtaagtttagggtaatgcatgtgacatgattaattatttatcatgaattttgccttaaccactgctcgaattcctcaactagaaagtcaaaacatatgtgaaagtagtattttataatgcatgtatctacaaatcgatacgtacacacgttgataatcaagctaatacgtagtatttgagttagagattgatcgctaatgatcaaacggtctattctgagcaaataattgcatttttagatacatttttaattggccagtgaatcacaatcgttgggaatgtggcaaaatatttgatttcgaattaaatgatttagttaattaattaattcattgttttaagataagagtattatctataagttagttgatttgtcaactgttagttaattaactacttcaccaagaaataaatcagtgacttaagtttatactaagagaagcagaaaacacatgaggccacatgaaactcccgagttttgtttttctcttaaaaaacgagaacagctttagcgttatatatatatatggccattagatatatagtataacaacaataataagccgttaagtatggttagtgttgtaaccgactaaccgtccggtcaaaattaagaatgttcagtcaaagtagttacaagttcattaatttctaacatgcaaaaagtatcacaccttcttctttgactaattattttccacataaaaataattaatggtcataattaattctatagattaatgttttaattcgtgactagaaataaagctacataagcttcacggtataactactggattaaccaaatacacgttagtaaatcaaatttaataatagtcagacttttatttacttcgtatcatcgtgattcacacggcaaattctaattaacatagttttagttaaattattacttatttttttaaagtttaagttttaaattttcgggaaaattattattatgttttttaaaatgagtttaacacttttttcaattggatggctttatttcctttttttgttcccctaaggattaacggtcacataaggaatttaaaacctggagcggacgctttttccccgcttcaagaaggagcgcctccattacaaagtggaagctattggtggaagagaatttggctctgtggaagggcaagccaatagaaggtattgtggagcaagtgcgtgatgaaagtaccattcgggtttatcttcttccagagtttcaatttgtgcaagtatttgttgcgggagtctaggtaactaaacttgtttccctgcatgaaaggttggcatgttaacccatcactttggaacacagtcagcgattcttctcatttcaatgggaaggcgaaccacaaatgcaagtgttgttgagacagttccagatgagccgaatggagacttgctgcctctgcagtcccgtctatgtaacataagttttcgcacggatatacacagtggaaggcaagacactcaattcaaatcgcaaacaaataacgttctttagagagaagacatgaacattttgactaaaaagtcgtatttattataaaaagtcgtacttgatcggatcctaatgagtaatgaagttgttccttttctgaagaaagtatgtatagtcaagtagcagagtatctctgacaaaaatttcaaaaaaaaaaagagagacaacaaaatttagtaatatctaagagaaaaacacaaacaaagagcaaactagtaacaataacaaagagcaaactagtaacaataacaaatcaggtactgtttgaagatgtttaatccgcaaagacgaactctccaaaatcccccaacgagaaaaagagttttattatctttttgaggggtttaacaatctttttttcagaaacacaaacaaaaaggacaaaaataacacatagcttagaaaggtgaaggaggaacttcgatggtggttccagcttgaatctgaccccaaccaatcaaacgccaatgcttttccacacgtctgcttagagccactttctctcctttgctggtacaaacaggcgcagtcagttgcagtttagccagatcgactttaactcctacaactttggctccagtggacatcgaaccaatgttgagcatcagaatctctcctttcgttagctttgacactttcccttgtttctctgatccctttgttctcactcccaacaaacgtcgtagaagaaagaagttcacctacagattttacataaccacaaattaaaaggagaaaatacactaagagacccattaggaccataaagactgaagagtatggttgtgaggagttgtttatacctcgagttcaacaaatacatcaggaagtgaaccgatttcaccaaggacttgaccaactaatcgatctgcacgagtgagagttgggtccattgttgttccaactcctattagacctccaggaacagcaaactgaagctcgttctgttccgcgtagagtgaaatgatgcgagagtaaattggagtgcattttgagttgccacgctcgtctttggtaacgataccaggtcggatttcgattaattggttgactctcaaaacaccctacaatatacatgtagttaagagatactgattacaccatataaagcttgatgtacttaagaggcacaacaagagaaagggagagagagagaatagatacccgtaggatacttccacctgcaactccacctttgatctcatcaacctcataaccaggtttgttgacatcaaaagaccgaatcactatcatatttgggggtgacacaaaattcctctcagggattgggatcttcttgacaatgtactcgcacaccacatcaatgttgtatttcagttgtgctgagacagggacgatcggagcagcatcagcaacagtgttctgcaacaggatgtgaaagaaattttagaaccaagttcttcaatacttagcttaaccaagtgacgaaatgagaatgctacaacagatccttaagagataagaaaacctaaccattataaatttctgaattgcctcgtgctgattaatggcaacattctcttgaataagatcaatcttgttctgaaggatgatgatatgcttaagttgcataatctcaacggcagcaagatgttcagacgtttgtggttgtggacaagtttcatttgcagcgattaaaagtagtgcaccatccatgatggctgctccattaagcattgttgccatgagaatatcgtgaccctgaagaatagaacaagaatacattcaacaagaatgaagtagagataagaaaagcaaaagatggaaacatcaatgaatacttctccatcaaccctcactctttaagcccttcacccaattaaatgagagacccaaaatcatgcaggtggagcacaacaacatcgataatacacaataaacgaacagctcattgacacatgaaatggttatacacttatactatcaaatgaaaatggtaattaatgaagaataaagataacggtaaaactcatcataccgggcaatcaacgaatgagacatgcctcaatagtttcatcttggagttttcaaatccggggacatcacaattgggagtgtcttcctttccacttccgtaggccctaatacaacagataagttgttagaccttgactcaaaccttatagtagaagtagaagataaaaacactgttgtaagaaggactcacttgtagcacattggtctagggcatttctcatcctcacatttgtaaatcttggcgtttgcatatccaagcttaatggtaatgttacgctccaattcatttttaaaacggacagtctgtacagagaagataaggaaaccatagaaatcacttcacccactccaattgatcaaacgctgcaagctagaaaagcctctaggattacaattgtgaaaaccgcataatcaaattttacctggacaccagaaatagctttaacaacagtggactttccatgagcgacatgaccaatggttcctgaaacataacactatcatctttagcttataggaactgccagtttcttcaacatcaacttatataaaagactcaaaaaagcgttacctatattaatagtggcctggcgagaaatgacctcaggagacagaggatgtagcacagttacatccaattttttaagatcttgctcagccaaacccttgttcctcgacattatcaaagattgaagcttctgctcctgcttaaaaccgagcatcaaatcagaaccctaaccctagttaatctgaaaaagactacttctcaggtttttctacatctgccctaatcaagtcgacacacagattctatacctgagctccgttacctaaatatcacaataatttcgattcgcaatctaaaaaaacattatgattacgattagattccccgaactaatcttcgtgcgatagaaatgggaacaattaggttgaacaaatattgaatccgtaggagatgtaattcgagatcgaaacgaacctgagcgatgcgaaagaacaacggagaaggtcaaatttgagagataaaaaagagtgagaaagcggcgcagcttgaagaagatgcacaaaatggtttttttttttctatccaagtccctaaagggtttttggtttccttcgcgtaaccttttttttttttccctttctaaaatttcttacaaaataatgaaatactagtatttaattaaattactatcagtagagactaatttactttttctatgaatcaaagtatcaaacccaaaacatttcatcatattaattttatgtgcagggccggcccgactaaatttaatgcctaaaagcaaaaaacaatttggcccaacataaaacacagttaaacaaaaaaaaccataaaacttttagaattcgaacttgagacagacacctcaagtgaaaggcctatttgcgatcgactataagcgttcgtgttcctctatctctctcgggtttgtcaatttatctttccgaaccagttatgaatttgtttttttttggaaggttttgaagtctttgaatctcggctgttgaagtcagaaacgttggttttaaaccaatatcaccaggtgtaatggagtttgattgagtcccaaattttttaaaaaaaaatcactgaaaagagttggggcaagtttataacaaattaagtagattaattctgtacaacaacaacaaaggatcttcatcgtgtagaacttgagccgtgaaaaaaaaaaaccagataataatcttgggtctaaaatggagaaaaaactttgaaatggggtcaaataaataaatgaatgaattggtgagagagaaatcacagaggttttgcaagaaagaaacaaccccacaagaagtaaaaatttacacttttgtaatcttctttccttttggttcaagaaggcacccctcccccactcagactaaaaagaaacagaggaagagcttttttagaatccgagcttctcactagtgcaagaatacgaattctgggttttccagtagctctttggccggtttgacactcgcaaagtctttttcgtgcatcgaattcgaaatctcgtctattgagaagggaatgctgcgaacaataaaccggttttagtttctactactgatattaatctttaagaaatgattcgagttacctggaattatcatccaacaagaaggaattgctgtcggcatcgttggattcttctgtcatgagcgcacgcatgctcgatattacctcttgagacacacttcgggtgttatagcagtcgtcccagtataatgtgcatatccggtaaagttgttggacactaaggatctgtaataaagtgaaacaagaaagccattaagtatggagtctaggcaaaaacgtgtttctagaaactaagaaggagctttaccgggcaaagatcatgtactatatcatcgtatgatactctgtacttctggtggataacctgataagttacgagaggagaagtattcgtttttgaagattcaagaaacaagagttccacaagttagtattaaacaagagtaaaacataccaggaacccaacagcttgtctgatgtgtttcagttcatcccaagatggcccagcatactgcaaaatcaaagaatgatataatgagccgaaagaaactttttccggaaggaaaacgtgaggtaggaacttacttcattgacttggccgcaccacaattctagctctgcaagcccagactttacaaattctccattgctgaatgtacaacactctttacgcagtagaaggctattgtaagatgttaaggaaaaaaccaagtaagaaaacactagtgatcttggcttatatcttccataggaatttgagaaatatcaaccataggaaggtttgtactttgacgagtatcgatgataaggtgtgtagaaaccattagatgtaattctcaagtattatttacctgttaaatagttgcacattgacgaacgagaaagtttgagtgtgtatcttctggatgagtaccaaaggaacctgtacaccatgaaacatatgagaatttgaggatttgaaaacagaataatgtcatggaacttttactatttccttacataattatctttcaatatggcaagcagcgaattgagaccatcaataatgctctgccagtgaatagcaggagaatcttttccaagagatctagcagatctttgtatccctccttttgaaattctcggtgcctgaagttcaaagttttgacagaacaggacttgttacaatagtaaaacacatttattatcaaggtgcaacgcaacaagcgagtggtcacagcattaggatacaacaacgtaaagtcaggacaaaaatatatagctgcaaagagagaagtcaatgaaacctgaatgcacatagatattaaagctgagagctctttcttcaagttatccctaatcatcccaaatattttctccacatatgctgcaagctgttgcttgaaaagcagagccgggtattttgcctccactgggcggatcaccgcaagagcagcagcttcagccgcagcagcaaggtttggtgatgagcggaagctctggttaaacaataagggaaaggatagttaagattcaaagtaaaagatccgtcaaaaagccctactaacacagaaagttaaaataccaaggccattcttccaaacaaggaagttgttatgggtggcttcttgcttgccgttgctccggcgccagcaggtttaagacttttttgaagtaaaaacagtagtgccgatgtgtttgtcaaccaatacgccaaatgaccattgtcatcttcattctgaaaagaaaaaaatttcagtagagcagcaattgttacttccaaatgataagacaaacaaaaaaaaggcttatactcctctccactagatgattagtgtatgataaaaggatataagagaacatacaacatatagtgtcaaattagaaagcaacggctagttgaatcctatctcaagcaggtgacataataagttatgcaaataagtctttccatgccctaggaattaacagccattttacaagacatacataagaatcctcattttgggacatatcagtatcttcataatggcacaaaatgcaccccaatttacctcaatcgcggaaccaatcatctcaataagacgatcaaacgcactagtcttctctgattcaaagcacttccagtgaagaagacacttgtatattgtaaatgcagcaataggtttcccattactgaaaccaatgttttccttaacacagtcgatgagagtatcaacattctcctgcaccggcagagaaaatcagattaacagagttacttgttaaaactgtttgcatatatagtataaagtgattggccagtacaagttgacgttctgcagcagatttcccagcatttccattgacctcaacttcctgaaaaagtatacttctcagatgaacaaaccaacagaaaatgcaaaagaaaaggatatgagaaatccaagagatcaagatagtagttttggaagagctaccctacattgaactggttttccaagtttgtacggtggccattttccagattctgcaaacaggaccaaaaagtttaacatcaagcacaagtagaaggtaacacaaaagaccatatgtttcagtatcttagaaacaattctaccttaatagttgcagttggaggatgccctgctacagatttcacaggagtgtttaagattgtttgctgaagcataatttgtttctcagtttccatgtctgaaatcttctcttcaagcctgcaaatgaaacatcagcttattgtctgaacaagataagtaatatattactgccactgctaatagatagagtcatgcaaacagtacctctgcatcgcagtcttcaacttcgctactttagattctgccgccaacgcttgctttagtctatcctgactaatcctggctgtttcatgaagttcttttgctgtctcatctatctttatctcaagagaactcaccatcccctgcataagataaacaataaagaggcaccttttaagcatagtttttcattcggtggaagattctgtaaacagtattaaccattaactatggcaagctacagatccaaaatcgagacccaccttcaacttttcattttcatttgtgagtttctccattaattcctggtcaactacaggaacctccttaataatagggagcacctcggaaactgtcttggcagcttcacgctctttaatgagtaatgcctcggtttctttgaacttattttgtatttcctctaaagaagactcatattttgcattttcttgctttttggcctcttccaggtcagtctgcagcgttgagaaatgaagagagggtagtttagcaattttgattacgtgcaggaaacccacaggaaatcagaggtcaatttgacgaggaaagagaaaactcaccctcattcgtttttctaactgtaatctccatgtcagttcctcaacttgcttctctagcttgtttttggcttcttgaagagctcctgtttctcgagcagcctgtgttaaatgaataacagaaattgtgttagttttcatgcaaaacaatatcttaagaagtcaacttcagaaaatagttgattttaaccaagtagtaagatgatcagacaaaagaagcaaaacaaaacgaagaaagaaaccacatctcaccatcttaagatttttgagttctttccgcgcaacttttcctctccatgcacattgtgtcgtgatggctgctttctttagttttcggtaatgcagccgagccaagtatacgcgacaccgggtctgtaatgtaaatgggttgtcacgattagaacgccacacagagaaaaactactattcatgttgttattcgactgttttcttggtagtatgcagtctaatgatgaatagtagtggtccatgagcagtcaaacttgacagcaccatacttcattaattttacaacatcatacctggattatggttgcagctttagtctgccttctgagacacaattcctttcgggaaaccataccacgcatacccgcttgaattaaaatagtagcagaaaatagctcagtgtaagctttcctggccagaaacttacgcaagtctctctggattttcaaagcagcagcttccctgcgcatgccttcgtatatacttctagcaagataacctgaaaaaagagtgacccataagtttgcaagttagtttgagaagtaaagtaaaaaaccaagacaaacaataagaagatgacaatctaaatacctctacaaactgcttggatttgtgtagcagaaatacgcagttggataaaagttttctgcgcaagatatgatcgcacttttctttggataatgctcgccgatcttcccaagatttcagttcttctagtatccaagtctgccatttgtccagccctaagaaaaacctttgatttaccaatctacaaaagaaaacgtttccaatctcaggtaactcatcatagaagcagactgaagaaactgacaaacaatattctgctaattaaagaaattacctgatatccttcaagtcccgccttatcaagaagcttcttgcaggcagctggctcattagaactagtaaaaagaaaagaggagtcagcaagacaagtcattgaaaataacctcgcattgaaggctatccgatgaggaagagacatcttacttcttgtccaacacttgtggagcaatgataccaaatctgttcaagaactcgtcaaagtgcttcctagtaggataaccagcacaactaatccggattgcctccatcactccctgaggtcagaaaaacacccaaaatacaatcaatcttggggatttaataatttttaggagaagcttgatatataaccgaaaagagatgtcattcgcaccccgcaacgcaattgctgtagaacgttttggttctcaaagattccaggcttcagaagattattaggctttatacatctgatataatgtggctccgttgtattgagaatctcaagcaatgataccaattgttgctgcaaaaaagcataaatatgaaatcagtaacattaagaaataaagattaaaacatgctaagatgaaagtggagaccaaaatcagactcaccttgaaacgggtacctatagaggagaattttgattgtttggaatcgtcagatactggtgggaacaaatttgcaacaaatgaacatgtagaagcatttaacaacgcttgatgctcagcaataacataatccttgttcttgtctagaaaaagttcagtctgatacgtgacctggaacaatacactcaaggttgttaaacgagatatttacaaaccaattattgactttcttgtatatcttttcaaaatcattttaaccaatgaacgcagcagataagcaaaagatgctcacatcaccagcataatgacaaatagtgaagtcgctacgagccaatttcggcttggtaaagcgcttgtggtttttgtatgtctggtatagtttctgagcaaatgtctcgtgtgttgatctaggaaacatgctgcaaaacgaaatcatcacgtcagctacatttctcttaaaacaaatataaaaatattggaaaagtaaattataagcagaacaaagcatggattaagcatctaatattgggtttcaaactcaccaagcttcatctagaagagcaataatacctccgggtttctgaaaaaaaaaacacaagcaaggattagcaattaatgaattgagagtcataacatacaatattaatgacattaacaacatcgatagcaatcaaaactaaggttaaaaaaagcatcactaataaaaatctaagagaacaatttgggatggcttagaagctttaggagcatcctaaaacatgttagttgccacattcaaagatcactgtgcatgaacgaaaatatagagataatcacagataaccttttctattaagtctaaaatatcttgattgtcaacaaactcaatatagctccagttgatctcctcttttttatactcctcttgctccattttaaagacgtgctgcatagtacgatgttacacaagttagaaaaactgcataaatgcaaaaggccaaaattgaaaaaaatgaaagagcttatttgatcaaaacctgattaaagtgctgctgaagtttctcattagtcaaattgatgcaaaattgctcaaaactgcaaaacaatacttgcaacagtaagcagtgggacaataaacaacgacaatctaggatccaacgtggtcataagttctttgacggtcacacagtcaatactttccctacagatatgtttcatcagtataattcatttatctaatagtagtccctttcgaatcacgttgagcagggtagagtcacaagctcaaacaacaataggaattagaaaaatctcaaccgtccatgttagaaacatcactgccttgacgatgaaatggatcagaccaatatagaacactatgtacaagcaacgacatgagacaagtttaaatttccgtatttatgttaaacaaccagaattccaatgtagacctgttattgttacgaaacacatctatgcaatcttaaaacaacaggcataccggttaagcacctgtttgtcttgaaactctcgaatccatatatatccagaacaccaatcaagtactttgaatcaggatcttgaccaattgaagtattaatcttctcaacgagcctgcatagacagaaaaataattagtataaaacagttctgtctaaatacaattcaaacttatttcttcaaatgaagagaattagctactgagaatgtcttcgtcagttgagaacagagaaactcaccagtcaaacaaccttgagtacatgacttttgccaaagcatctcggctaagaagagcggcttctggatcgagagtttttgtgattgtttcatcccgggttgccatgatacgcttgcatagagaatcctcaagtgacttttcattacacctgcagcaaaagaatatgctagtaaggatccccacttcagtcacatacagaagcaacccacttcagtctatataagtcaagccatttacatgagaagctcggcggcagtttttaaatgaaaccaagatttttcatctctgggaattgatgaatcaatctctgtccctttagcaaattcaatattcccaagatgcagaatggaagccacaacacggaaaattgcatcctaaaggcatgccggaaatgttaagaagttggtgatcaagataacatatcaggttttgctatgtttaacagatggaggtacctgctcttcggaactgatcccgacgacatccatagccttttttgttgcatgatattcctccgcatcattcatagcatccaattgtatacacttagactgattgagatagtggtatatcttaggatcaccaagcttaaacttcttagcatcctgaaagtagaaataagtatacattttagtacgctgagaatcagcagctacttcactggtcattttaaaagttaattttgatctaaaacttacttcttctggtgcagcacaaagcatgtagaaacaatgatagtttctttcgggatcggacacctggcaaacacgtgatctttccaacaaataagttcttatagcagctccagatatcctccccgattggtcaaattgaatctccacgaacttaccaaatcgactataaaatacacaaagaaataatttcaaacctttcacacacaaaaaaaacttaaatataattgaaagaatgcgaagcacagtacaaggaaacctccttacctggaattattgttcttaacagtctttgcatttccaaatgcttctaaaacaggattcgactgtatgaaacgtaaatataagaagtaataagaaacagatcaacgcaataagccaatctaggccactggaattctgaagttttggtattattatttactccagtttctaatgcaaaattaactctgagtctgtgataagacaaagatctgaccattctttatatatacaaaaaaaaaagacatgtgtaactattctttcacctctaacactttctgctcgacagtccttccttcggtagcagcacctcgccctcccatgaaggcaagatatctcataagcaactttgtgctttcagttttaccagcaccactttcaccgctaaccaagatagactgactaactccttcattaaccatctgtctgcaatagaatacaccaagcaaacagtccaactacattaataataacatcggaaagcaattattcgaagagtctgcgctaaattacctatatgcagcatctgcaacggcaaaaggatgtggactcagctcaccgagggaagcacctttatattgagtcatcatatggctactatatagatgcggaagtcttctaaacgggttaacagcaatcagtatgcttcccgtatatgtctgaaagtaaaacgaggattcagtcttacaacaaatcgtaaataacacggagatgcaatagcttctcgcttgtgcttggtacacatatacagtacatgtgtttctacccacacaagaagataaatctcagtgaagttactcacataaatctcatttatatcatatcttgattgcaaattctgaaggactccaggttcatgtaaataagccagccttgtcatatcttccaccccagatgcgggcgcttcaacatcttttggataaatattggaatctttaacaacgacctgtggtttccaaagaaaaaaaaaaggttttcgtaaaagcttctcgtgcttccaaagtcaaacacagattgcagaggaacaactggcaagcctttcaagtgaaatagcaggataatagagcacatacttgttttcctgaagcgcagagaactttgatctggtcaccgttgatctctacaacttcaccatctaaccatgcttcatcggggtcctccacccacacatgggacccaactgcagggttgaaggtagcaacctgcaggaaagaaagggtgtcaaaaggaaataaaatctccagaccagaaatgcaaacaagaactggttaagctatttcacttcgttttaacagttgtaaacatgatgttagaaagcagaacgtagcctcacgctcaaataacattacaacaaactcaaagcttcgaagattgcatctcctaatgtgcaatcaagaaacttgcatttaggttcaaatagcatatagaatttcggcttttaaggtaatttgaaaccgtagcaatgtacctacacgtctctgtaaccactagtagctaaatagagaatcagacaagttataggactaagcaccaaactctatcagacacgtctgaattgaagtcaaatctctgtcgtacagggactcaacgatgccatgactcgaaacagctcaaagattgaaaaaaaaaatcacaatcgccaaactcaaaactcatcatcaatgactcaattacaaaactcagattcaatcaaaaacgacatcacacgaggaaataaatcaaaacataaaccctatccatcatcataaaacgaaacgaatttaaatgcaatcacgaaaaaaaaaacatgaaaaacccatgaatgaaagaaacctttaccattattgtttaacgaataagaaactcaatgttattttgcttattctctggatctagctgaaatcagagcaacattgaacttcttctttgtaactaagccttccaatacaccgacaaatacaccgacaatgcgtatacgagaatgcttcaagaaaccagattcaatgcccagaaaaataaagggaattagcaaaaccgaaacgcgttgattcttctgattgttgtaatgtcgcaaactttctcagattataaaaaaaagtttcgttttattttggctttcgtgcttccctcttcccttacctcccccacctttgggatttgtttttggagaaaatatttactttaattaaaatgacagcatcataagtagacgttgaattatgacaattacatccccaaattacccctgtcttttctttgttattacgagcttgtatttcggacgcggaaaaactaattttgtccgatttcttacataacaaaaaaaatcaattatctaattatttgttctttttaaaatcagtagtaataatatacaactcatataacagtttttttgttttttttagtgagacatgttgattgatttttttgatacaacaggtgctcattatatgtaaaatcacaattctttaatttaaaacatatagtatccagattccctcgcagacaatcatcaactatcatccccatgtagcatatgacttagtaaggttccctcgcagacaataatatatgggccccttttatcagtgttgagtttttcttttgtcacaatatattgggctttaacgtcaagtccatatacggtcactttaacttgggatgaaactttttatctaactagaatcctatcgtttttgtggaacaaaatataatatacgttgcccgagacaaactaaagaatatttatgtgcgtttagctcgtacggttagaaaataaaaggtaaatcgtgtagtgttggtaagtaaaacttaaacatcgtgattcaacatgacagttgtttacgtattttgaatttttgagttgtgtgatgagagccagaggtctcacaaggcacaagtgggatttacgaggactatgaactggatgccacgcggcagtcattacaaggacgaagtttgtattattattattgttttgattttgttatttaacactggcatgcacaaagtctgcagaacaaaattaaagaaaaaaagaaaattaaagaaagaagcaagacatacaacccatgaaaccaaaaatgaaaatacaagtgtaacaaatgaaataaatgccgatatattattggttttttgggaactctaaaaaagcaagaagaacgttatgtacacaaggacaaggacagacctgcaaactcaagtccaaaaccttttctaagctctgctcgtggaaagcaaagggagtattaatttactcactaatcactacatcagtacattgtaatatttttattggggaaaaataaaatctatggtttataattacaaatttttataaaaatccccacttatcctgaaaactaaagctaaagaatatcaaaatacaagaattactaatattatagtacaataaatgttttctgaggtctgacgaatactcttttgagacaaaattgttgttctatagacctttgaggtttgacccgccacgaaggttgagcctgttcttttcattattcctcacgcgttagtctaagcgcgcgtgaataccacgtttatagatgtctctttcgtttttaattgtacagaggaaataaaatgggtcctactggatcaggaggaaagcaaaaagcagacggtaagtacagagcagagccattccattggttgagacacgttgttaaatccacgcgcgaccaggtgcgtgaagctcgaggctgttatgtccctttctccgaagttcccttcctttatgttctcttctatttattgaaaagctatcgttcgtatatttttttttgttgttgctaatttacaaactcaacctattattcattattcaaaactgtcatgataaaaaaatcttttaaaagttaaaattgagaaatatctgagacgtagtttaatattgtaagaaaatacaaaatccagattctctccttggcacgccctctcttgttaatgtctgctgcatacacaaagactctataactctatctttctctctctagtcactgtcttttcacttgtcttgtgcttttaatcttctccattggtgttgttatctctttgtttctaaccggtaatgactgaagctaaaaccggcactggcaatgagaggctcgtggtggagatagtaggggcccacaatctcatgccaaaagatggcgaagattcttcgtcaccttttgtggaagtgcagttcgagaaccaacgtctccggactaaggtcaaacccaaagacttgaacccaatctggaacgagaagctcgtcttccacgttattgacgtcaacgacctcagacacaaagccctagaaatcaacgtatacaacgagaagcgttcttctaacagtagaaacttcttgggaaaggttagggttttgggttccagcgttggaagagaaggagagtcagtcgttcagctctacactcttgaaaagagaagccttttctcttccgtgcgtggagaaatcagcgtcaaacactacatgaccacaacggcggagaacggtgagaatgtccgtcgggttaacaggtcgggtggttcaaagaaaagcaaaaaagtacagaacgtgagctcttccatggcgattcaacaacagcagcaacaacaacagcaacaaatttctcttcacaatcacaacagaggaaatcaacaacaaagtcagcagaacggtcaaggacagaggatgctaccgttttatccacaccaaagtgagataaagcctctcgtgataaccgctcttcccagtccaatgcccggacccggacccagacccatcgtttactctaacgggtcgagtgagttttcgcttaaagagacaaagccatgtcttggaggaacaagtaatggtcttggcggtttgagtagtcacaaggacaaaacaagctccacttatgatctagttgagcaaatgcagtacctttatgttaatatcgtgaaagctaaggacttgtcggtattaggcgaagtcgtgtcggaagtgaaattgggtaattacaggggagttactaaaaaggtgagttcaaattccagtaatccagagtggaatcaagtatttgtcttttccaaagaaagaattcaatcatccgtagttgagcttttcgttaaagaaggtaataaagatgagtatacgggtagagtcttgtttgatttaagcgagatcccaacccgcgttcctccggatagtccgttagctccgcaatggtacaagatagagaatagaaacggcggtagaggtaatggagagcttatggtttcggtgtggttcgggactcaagctgatgaggcttttgcggaggcgtggcattcaaaggctggaaatgttcacatcgaggaactctcatcgatcaaatcaaaggtttacttgtctcctaagctatggtatcttaggatatcagtgattgaggctcaagatgttgcaattatggacaagggatcaagtctcatgaggtttccagagctttcggcgaagcttcaagtagggagtcagatactgagaactgcaatcgcatctgcaatccccacaaagagcttttcaaatccttattggaatgaggatttgatgtttgtagttgcagagccgtttgaggattgcgttacagttgttgtagaggatcgtcttaatggtggtgcaataggaggacaaaacgatgtggctgttgggagggttcagattccgatttccgctgttgaaagacgaacaggagatacactggttggttcaagatggtttagcctagataacggcaacaataacaaccggtttggttctaggattcatcttagattgtcattagacggtggctaccatgttttggatgaggcaacaatgtataacagtgatgttagaccgactgcgaaagagctttggaaaccgcaagtagggcttttagagattgggattcttagtgcaactggtttgatgcctatgaaggttagggacgggaaatgcggtggaatcgcggactcgtactgcgtggctaagtatgggcctaaatgggtcagaacaagaactgttgtggacagtctttgtcctaagtggaacgagcagtacacttgggaagtgtatgacccgtgcacagttgttaccgtcggtgtattcgataatgcacgtgttaatgaaaataacaactcgcgggatgtgcggattggaaaggttaggattaggttgtctacgctagagacaggacgggtttacacgcattcgtatccattgattgtgttgcatccctctggagtaaagaaaacaggtgagcttcatttagcggttagattatcttgcggtaacgctgttaacatgcttcatatgtatgcgttaccattgcttccaaagatgcattatactcagccgttaggcgtccatatgcttgaacgtttgcggtatcaaacgctaaacgcggttgcggccaggctgagtagagctgagccaccattgggtcgtgaggttgtggaatatatgctagatcatgatttccatgtttggagtatgagaaggagcaaagctaattttttccgactggttaacgtgatttccggtttggtcgcggttgctaagttggttgaagttatgagaagttggagtaaaccggtttactcgacggtttttgttttggctttcttgtttatggttctgtttccggagcttctattgccgtgtttgcttctttacacggctgcggttggcgtttggcgtttcaggcggcggtctagatatccaccgcacatggacgcgcgtatctctcacgcagaaactgtgtttcccgatgaacttgatgaagagtttgacacatttccgacaagcagaggatttgatgttgtgagaatgagatacgatcgagttaggagcatcgccgggagggttcagacagtggttggtgacatggcaagtcagggagagagggtacaagctttgctaagctggcgtgatccacgtgctacgtttctcttcttgatgttctgtttattggcggcagttggattttacactgtgccggttaagttgacagtagctatttccggtttgtattatctgagacctcctcggtttaggaggaaacttccgtcgcgagggcttagcttctttagacggttgccgtctagagccgatagcttgctctagaacatgtcaagagtgtatttaactatttatcgtcttcttagattactagggactttagtttttggtacgatttattggttgtatgtatttattatgttttcggttaggttaacaaccggtgtttgaacacatgaatgaaagaccgaaccggttaaggcattgtaccgaacctgttgtgttaatgattaggatgctttgctgttcattacaaaagtttgctaactgcttgtagttttttcgtttttggtccccgcgtgatgaacttgttaagtgtgtaaaacaaattacacataagacataactcaattaatatacccctactgattcattaaatttaagaatttgccaacattgtatgaattgcgattcaatcctccttcgtgtccatgataagatatattacgaattattatagcaactaatttttcagataaatctcaaatattatttggatcaatcgaggaattatcaaaaattcaaaattatatattaggattacaaatagggttacagtgttctataagtttttatcagggtaaaaatatgaaataaagaaaatataagggtatgtttaaaattatgaagattgtgtttagataatcaagaacagggcatttccaattagagagaaaaaaaggagatccttttaatgtatcgcagaccatcctcagctatggcctcctgtttttccttttaggtatcttcgtagctcttcaccgtaaataatcccgacccatctagaggacggagccgccggcgaggaaattcaggcagattagatcggcgatttggccttgttttcaacgaagatcgtcttgttagggtttcgtccgcatctatggattctctgtcaaatggggtattgatatgaatttcggctttcgtgatgacggaatctatctggttaaacgatcaatcttctcctcggtcgatgataccttcagcaaaaccagtggctaatgtccatcgccagaggtcaggactagcttattgacttgagtttgaattatggattcttgtagtagaacctttttgatgcctttgaattatagaaactaggaactactttgttcatgtttaggagatccagcgttagatcacgtaattggaaggcttatttaggagatcgtttaaaattcggatgctaatttctgaattttgttttacgatggctatacaaacagtttgaagtgatagatctcatgtaatatagagttttggaaccctaatcttgttcacaaggacaattatgcggcttttgatgaatctgtgctagtttcagcagttaagacaagtagacaacagaatggcttggaagtgtatcttacttgcagcctataatttcatgttttgcggtgcccagactaattctgtcagctgctgatctggctggatcactcataatatggtttgagtgtgattattcaggtgtaggagtgtcttcaagttactagtccagagggaaatttcaccaaacacaaagtttgttccaagaaaacggtggggtgaaagccgatgtgatgctgattcgtcgtgtggaaccactagcgaaccagtgagagagcagggacttaatcttatttcttggtacctttcgttcgtcacttcttcgcttctctttttgatgtgatccctgcctcctttcgggcatctgaatgtaaactgcattccctacatgtagggttgaggcagagtcattgcagcatttatctgctaaatactgtcctcttgtacctcctccaaggtcaacgattgcagcagcttttagttcagatggaagaactcttgcttctacacagtaagtatcatgagtcgtatttgttggaattttttttttgtttgctaatgagtttttttttgtatttttaatcttgtagtggtgaccacactgtaaaaattattgattgtgagacaggaaaatgcttaaaaatattgactggccatcgaaggacaccctgggtggtgagttagagaatgctatctcttttctcttaacttcattgactctttgatttatcatggttactaggtagcactaacttgaccagaaccgtctctagattagtcaatcttttctcatgaaaatgatttctggtggctatctttgtcattggtgtcaattttgttatattttttgtttaggtgtagcatgttagtcaatacttgcaatgaattaagttgattttggtttgcttaattagataatttcctttgcgttatatctactgctttaatatctaatgttattaagttctctacaggtcagatttcacccgcgccactcagaaatagttgctagtggaagtttagatcatgaggtgcgcttatggaatgcaaaaactggggagtgtatcagaactcatgatttctgtaagcgccaagcaatattcttttgtctttttcctcttctactttttcatataattaactccgtccctcttcctccttcactaaacagatcgacctattgcttccattgctttccacgctggaggtgaattacttgctgttgcatctggtcataaggtatcttattccctttgaatctctcatgaaacgctagctagttgcaggtggcttatcctctcagaataaagtatctgatctaacggtctcttaaagtttgactaatgcactttttttttccttttgaagttgcacatatggcattataataagggaggggatgactcggcaccagcaattgtgttgaagacaaggcggtccctgagagctgtacactttcatccacatggggttcctcttctcttgactgctgaggtgagctacatattgaggattgagttaatgttctgccactttgtgggcttactctattaactataaatggcaggtgactgacattgattcatcagattccgcaatgacaagatcaacatctccaggttatttgcgatatccgccccctgctattttcttcaccaacacacaaagtggcagtcgtaccagtttggcagccgaactgccacttgtgccattaccgtatttgctcttgccttcatattctgcggatgatccaagaatactatattctagtggtactactggtccaaggaatgcacaaacaaggtttcagagtaatcaaagttctgtagaacatggcagcagaacaatttcgccttctcctcttcccatggctacgtctgctgatctttctggttcctatcatgtcccagacaactctgctagtaatacatttgctacccaagcaggagctagaaattctactactgcagttgatgccatggatgtagatgaagctcaacctgttggaagaaatagagttcccagtcaagtttcaagtcaaccagatttactggagtttggacaacttcagcagttatttcactttagagacagaggttcctgggagctaccttttctacaagggtggttgatggctcaaagccaagctggtgctaattcagtggctcttcctactggtagtagtggtcacgtcaactcaactccttatatgggttcttcttcagcatctcattcatccacagccagtctagaggctggagtagcgtcattagaaattcctggtggtgttaacttatatggggtttctgcaagaggtgactcccgggaccgaattctacagtcccgcttcgcaggatctggtttagcagaaggtcgttcctctcgtaacactcaacatgaaggagctgatgctcaacctgtggtaaacagaatcccttctgaactggctagttcaattgctgctgcagagttgccttgtactgtcaaactgagagtgtggtcacatgacatcaaagacccatgttcaatactgaagtctgacaaatgtcgattaacaatacatcatgctgttctttgcaggtaaaatttctccttatatcgttgtacgatcttagatgatcgtgatgctatataatatttctccttttgatggagatacatgatgtgtgtgtttatcgttgcagtgagatgggagcccatttttctccatgtgggagatatttagcagcctgtgttgcatgcgttattcctcatgctgagacagatccaagtttgcagacactggtccaacaagactcagggcttgcaacttcccctactcgacatcctgtcacagcacatcaagtcatgtatgaacttcgtgtgtattctctggaaaaagaatcgtaagtgctacttccaattgtttttcttgttacctttttcaaaattttacacagcacaaaacaaaaaaaaactcaagagaaaatgtcttatgtatgtctgcagatttggttcggtacttgtgtcccgggcaattagggctgcacattgcttaacctctatccaggttagccacaatttggttggattaaataaatttgttagacataagtctctgttgcaacttttttctagacataacattgttcaagtacttcataactgcaaagttccttgagatttcacccctaatagtaaatagagttgttcacttgtatttttgtgatgaaatactttataattaaaaatttccgtgcagttctcaccaacctccgagcacattctgcttgcatatggtcgtcgtcatggttctcttttgaagagcattgtgagtgatggagaaacaacatcacattttttcacagttttggaggtaacgtctatgctccagtagttatgaatttctagaccagcagaacaatgtttagcagatgccattttatatcattaactatatacacttggaatatcatacaagagtttagactgtgtttttccctttctattccttcagatttacagagtttcagatatggaactggtgagagtacttccaagctcagaggatgaagttaatgttgcttgctttcatccttctcctgggggaggtcttgtctatggaacaaaggtaattaatcctaaatcgtaatgtgaaaaacttctcggcgctaaaatgttgacttgtattgatatttgctcaatatttatctcaggagggaaaactaaggatcttccggtacaacacagctgctgcgtccaatctcactgcaccaaatagctctcccgatgagaacttggccgaggtagaattattaacaaggttgatcttcttgaaataataataaaagatgaatgaaagcaaacgaatctttttgaactaacatatgaatgtttcgatttccatccttggaaaaattttgaaccacaggtgcagacctatgcgttagaatgctagacagggaagaatttgggtctcaaccattctatatacacactctcatagacagatcttgcattgcgggactatttaccttcctttgtttcttttcgggttattcttcccgttctgtttgctcgcggtgcttttagttgtcctacccgctgtgcgattccaaacctgagaagcttttttccattcacgagctggtggtatctttttcttattttcttatatactgttgagggccgtaggttgggatggcctatcttccatttgcaaacccttttctttaaaaaaacaaaaaagaaatgaagcaggtttctgagtttgttgtttaaaatgacttcagaaaaatgtaaaaaaaaaagatgtttttttgtttgataaattgatgttgtagtttgtaactaagattgtaaccacgttttttcctctgtaagatcgtttttttccccttggttttttactttcgttacctagaaaagtttggacgtggcggagccctagccataactcagaacaggtttgtgtctttgaacggtaacagtaatagattacgacaaccaacaacaaaaagaagctgcaaaaaattatcatcaactattctctttctaactcaattctttagtttggtggagtccattttccagcggtaaagtccttgtagaatttggacctctttgatacgatgtaaaagactgtaaccaaccaaaaaacaagaagagaggcgttaatgacgcaaacgaagtctgtagcaactgttagaaaacagacgccaatgtgatcatacaaacaaacctggaatctcagggatgacaaacttaggttctttcaacacgtcatgcaatgttcttctctcgttcactttaaccatacccgaagaacctttcactttcacccaaattcaaggaatatatgttatatagaatgattggcaatgcaaaatgcatatcatatcacaagtttaggatccttacggtaggagggtgttttggttgcgcttgtgtcctcttctccggtagtttcagcttgagaaccttttgtaccttctaaaagatactggagaactctactcctaggcaatggagttcctgaactcgcctagagaaaagaaagatcctgatgttactaccagtgcttcatataacacacacttttcattgaagatgttcgactaaatcatcagtgttataaaaaaagaaatgattctcttgctagtggataaaacgaaagccatatgtaagaatttgagaggctgtggacattaaaaacagaatggctaagctgaaacattttgactgaaaatacttttgtaagatagcgcaggaagacctgaacaagaatttgttaatacatgaatgatgtgtgggtgaagtaggagtgattacctcgtagtaaagctcaataacatcacgtgagtattcgttgtttttatcccatggcagcggcgggctgtcctctgaaaacatgtttagagcgctaaggagggacataaagcgcattgaacagtctatagacgttatcgaaatgagatgcaagaataagaaacgaaaggaaactggcaaaaggatatcatatcaagatgagttgcaaacatgtctgtttcacaaaagtcctcaacaaagtcacttgtcatggcctcagcgtaaagaagcaggacaggccaatgaaggatgttgtttttatctaacattggcttcttcaaaccagtgagttctcggtacattgctttgccaatcttcactcctctgttctcgatcgcagagagacaagcctgtagtgaaaccaaggaaaactgagtcagctaaaatgctcaaagtgaaatgacttgtaatgtattaaagcttgatattcatgtaaatctaaccttggcttccaccaccgcctgtgaggcttgagcctcatgttgttctttctcttgcttctttgaattcacaagttttaaaagcttcttcatgtcctcattactcggatcattctcgattcccttttcacaataagactttgcctcgttcagcaaatccaatgacatggatgccttagcagctcgatacaccgccttttgaagcattgaaacccatcagagaaaccaaccaaaacggtacaacgaaatcaaagagaaagtttagcttactaccttaacgttatgaggagataacctcattgattcctcagcatcggtgagggcacgccgatagttgcctaagagtagattaacatgggatcgattcgagaacaaaatagaggtctctgaatcacttagaactccctgactaatggctttcgtgtaacaatcaatcgcctcagagtaatgctttttccctttccttacacattcattgccctcttcctgtgtttaaacagcaaaggaatgaaatcgatactacatcaaacatcaaaatcgaacgagccagagaagagagaggtactttgaattcgatggcggtggattctttgagagcagaaatagcttcaagatcagccttttccttctccgtggtcggcgtcgctccagcgtccatccatagcgccattgattcgcagcagaaagatagaaagcaaatagtgaaatattcgattaacctagacgacgacagaagcaggagaagaagaagaagaagaagcttcgagttctttggagggagagggacagataccggttatttcctctcgttaaccgaataccggtttaatactattgtcccggtttgatctcaatagctatcatgagcctcgattgtgtgtatatgagagagtattatgggcccaaatttaacacacatgagatttttttttttaaagtgaaatttctgagtcgaataataaattccagtgacagtgagactgagacaccggagtctaaaggaaaggtgagagcgggggacaatgtaagaaaaaggtcggtgagaaataaaacgacaagtgatagaacttttcttagtaccatagttgaatttaaggtggtgggccattcaatgggcctaacttggcccgtacaatctgtaacatcatttagtattgaattcacattcaccaatcaccaatcaccttaccaaaatagtgcgataggaattaaattgtgtttggcttggtatttgttaaatcatcaatagacaataatagtttgataagacttacaacaactgaatatttataactcgcaattagccctgttaacattccaggcagtgcctgcgtttaagcaacaatacagaggcttcttttaggtcatatgtcaacacctaaaacaaatagataacatgtgagagaaatgtgttaggtatattacactatgattagttcttttgttaaaggaccacgcaccactatcattatccacgttacacacggtttgaacttaaagaagatcgcatgttccactatcttttttgttgttgtttgtcctcctcaattgaacaatttgcatacgtaagcgacatttggttcatatacagtgttcatgaactgagcaacatatatactgtttttttttcatctaagaaaagctacctttttgaaatttgtatttatgcaaacgaaagataatggaaagtgagctggcatggaccgaaagtggtacaaaaaaagtttgaacaaagccattactataccaaacaaacgcaaatgacaaaaactacgcagcattaacaactatattacaattgtcattatttatgtataacattataatacactatcaaggcttctagattgttacatcatctccttaattcttccaagttacatcatcatatatagttgaaattaatttctattattcgtgagaatataagttgattggaagaaggaagattcagtctatatatatatttgaaatactatatgtggaagaacgtagaattccctattgcgaactagaaatgtgttgacgtaccgtgtataaccaaatgtaatatattaatcaaaggacatattaacgtacacattttttactgcatagtcagcaataattgacatttaatcatacatgtattagaaaatggtatgccacgtaagacgcattaccttgcatgaatggcatgtgtagtaagtcgtcatccgcatattgtccaaacaaacaaacaaataaacacatacgggcaagaattaaaaaaaaatcatcttttgttggtcttatatagttgcttatctgaatagtctcacactctctcacttgagagcaagagtgcatgtaattatactatagtattagtacatacgaacaatttggtggtgagtataagtttggatctttggactatatataaagtcattaatttcatactcttacgctattcttttatatcttttaatcaagttgacacatttgtctcattgttttggtgcagagatgatagattggttttctttcttttatatatatgtattgaaacgataacgtgtatgtctccactttctacaaatgaattttaaaaagctcaatgtgtatacataggaattgataaaccagtgattatatagtattttgtaatatactgacacctatacagttttattttagtaatatttgtagccttgtagacaatacataatactcatcacgtcacgtgtagaatattccatggaccgtataaggttcctcctccattgtatcccacaattaattagacacagcttagattagcaaaatggtaatttctttcgtttgagttatgattggcgatttcgtataaaacgaatcgagagaataaaaacgtaaaagaatcggaatatgattcattgcttaccatggttaagtttaatgataagtgcttttattgataacatatatggtcaaataatacaataatttgatcataaagagtaaagacaattgaaaaatgaaatcaccaaaaaagtcagatcacatacagacacattgacgcatcgacgtcaagcatcgtgagcgcacaaagagcttacggctttattattaacacacacactaagcaaaacagtaagtccacgagaaagcatccaaaaagcccaaaggaaccacctttattttttattttattttaggcaaaggaagctcctttattaaattcccaatcttcttccactactttgcacaatctttaatcgatccaaccaataaattttgcattttttttcgttggcgaatgaaggattagagagaaacagaagaaattgttaatttttttcttgttgattttaattaaagagaagagagatctctcttctcgattgctctcaagaacccaagtgacgtctggtttcagctgatttgtttcttctcattctctatcttcttctctgggaaatatcgattttgatctattaagagctggtgagagccaaagtttcctttttgtttgtttgtttgtttgtttgttgtttgtatttttgtatctctgtgatcgcttctacgtgttgggtcatgcagagaaactcattttgttttgatttgcaatgtgtcaattccactttgaaatataagattcatcgcctctctctcctttgttttttttcttcttctgcagctacgagctttgggatgtggtgagatgcttgttctatctcgaacaatccgccggttgttgattttaaacaaactctctatcacaaatctttcccgatcatggattttattgagatctcgttgatctttcgagagcatttgccactactggaactatgttcggtcatcatcaacctcctactctttcttgtctttctatttgctgtctccgcgaggcagattctcgtctgcgtgagaagaggcagagataggctctctaaggacgatacggtttcagcttctaatcttagcttggaaagagaggttaaccatgttagtgttgggtttgggtttaatctgtctttgctctgttgcttatatgtgttaggcgtccaagttttggtgttagtatatgatggggttaaggttagaagagaagtcagtgactggtttgttctttgctttccagcttctcagagtttagcttggtttgtccttagcttcttagttcttcatttgaaatacaagtcttcagagaagctacccttcttggtgaggatatggtggttcctggcgttttcgatttgcctctgtactatgtatgtcgatggaagaaggctagccattgaaggttggagcagatgttcttctcatgttgtcgccaatttagctgttacacctgctcttgggtttctctgctttctggcctggagaggcgtttctggtattcaagttaccagaagctcctctgatcttcaagagcctttgcttgttgaagaagaggcagcttgtcttaaagttactccatatagtactgctgggctagttagccttattacgctttcatggttggatccacttctctcggctggttcaaaaagaccgcttgagcttaaggatataccgcttcttgcaccaagagatagagccaaatcaagttacaaggtcttgaagtcgaattggaagagatgcaagtccgagaatccttcaaagcctccttctttagctcgtgcaattatgaaatcattttggaaagaagctgcttgcaatgccgtatttgctgggttgaatactcttgtgtcctatgtcggtccttacttgatcagctactttgttgattatcttggagggaaggagattttccctcatgaaggatacgtactcgctgggatattctttacgtccaagcttatagagacagtcaccacccgccagtggtatatgggtgttgatatcctagggatgcatgttagatcagctcttacagcaatggtataccgaaaaggtctcaaactttcaagtatagccaagcagaaccacacgagcggtgaaattgtaaactacatggcagtcgatgtccagcgcataggagattactcatggtatcttcatgatatttggatgcttccgatgcaaatagttcttgctcttgcaatcctatataaaagcgtgggcatagctgctgtagctacattggttgctacaataatctcgattcttgtcacgattccactcgctaaggtccaggaagactatcaagataagttgatgactgcgaaagatgaaagaatgaggaaaacctcagagtgtcttaggaacatgagagttctgaaattgcaggcatgggaagatcgttatagagtgagattggaagaaatgagggaagaggagtatggttggcttcgcaaagccttatattctcaggcttttgttacttttatcttttggagttcccccatttttgtcgccgcagttacattcgctacttcgatatttctaggcactcaacttaccgctggaggtgttctttctgctctggcgacattcagaattcttcaggagccacttcggaactttcctgatctggtttcaatgatggctcagacaaaggtttctcttgataggatttctgggttcttgcaggaggaagaacttcaagaagatgcaactgttgttattccacggggactttcgaatatagccatagagattaaagatggtgtgttttgttgggaccctttttcttcaaggccgacattatctgggattcagatgaaagtggagaagggtatgcgtgtggctgtctgtggcacagttggctctggaaaatcaagttttatctcttgcatcctaggggaaatcccaaaaatctctggcgaagtaagttaatgttttggggtgtttgtctcaattgcttcactattttttcttttcttttcttatattcacttagctatcattgatccaactgctgataattgttatataggttagaatatgtggtactactggttatgtgtctcaatcggcttggattcagtctggtaacattgaagaaaacattctatttggcagtccaatggagaaaacaaagtacaagaatgtgatacaagcatgttccctaaagaaagatatagagcttttctcacatggggaccaaactattatcggggagagaggtataaatctcagcggaggtcagaaacagcgtgtacaacttgcaagggcattatatcaagatgctgacatttatttactagacgacccttttagtgctcttgatgcacacactggctctgatttgtttagggtaagaagctattcaagtcatgttttcatattttgagtttgaacgtttgcgtaacacggttattaatggctatacaggattatattctatctgcattggctgagaaaactgtggtttttgtaacgcatcaagttgagtttctccctgcagctgatctaatattggtaagaaactcttttttctcggttttactacacattaattctggctactgttggtccttttagaattgctaaagggtctcttttaggtgtttagcttaccagcctgtgatgaacttatctctattgttgcagaaaggtaaaattgttgaaggagtttccaaactgtttccgttatgataagctctgaaatatttatttgtgttgtttcaaaggttctgaaggaaggcaggattattcaatcgggtaaatatgatgatctgctgcaagcaggtactgattttaaggccttagtgtctgcccaccatgaagcaatcgaggcaatggacatcccaagtccctcctcagaagactctgatgaaaatcctattcgcgatagtttggtcttgcataatccaaagtctgatgtttttgaaaatgacatcgagactttggcaaaggaagtacaagagggaggatctgcttcagatctaaaggcaatcaaagagaagaagaagaaagctaagcgttcccgcaaaaagcagcttgttcaagaagaggaacgagtaaagggaaaagtcagcatgaaggtgtacttgtcatacatgggtgctgcatataaaggggctctgattcctcttattatactcgcacaagctgctttccaatttcttcagattgctagtaattggtggatggcttgggcaaatcctcaaactgaaggtgacgaatctaaagtggatcctactctgcttctcatcgtttatacggctttagctttcgggagctctgtgttcatatttgttcgagctgctctggttgcaacttttggtcttgcagctgcacagaaactgttcttaaatatgctcagaagtgtgttccgagcgccaatgtcattctttgattccactcctgcaggaagaattttgaatcgggtatgtagatgtggtattataaccaaattccacagtttctgtgttacttttctgattttggggattttattgatgtgcaggtttctattgatcaaagtgttgtagatcttgacattccttttagactcggtgggtttgcttcaacaacaatacaactctgtggcattgtcgctgtaatgaccaatgttacctggcaagttttccttcttgttgttccggtagctgttgcttgcttttggatgcaggtaaatctattttcgatttttcctctgaataactgtgaaagattgttttcgtaatttagtttatattgaaataaaatgcagaaatattacatggcttcttcaagagaattggttcggatagttagtatccagaagtctccaataattcatctttttggagaatcaattgctggtgctgccacaataagaggatttggccaggaaaaaagatttatcaaaaggaatctttatcttctagattgttttgttcgacctttcttctgcagtatcgctgctatcgaatggctttgtttacgcatggaattactttccacacttgtatttgctttctgtatggttttactcgtcagttttccacatggaaccattgatccaagtaagtatctctagttactataacaaaaaaagcatcaacgagcagccggtttttctaatattgatgttcctgttgtaataggcatggcaggtcttgctgtgacatatggacttaacttgaatggacgtctatcacgatggatacttagcttttgtaagcttgaaaacaaaataatctcaatcgaaaggatttatcagtacagtcagattgtaggagaggccccagcaattatagaagatttccgcccgccttcctcgtggcctgcaacgggaacaattgagctagttgatgttaaggtactattcaaaaatactatttttattacctctctgcacttcctttccctgctttcttattgcttcgttcttttcgaaggttcgttatgctgagaatcttccaacagtactccatggggtgagctgtgtgtttccgggtggaaaaaagattgggattgttgggcgaacgggaagcggaaagtcgactttgattcaagctttgtttcgattgattgagccaactgctggaaaaattactattgacaacattgacatttctcaaattggtcttcatgatcttcgtagtcgccttgggattatacctcaagatcctacattatttgaaggaacaatccgagcaaatcttgacccacttgaagaacattcagatgataaaatctgggaggtatctataaatatgttgtttgatactcttatcttgtttatgttttagacactaaactctgagatttggagtttgattctagagatttacccaactttgctgacaggcgcttgataaatcccagcttggagacgttgttagaggaaaagacctaaaacttgactctccaggtaactatttacatcaaaagtcctctctttttcccgggtctttttcgcttctttctactgatttttttggctcaaaaccgagtagtactggaaaatggagataactggagtgtagggcagagacagcttgtgtcacttggacgagcattactgaaacaagccaaaatacttgttcttgatgaagcaacagcatcggttgacacagcaacagacaatctgatccagaagataatcagaacagagtttgaagactgcacggtctgcaccattgctcaccggataccaactgttatagacagtgacctagttttggttctcagcgacggttagtctcatacaaattaaaaacatggatctttcttcatattactcgtcgtcttttgggagaattcaatgtttatgtttatggtttgttgcaggtagagtagcagagtttgatactcctgcacggctattagaagacaaatcatcgatgttcttgaaattggtaacagaatactcctcaagatctactggaatccctgaattatgatcctccatgttaaaaattcagtttagggggtttcttttctcaagaggatataaaagaactgatatgtgacaaaagcttaaggtctaaagtaagagagagttttccacagggtttaagaaaagaaaaagcatgaaaggatgccaaaatctccgcgcttaaaaaactttgggtttaaatctcttctgtcgaacattgggagaaactttttttgtatggaacagttagtttctttggttttcatgtttatcaataaactgcaaaaacaaacaaagattagagtagaaactactaatcattcgtcatcatccctcaagtgtgatctgtattgggcttattataagtgtaatcagtactgggcttataagttgtacagagcccaatataacaatatctgtacgacgtcgttttgttgtgacgtagtacccgatgacaaaacgaggcgtgttgagcgtgcgtgtataaatgcacgtagtgaacgaacactaaccacgctgctgcatttaattcctttctcaacggtcgtattttcctattcaaggctttaactaagtttaatagtatgtttttaaaaaaatacatatatttggccaatggttgattattaagttattgttaaatgaattttctttggcttggtaaaacttcaatggaaaccaaataaatttcaaaatcttttgttgctgaaaaaggctacacaaactactatacgcaataaaacctaaccataacatctcgtgaacaaggaaaaaaaaaggaaaaacagagacacagagacaaggcagacaaaaaagccttacaagtgaaaaaccttaaacagcttcagttaatatagttcatgtcttagaaaaaaataaaagagaagaagctcctacctctgcaacatacaaaggatactcgtgaggcagagctcttactcttcacgagcttcatcatcttcttccttagactccaaatcccaggttttgaattctcttcattcttctttaaataccctattcttcttcttctctaaaaccatgcacttcaactacactaaaccaactcctttttttaactctctccaatggaacccaaacctttctttctctgcattatctttcttctattttgttcttcttcgtcagagatcctgcagaagcagacttacattgttcagcttcatcctaatagcgaaaccgctaaaacctttgcctcaaagtttgattggcatctttcttttctccaagaagcggttttaggtgttgaagaagaagaggaagagccttcttctcgacttctctactcctatggctctgcgattgaaggatttgctgctcagttgactgaatcagaagccgagatactgagatattcacctgaagttgttgcagtgagacctgaccatgttcttcaggttcaaaccacttactcttacaagttcttgggactcgacggttttggaaactccggtgtatggtctaaatctcggtttggtcaaggcacaattatcggcgtgcttgatactggagtttggcctgaaagtcctagctttgacgataccggaatgccttcgattccacggaaatggaaagggatttgccaagaaggagaaagtttcagttcttcgagctgtaaccggaagctaatcggtgctagattcttcatcagaggacaccgtgtcgctaattcaccagaggaatcaccaaacatgcctcgtgaatacatttccgcaagagattcaacgggacacgggactcacaccgcctcaacagttggtggatcctctgtttcgatggcgaatgttcttggcaatggagctggtgtggctcgtgggatggctcctggagctcacattgcagtctataaagtctgttggttcaatggttgttacagctctgacattctagcagctatagatgtagcgattcaagataaagtcgatgttctttcgctttcccttggcggtttccctattcctttgtatgatgacacaatcgccattggaacattccgagccatggaacgcggtatatctgtaatctgtgcagctggtaacaacggtccaatcgaaagctctgttgcaaacacagctccttgggtctcaaccattggcgcaggcacgcttgatcgaagatttcccgctgtggtcagattagccaacggaaagcttctctatggagagtcattgtatccgggaaaaggtataaagaatgccgggagagaggttgaggtgatttacgtcacaggaggagataaaggaagtgagttctgtttgagagggtcacttccaagagaagaaatccgaggcaaaatggtgatttgtgatcgcggagtcaatggaagatcggagaaaggagaagcggttaaagaagctggaggagttgcaatgatcttagccaatacagagatcaaccaagaagaagattctattgacgttcatctcttaccagctacattgattggttacactgagtcagtccttctgaaggcttatgttaatgccacggtgaaaccaaaggcgcggataatttttggtggtacggtgattgggaggtcacgagcaccggaggtggctcagttttcagctcgaggaccgagtttagccaatccttcgatactaaaaccggatatgattgctccgggagtcaatatcattgcggcttggcctcaaaatctaggaccaaccggacttccttatgattcaagaagagttaacttcactgtaatgtcaggaacttcaatgtcttgtccacatgttagcggaatcactgctcttatccggtctgcatacccgaactggtctccagctgcaatcaaatccgcattgatgacaacagcggatttgtacgatcgtcaagggaaagcgataaaggatggtaacaaaccagccggtgtgtttgcgattggagcagggcatgtgaatccgcaaaaggcgataaacccgggattggtttacaacattcaaccagtggattacataacttacctctgcactcttggattcacaagatcagatattttagcaatcactcataagaacgtgagctgcaatggaatattgcggaaaaacccgggttttagtctcaattacccgtcgatagccgtgattttcaaacgtggcaagactacggagatgatcacaaggcgtgtcactaacgttgggagtcctaactcgatatactcagtgaatgtcaaggctccagaggggatcaaagttattgtcaatcctaagagacttgtgttcaaacacgtggatcagacgctgagctatagagtatggtttgtattgaagaagaaaaacagaggagggaaggtggctagctttgcacaagggcagttgacttgggtcaactctcataatctgatgcagcgagttagaagtccaatctctgtaaccttgaagactaactgagccaatgaaggaaaacgtttttcattctgtttcaagactgtgttaggtttattaggtttttatgctaagaaaacctcgtgaagctgattgattgttgttattgtacgcacaagagctgtatttcattttccagggaatgaaactactggtgattctatcatattactgtagcttgatttcatcactaaaccctaatccagatgcatgcctttgttgttatagtggtatattggatcaggcaccaatagagtgaaaaaccctaaatatacaaagatctttaaagacaaggttaagctgttgtttgatattcacaaacgaccacaagacatatgtacactcatgtataaacatatgcacatgtatatatgtgaatgtgatatatgagttacagaccaaagagatgtaaactgtttttgctatataggactctctacttacctactccagctccaattgatgtcttcatgattctcagtcttgtcacagacccgaggaacatcctgagaagatgaaaagatcgttttcattgaaatggatgtgccacattacaaatacagatgatgaatgggaagttataagggtagtcacttactgccaaggaacatctcctacaagcatccaatctccgtctttatcttgatatgttatgatatattccgatgagccatccagtaatttcgaagtacatgtttccttaattgtcttgtatccttgtgtgttggatcctacaaatcgatcaatcaaaaccagtcaatttcaagagacacagaatttgaaaaacagaatcacatggaatctcatgaaacagaattagtaactgacttgttacaggagaaggaatctggaaaaacattagatccaaagttttctctaaggctgcataagaatccagagcattgagatcaaccttccttccaattataactccgtccattgtcaccttcacaagcatagaagtcctggacgatttgataaagcaagcatcatcgttcttagcagcaaccactacactttttgtagtctccttttgaatgccagaactcaagccgccttccgtagctaaagactttgcttgattgaccaaactgttgattctgtaagtccgtagaggcggccaacctacagcaacttgtctgctccattaccaaaagatattaaatcaaaagacgaacaagtataaaccaatatgattcaaaagtttaactaaacatttcagggaacactctatttgattcaatcctgtgattcattcattctcaaagtttaaggtctaaaagctctatcctctaagttgctttgattctgtaacaataagcaatctgagaccaatcattcatataggttataatataaagtctcgaagatgaattttttacctggttgcgtttgaggcggcagccggagaagaatcagcagagcgtttggtcccactttccctggtcagagaagaagacgaggaagacaaagacgatcgaaccttccgacgaccaatgctaagacccaaagctaggtcgagctctgtctctgacactgactcgtcggggcaagatgaatcctccgacgaatgtgcggcgttttcgtcttcttcagctggtagtccgatcatcaccgacccacttgacgaacaaacttcttgcaaaccattcattatcccaaattgccaaacgaatacacaaagcaagaacactaaaacccttgattcaaatccaattatcgatcaagtttgaagaaacccattaaccaagcaaaccaaaaaaaaggtttcaactttcaacacctctacgattctgaatttcgagacagaaaaaaaaaaaaaacttgaggtcacgcacggatccacagaactgaaattgagaactaaacgaggttttaatcttgattcgagggcgacttcgattctcggatcaaaaacaaggaatttttcttaaagagagagagaatgaaattggaggaacgaaaaatcggaaacggtacacgaatgtgtgcgttgcgtttggtggaggtttgttcgtctatataactttattattttaattaaatacatgatgggacccacttgtatacacttctaacgacaagttttacgttaatcctacgctaattgtgtaattaatctcttgcgcaatcaaagcttcatcttcctttacaagttacacagttagggctccgatggtaatctcaccacatctgtttcccaacagtgagaatttcaacatctttcatcgccataccaattgttcttctcctttggtcctgtaggaccttcctcgccggataattccaccggaagttttctaagcactgtggcaagcgaaaccctaaccgtcctcggaaatcgattcaccaatctctctatctcctctcttgaatcgtacacaacctttggtccccattctctcatgtactgcaaccacggcggttctgccaacacactgtttccgctgagatactccgctgcaatgatctcgtaccgtgagctcgaatctaccaagagttcactacgcgcagtgtcatttcttatcccaatcccaagcattgtcgatccctgtaagtaagtcccagccctaggaaagcttgcgtgaccatgttttgaagagtaaacaacggctttgttgcttccgggaatgatttcaaggtcgtatgcttcgatccactcgccgccactgtgttgagacaagtagattgagtaaagctcaccagagaaattgctgattcggagagtgaaatgttcccaatcgcagacgtgttggccaatactgatcaatgagatatcgacgagtcctagttttaaggttgctggtccgttaaatggacagaagatccagaagacaagatccgtgaacgttcctccaagagcaggcttaatatgaatgtaaagtttcgagctttcaaggtttcctcgcttgacgaaatctctttgttgatcatcacacggcaaatcaatccaaaactgcttgtcattgcttcctccttgaggcaaattcgaaccattttcatcgataggttcctcgattggatttcccttttcgcagagaactgcaccatttttgaagaaccacgaaacagaagaaggtaagtaagtttcaccaggatggaagactagtgtaggaccatagtgttgaatcaaagcttgaatctgatcaacatttggcatcgcatgtaaactcaaatctagattctttagacaagcaataccgataccaagatcttctctagcagcaacaagccgagttctgcagaagaaagtacctgcagagacacctttgccccacattcctcggtctgaaggccgagttctccatataaacaaaggaacacctaaagattctgaaacagcagtgacaatgacattgtggggttcacatatatcagtaagatcagctctaacacatctaacttcattcaactcaggtttcacggaagtctttgtaaccacaaaaccgatcgatctatacccttcaggaggctgcggtaaccagaagtaaccgcattcgctcttactactacattcattttctgctgaatcatttgagctccagacaagagtaaaatcaacaggttccactaatgcaggtttctctacctgttctaatgaatccactaaatctcttgccgcaagtacataacctctcaaaggatgagaatcagactgacagtagtgacctaagcaatggaagtctttaggtaacaatccctttggtttgtaaaatgaaatgttcttcttcttctctgtggatctgtatctccatataaattcaaaatccgtgattttgatgacttgtaatttgccgagattgattgttccagagccaaagccttgacctgatcagttttcaaaggatggagagacaaaatctaagagacccagctgaaaaatttcttcaaaacgcaatctttaaagaatcctctttgaaaacgcaaaagatttgattgaccattgttcgaattagattagtggatatagagatctgattgaaaaacccaattgaatttcacgaaattgaggaaaatcgagaaataaaaatctctcttttgtcaaggcttaagaaacctaaaattgaaatagaatttttgaattcgaaatcgttgacaagagaagtcgggaattgaatggaattggagttacctggaggccaatggggaatggaagaaggaagagagaaggtttcagggtcctttaatggcggtaaatctataagattgttccagtggagacatttgtaacccaacattcttatctgatcgcgcgaaaccctaattaatcaggaaggtggaaatatgtcagctttgtagcatctcatcacttgtttaccatttccttcgggcaataaattaaagattttcctcttattgagaaaaccaaaaagtcatgaaactgttttatccaattccacacatcagcgaataccttggggaaaaagtaactttggtttttgaagaaacgccacaagaaaatgatgatgaacacgaaaaacttggacagtcgcacaaaatatgttttgtttcaaaatatatctaaaaatcctcgcatatttaccccataagttttaaaattgtatatttttcccattaagtaagaattcgaggtctattcttttctttttggaaaattaagttctctaagcgtcgttacttttcctttttttcttctgaggagtttaactgagttagatcattgaaacagtactacccggctccatcaattcaacttctctggttacaatctgtatcataaccggcgtaaatccaagaacttttacgaatcaaacaaactgaagaaaagtaaatatctattgtcactgatcgagaaaagagagacatgtaaacatccagacactaaatttgagtagatagaagcaaatggttatcaattacactacaaaaacgaccagcagcagtaataggctcagtagtacgtgttgtagtacgcttgaggagcaacagcagcagccggttgctgcaccggtgcagccgctggtgctgctgctgcaactggaggtgcataactctgcgttgggtatgtctgcaaaaaatttcacaaagataagatccaagttagatgatcaaagacttatctccaagagtgattcccaattcaaactggtggctaatccctgtaatcctcctaaatactcctgagtttaacactaattaagaattttggttacctgagcaggatacgctccataagctgcggcctgtggcacaggtgttggtgcttgtggagcggtatagccagcaggatatcccccatatgcaccataagcagcctacaaaggtatattcgatactattataagagtaaaagtatagaaggaaggaaatggatatggttctatctttggtatcttacctgttgaccgtaggcagggttccattgctgtggttgagcaggagcagcttgtgctggtggccaagtctgaggctgcgcagcataaccaccagaccattgagcctgagcatttggatatgcattggatactggctgagcaggtggagtgccgttgtaagtttttgccattttcgtcctatctgatgcgagaaaatcatctgcgctacgctttttcagctccgacgtgctccgatgaggataaaacagtttaacatgttgatcttccgcttttttaatggacttcacatctccaaaaatacccaggaactgcaaaggccatgcacatttgggtgttaaaaccaataatatagatacatcatgttcaaacaagaattgtcttctttcttttccattacctctatatatattaaggatagctcttccctctcagtggaacttgcaatgttttgggcatctgcatctggctttataactttctctacaagtggctcaaggtaatcaatctctcttggtggtggctgaatcgcctcaaaatgaatcagtgcttccatgagaggttttgacggttgtacatggtcaagtgcttcgacaataatcctcctagctttctcagcatccctggagacctgaaagtaatattaagaaaagtaagaagccaaatcactacatactccatcacgaaaacaaaaacaaaatgagttcaaaaatcagtactataaagtatcactacatactccatcacgaaaacaaaacaaaacgagttcaaaaatcagtactataaagtcttagtagtgtagagaccatgtgacgtaccaagtatgaaaaccttgaatactgcgcatacagcagtggcagtattgtggaatgttctttccccttttcaacagcaatcacttgctcatacaaagagaaagcatcatccagattaccctacagataagattaggagacatgtaagggaaacaaccagtgataataatcttatactagttctttaatcaccattgaagcttactagtcggtattccatatttgcatgcttgattactgcttcaagaagtccaggagaaatttcagagtgcactaattggtatgcagctctagcaccagctatatctccattctgctcttttaatcgagcagcaaataggtgaatctctggttgtttctatgaaagaaaagaaagcagataaataaccatgagactcaaagctgactatttagaattattctgcaaagccactcgaaaataatgaaatttaactacccagaaaggttggagaaacacaattcataccttgacaaagacttgagttgctcgagcaagggcattttctgcaaggtccgcacttccacttgcttccatgtttgtcacataacgaatccagtattctgggtaatttgcacaggtaaccacacatctttcatacagcttgaccacctattggaaaagacaatcgaatgtaaaacatatatgatgatgactacggaaaaaaaccatgtaaacatagaaaacacaaaaggagaaatccacaagaaatactctacaagtccaacagaggggccctcacatacagagggaccctccttgcctgacagacagaatgttaggaagacacctgcattaataacattggaacttcaacaacaggataattcatgtgcctaaaatatccattgacaaattgagagttcgaaatacttagccttaaagttaccaaatcgaggcacatgctttggtctcagttatttcccatttaaaagttgcttgatccaatggaaacccaatcaagcatatgatgcaccagatactacttaactgtaggtcaataatatgacagaggtacaacttaatctacaaaacacttgtacgttcacgtataagagagttaaaccccagtaccttattgaagtctccatccctctcaatgaaatccagatagttgtgccaattctccagttctgcgacattcagaggacgcacatggaaatagggcctccttatagccatttcataaccaatgattttagattcaaactctttcgattttatgtacatggcttccctgatgcctacatacttcttcaactcctcaggttcagttgaactagcactttccaatttaggggattgttcggtggaaccatcaacttgagatcgtccttcatctgccttttcaccggactcagatgctgcactttcagaagcatcaccagcaacagcaacagcagcagctgcggattcctcagcactccttagttccgacagaggccgtgtttcagctagctccttaaaactatagcaagacaagaacttatcaacaacagaaaaaataccaaaaacgaagcaacatacacatcagaaagaaactaaagattatgagcaaaacataaaaaccctcgctatgacagatgaaatataaaattagattaagcatatatcaaatgtatgatacagcacacctgccagatagctgaactcgattaagtgctaaatcaacatagtgcatcaaatgatgttttctctccataaccatgacaatccacataaatagactctatccaattcagcacagacaataatgattaatgcaatcagtaaaaattacctgctgaaatatctatccagattttgaattggattctccaatattctggtgtaaatcaaggcaactcggctccagtcctgctgcatgtactcatactcaatgtatttgtcccacaacggagaggaaagaaaatcagttccaacgtaaaccaaagctcgttcaaaaagcctgcaacagcattatagtaaaaagaatgtcatatgagctgaaagaaacagacatatccaatcaatagagacaaacacgagttctatggagaaaaggattcactctttgaatgcatgatactgccaaacactgcatttaccttcctagtaaaagcatactatggccaaaatcgagcagtcaagggctacctaagcccaaaactggttgacatctttccagcagcattttgaacttcgggggagggtgacagttaaaacagatatattttaacatcaaaatttttaaaccagagaagtaacgagcaccaaaaaagggaacagttttagataaagatatcagatagcaatggaaggaggctaaaagctagtgtgtcgaacatagaaaaacgaagtattttaaaattaattccatcagatctttccgccacaaacgagaggacttgctgtagcaatctaaaaaaagggttagatggtaaaaccattttgtctaggtaattggaaaatcaccaagttgttaatacacatacaaatagaagaataagcattcattaccttctgatcgtttctggatctccatatgtattgatggcaaaagtgcaataatgcaaccagatatccactgaatatgtcactcccagcactgctctttcataaacctccacgactttgtccattgcccccacccgagcctcatgatcggcaaactttttccaatagccataacacagaggaaattcagctaagaaagcatcatagaccttccggatttttgctatattgtcctgtaatcagggcagcaaggaaaacattaacaatctagagcaaattaatcaagtagctgacagtaaaagttagaaaaaatataccgaaagatgacagcgacttatggtgtacaaataaaaacggaatactcattcttaagattcaaatagcaaacaagttttggaaacataatccagatgacaaacatttacgtcaccacgaaggtcagaggactcagagcagagtacatagggaaaaccggaaaaataagattcattatgtaactccacacatacctgcgctatcctctccgtctcatcaatcaaggcagtccaagcattaaactctaaagaatttgcccttacaatattccacaagcgctcctcttccgttgagagtgtagagcctgtaacaagagagaaggaataagtaaaggattatcatcatcgaagttaagatcaggttctagtgacgcctcttagaatcaatatgtgctcatacaagctttcaaaaagaagaagaaattaccagtattgtctccatgctccgctgctggagcagtcacagccacattatctgttgcacttccgttctcaactggcgcagtaccattgaccaaagaatcattgttgaccgagtgtgatgcatcaacaattggtgcagtctcttgcccggtcgattccacagtagcagcagaagcattatagtctccatatggagcagaagtataaccctcggaaaccatggcctcgctgtcacccattactttctagaacagacttctcaaacgcagaaaactacattcacataagaacagaatcagtttaaagacacagaagactgatactaaactcatcgaaggatttcattaaatgcaagcaaataagattagcgtaaagcaaaattcactctatcttcctatgaatcacaaccaggaaagcatgatacgaagtttctacaataggacaaaaatctaaaccacaaccgaaacaaaagcagaaacccgacaaaaatgagctaatgtaaaaccctagttttgttcccaattcgtagagacgagaaaaggatatgtacctcgggaactaaagaagatgctcgtcgcttctagaactctttaccaatcagtgaatgctatcttcgaaagtagcttcaatgtaagagagctctcagcttttgattttggtgtgtttcgtttacacacgaagagaggggggtatagggttagagacgacgaaccaaaacgaaaggcgacgcgtatcgtgttggtcggcgcacactggaactcaatctggcccgttaagtaaatgggtcattagatttcttaatgggcctactgacccgtacattattaaagccgaggatcccctttcaattttatttttcaaagtgaaaccctcgtcgtcgtctctagtctgaactttttcaatctctctcgatttcattcaatcaatggcgcctaagaaaatcggagccggcaaaggcgattcgagcatcttggcgaagatttcaaactacgatatcgtttctcagggaagacgcgccgcttgcgatgccgtctacgtgtcgaagaagctgttaaagagcaccgggaaggcggcgtggatcgccggtacgacgtttctcatccttgccgtgcctttgatcttagagttggagcaagatcatcgattaggcgagatagattttgagcaggcgagtcttctcggaaccccaccggtcggtgcgatgctctaaagtaactttagaaaccctaatccgtcgatcatatcataaatttgatattatcatgcttgtttctgctactcgattagaagctgttagtttccttccttgtgtaagattaggtttactcataagggatttgatgaatttcaattggctattttgaagattgtgtttgagcaatcttcttctaatttatttggcaatttatgatgtgggctgagattttctccgtacaagtgattattcttttaatctcatagctgtgactcactttgagtggagcatcaatcttcgaaattttatttggcaatctggttaagaatataggtaaggatctttggtaaacttagctgtttacacttgtcttaatttctcgtcaacatttatgccatttagttcaaattttgatttgatcatcactcctttacatggcaaggcctgtaaatagactgcctaaaccttgatgatgcttcttttgttcagcaaatatcttgttagcatcactgctcttttcgtgacaaaacctttgactcccactttttcagttttcaatgtgtattttgactctgtttgcatgaagggttttggtttagctgacttgctgattactgaatctcttgattttattcttcccctatcgccttcacacttgaaccaaaagaactatacaaaattctactttaaaccaaaaactgaaatcatacttgaattccctgggttattcaattgtagtagaacaaaacgttgtctgtcctggacccaatcgcttaaaagaaaaaacatatgttgtgggccgtcccatacttgatgaagcccatatgatttaaaggagttaaaccagtcaactcgaaggagtaaaatcagtcaatcatactgacactgcatagagagaaagaaaggttcacttttagtttgtcttattcgcctcatacagaaaaagtcaatgacgactcccaaacgctgcgtttctcaaatctttgaagactctccttcgtggagagtatacacttttctttcctcacttcgtcttttaaagtttcaaattgtcgtctttctttggacagagagatacattgatcaaaaatacgctttgcataagcaaatctaccatcagtttttcactacattctcttctctgaggaaagtcgaaaatccggttctctcactacagagtctcaccctcttaaaaccctaaatcagtttcagagttggttcttttgcttgtaagttcttctcattttttctgctaaagcttcaatcttttccgtttcgagacctctactcgttttttttattctggaaaattgaaacgttttagggttttggtactttgttgtcccttcggttttccaaaaaaaaaaaaaaaaaaacagaaaaagttccaatttttttggtgggtaataagtatttggtaatggctcttcctacatttgtttttttgtttgctttcatctcaaaattcagggtcttagtcacattagtttcgttacacatctaactcttttactctcttctctggtttcgctcttattggtggggcaggaagatgaaagtttccacttttgttactttgctatgtttatttctgaagttttttgaggttggtgagtgattcagctttgttattgcagaaacttgttgaaaatggcaccgaatcttaggattaagaaagcctgtgacgcgatgaagcttttaggaatatcagagacgaaaacaagggcctttctcaggaaacttctcaagacctatgagaataactgggatttcattgaagaggatgcttataaggtccttcttgatgcaatcttcgacgaggctgatgcccaggtctgttttttctgcttaatcactttttattttctttatttgattgtttacatattctcacttagtcagttctctttctttgatatgtcatatggtagtccactgaaaaaaataagaaggaagaggaaaagaagaagaaggaagaggaaaagaagtccagagtaagttaactttctttaatttgatgacaattttctggtgttttttgatgttgtttcttctcaaggttttgatgatctttttttgtttctttagagtgtagcaacgagcaggggaaggaggaaagctcctgaggtatacgacctaaatatctttgttgttttagaatttgttatcatcatgaaacattaacttgtttttttttttggttaaaccaaactcagcctttggtacaagatgaagaggacgatatggatgaagatgaatttccattgaaaaggaggttgcgcagtagacgtggaagagcttcatcttcatcttcatcttcatcttcctataacaacgaggatctcaaggtatgtttagtatctgtttttcgggtttcttggtcatattatatagcctgtgtttattttgttttcggtgaaacagacacagcctgaagaggaagatgaagatgatggtgtgactgaattacctccgttaaagaggtacgtacgcagaaatggtgaacgagggttggcaatgactgtttataacaatgcaagtcctagctccagcagtcgcttgtcaatggagcccgaagaagtaccaccaatggttctattgccagctcatcctatggaaacgaaggtttctgaagccagtgcacttgttatcctcaatgatgaacccaatatcgatcataagcctgtgatttcaggtattgttacatgaactcaagataaaacttagtaatctttcttttattgctttttatgtggttgtgatgagatgttgaaacctttgcattttaacctgatctgtcttttgtgatgtttccttctgacacttcttttcattatttagatacaggaaactgttcagctcccatgcttgagatggggaaatcaaatatacatgtgcaagaatgggattgggaaaccaaagatattctcaatgatactactgccatggatgtgtctccttcttcagctattggggaatcaagtgagcataaggttgctgctgcttcagttgaattagcttcttcgacttctggtgaggcaaagatttgtctaagtttcgcgcctgcaactggagaaacaacgaatttgcatttgccttctatggaggatcttcggagagcaatggaggagaagtgcctcaagtcgtacaaaattgttcaccccgagttttcggtccttgggttcatgaaggacatgtgtagctgttacatagacttggcaaagaattc

SEQ ID NO: 9 - DNA, 107527 bp, Arabidopsis thaliana
gaattccaaggaataattgtgttaccaattaaaataaaaagtacgcaaattttttttccgttaagactgaaaacggaagaacaaagtcccactatgaaatcttcaaattaaagtgacgctaagtttaaatcggaaactttccaaattcagaaaagattgatgctttttttttggtaaataaccccacatggacccagaaatcgaaatctaacctgtagaagtggaaggatctgaatttgaagagccagaactggaggatgaagacgaagatgaagaagaagaagatcttctggggacaccatttgggtaataactataagcgatgaaacacttatgtagataaatctgtccggagattgagcttccacattccacctgagctttctcaagtgcgttcttaacacatccgctacaatcggtgtctccgacatctccttcgcattgtcctaaaacgtagacagattcgtacgtagtagcgtagaatccatggcctgatactacgccgttttgcatcaccccgaacgccgtgtctcttctctcttcgaaccctgttccggcgatgttgttcttcccacaagtcttgaacagcatctccatccctgtaataatttaaccggaaatttatgtgtaagagaaccaaaccggtctaaaatcggttaatagttttaaacctaaattgaaagctccctacttcacctctgaccaaaggtgttgaatgaaccaattcaattcaaaccaaaccggaaaactggagaaaaaaattatgaatttttggggttcggctaaaccaaaaccaaaaatcaaattaccggttcaattaaaccagagaaaaccctttgattgtgatctggttaaggtttcgaggaacccgaggaattgaatttccggttcgattgaagaagccacggaagagaagaaagaaagggtttacctgaaatttgagaaaagccagaaacttcatagagaagataacagccggaaagttgaactcttgaagcaatggttttgccacatagcttgtcggagagaacaggaagacgactaacacagttgtaacagtcatggttacttaaatctcctctacactggaacagaccagtgattgtggttgtgcttgttcctgttgtggtcttgtagaatctggttttagtagactgagagaccaatgagccgaacatagcagagagagcttgtgagtataaaccagatggatctgagaattgttgtcttgcacatcctttgtagattaaggttgtgtattccgttgtagcagattttactacgacattgagatctggaaacagtagacacatcatcatgatgatgctgaggaatgagattgaaagacccatttttgtatgtagactcttttgcttcttgtggtctctttttgctttgaggtatcttggaagaaagattgggggaaaaaatcaaagcattggctttctcattgtagagatattgaaagatggaatctttgtgttggttttatgggttttagagttgatgtaattggttgcttggtggctcagtaaagctttgatttttgtttctgtcttctaggtttctgggttctttgttttttttggctttggctttggcttttgatgaccatgtgagaggagattaggggagagagagagagagagagagtctctttttccttttaacgcttctgagccattcagttctgaaactgtacaatgtttgatttactgcagcaaattacaataaatatttattgattgaaagattttaataagagtttatttgttgtttagcttcctttttaccacctactagctactagtgacctttgaatcttattccaaataagtatgtctctaatctagtttaaagtctaatcttgtttttaaagtcatttagtgacttactttgtgtaacattctggtttagtagttggttactttggaaattgggtttagagaaagatacaaactttcttgcacttacttgattgttgataccaaaaacatgtttaggaaatttaaccaataacggaattactaaagatgagctataaataggaaaaaaaaaaaaaaaaaaggccagagagagagaaagagttggaggaagtgaaaaggaatctgagattggtgggggaatgggaagattgtgaagtgtgtgttttgaccacagtacagtcaaaatctctgtctgtctcagggttttctaatttctatgaccaccatcacaatctttttgtcttcatttcattgtcttcaagattcatgaccctttctatataacacaagttttttaattgttgccgtttaggtcctactgatttgaatgatgaagaagatcatttacatgcctgttcttcatttgcttttatagtgagcagctaactttgttttatgtggactctttcagatcaaagagagaaagatcaactgcagatccttaaggtacgatgttgttacaggaaaattgttgactgagaaagaaagggagagagctcaggtgtgtatatgtgattgtgagaggggccatcaggaaagtaccaacagaactgtaaagatacaacaaaaatcgcgagaattgaggatatagctactcttgatgatgagacttttgagatatctcttcatgaatcttgtgctgaatcttcagtattgtcatcatcaggtaaaccaaatatcctgagattacggtccattgaaccgactgctatgtatttggagtcgagtccaaacttaacacttgttgctttacctgcacatttatgtagttacaatgtctgaatgatagactcaataaaacaaggaagagcagtgacttcaaaagcttaacatgtagcatttacctgtaccggacagatcgggaagagtcttgattgggttccattctgcttttacactagctgcttggaatactctacaacattgaagcacaagttttcgattagtatgatttgcagaagaaacgtatacatatacccaaactgcatttctggtgatagcaggttaattgagtttgcacaactatctttcaatatctcgttatcaaagtgagctcctatatcaattaattcccaacattgtgtatcaaagtagacctcaccttatatctgaagcagcaatgccaagataagatccgctatggtcaaactccactgcacaaaaaaagctcattcaggccttaagaaatgaaaactcactcaacaaaatagactagtaagagtgctcaggtagttgaatacccgagtttgcatctggaaagtcaaaggttcggaagttctttaacttgcgcaagtcccacaacctaacaccatccagtgcagcagtctgtacaatttaaagaatagtaaatattggtcagtcaaaaggaacctggtgctatccttctttctacttagtttaggtcaatcagtcaatgtacccaccgcaaggaaataaccgttttcagagaatgatatagaggtgatttctccattgtgtccaccaaactttgccacatttgcctatcaaacgacagagatagagatgagagtgaagtgagaacaaacttacaagtgacaacagttgatgagcaaggaaggtcaaagagtttttacctgactttttacatcccaaatcttaacaatagattgagcggtaccagttccaagaatgagaccatcaggatgaaaagcagcagccgtgtaattcacgtcgttttcggaagcatctgtcacctgaataacaacaataatgagaaagacgcatggcagaaacatttattctaacgagtctaattcacattacaataaagaaggtaaatgtttcattgttatattagcataaaagaagaaatctgaaactggataacaggtatcaggtgtggattaaaattttggagacctgagcaaggcataaaccggaggacagatcatagaagcaccatgtactgtcaagtgatgctgacacaaagtatttattcgttgcgtggacagttacagctcgcacctgaaaaccacatcattgcttttacgttaaacagaccaaaaataaataaaacgtaaaactgtatgagactgtagcctgtagaagttcttcagttacatccttacctcggcagaatgatctttcagtgtatgtctagaggtatagttcccatcctcggaacatccccagatgcggactgtctgcagagtgttaagaaatgagaagttaatctcttcactactactccataaaatcatgcaatcctcaaaggagcttgtacacataaccttagcttaccttgtcggatgaagcagttaacacaagatcagtgtcaccaacgaacttgatgcttgtaacctgcaaaaggaacaatgcatgtcaagcacaaaactacaaaggaaaagttaaaaaagaaaatgaaatataaaaaaagaatacagtaaaagacagaccttctttgagtgaccagtcagcgttgataagatttgtcctgaaggacgatcaaagagaacggcagttgtatcaattcctcccgtagcgatgacatcctgattaccacatataacgagaaattaagaataatactaaatagagaacagacacagggattcatggtagtgtacaaaatctatatactgaagaataatattgataagcatccagatggggattcatggcagtgtacaatataatgtaagcgcaaaagtaaacatgtcactatgacgttcaatgcagtgacttctcaggacagagaaaaactacataaagtgatgaatggaaaatagagaagttcttaggtgtcaaaccttagaatgtaggatgtccattgaaaaaattccaggtttgttggtcttgtgaagggggtggcttgagagttgggtgaacttctccagagcatcgactgaagccaatgttttagggatctagagaaccaatgaggagaaattattaagacagaagaaccactcgcaaatctaattgaactccaaaagtgcagatatccattgtatgttacagacaaactatatatatatgtaattctcttttgccttctatttccactaatatactgatatatgcagttacctgtctctttttacgctgctgagaaagagcagcattacaatctgtgagttctgtgataacttcagccgaaattccaagacgcattttctttgcattaggcccctgctcaccatcatcgatacctatattgcaaccaaaaacatagtagcttgttataagagaaattaccacatagccaacttacattgagaagcaaacgtgcaagcatacctcgtttaccattactaagagcagcattcgatgtggcaacttcgggggctgcaggcaactgcctttcagcctctgcaagcaattgtcgtgattcgtctctttcttttttaagcctagcaatcacacgacaagcagcatcatgctgcaaaggaaaagtgtatcccccatcaatcaccttttatcacaagaaataaatggaaacatccaggaaaagaaactagaatacataatagatatttgtaattcatgtagtctgataaggtggtggcaaatgcacctaaccataattacctgatacaaagcgtgacttagctcttgcctcgcagtatgcagttgttgttccaaagcaaaatttgatagcatcaaactgtcccattcctacaagcacaacaaacagataaactttttaagcatttcttttgcctaaagtaaaaataaccagcgaacactttcgtcttgctattagtaacaaatgaacatataattcaatgtaaagagtagaatgcaatctgctatgttaaataactcagatagcgatgcatacccaaatcaagttcatccattttaactctatatgatccttaatagacagagaacaaaattcagaaacgaaaaagaaggtatagggaatacaaaataagaacttacagtctgaaacgttccaagcaatccagggatgctagctgtgtgtaatggtttcggctttacgatctgcaaaatggtcccggagatcgaatcaggcttaaataagtttctacaaacaatgctgtgtgacaaataactccagtggttgcattaccttcccagttttgatgggaacaatgtcatcaagagtatgtggctcaccagtaaccgggcatttcccataatcctacaaggtaccaaaagcaatctataaattatcacaacaaagtctgtattaagaaaatatctgcagcaaatagagaggtgcaagaggctaaacagctgaaaaccctagataagagtcgaacgagggagaaaagaaaagaacttgcttacggatatatgcgtctggattagccgcttctcgtaaagcaaacccgacttcttagaaaccacaggctcctccggaacttcgccggaaactgtagaggagaaaagaccacagtgttaccgacagaaacaaagcaaaataaaaccctaaatcggtaaatagagaagaaagagtgccttacttgcacaattcatcttctaagtataaacgaagaagaagaagtatacgcaggactagaagactactcggtgaatctttaaatagactgggctagggttttaactactccggtccggcgctactaaacaaaatcgcagaagccgggaggacgatgaagacggaaagagagagagatgcaaaaattgtttaagcttaggacaacaagttagagatttcttgttaaacaaatgggccttttaacgagaccttgatttataactaattaggcttttttctgaagcccattagttaaactatgtatgttcgttcattctttctgtctgagaaaagaaactcgaaagtataattcttacccttttttttgtcattcttttcttttattttttctgattacaaattcttttaaagtataaggtaggacaacgatgtacgggccattctatttgcacgtacgatagatgtgttctttatgaacaaaaattagtcatagccgaaaagtagtattctcataaaaagcatatttagtattctcatttctcaacaattaacatagccgaaaaaagaaccttatatgaacaaatcattggtcatactatattttcattttttattaaaaaaaattagacttccgatttatataatattgtctgagagtttggtattataatatatttgtgatagctctgcaaaacttaaatcatctcgtttggaaaatgcgtgtgtgtaacactgcactcaaaggccaaagcttttgccgaagatgctcatatatatctccaaagtatcgattcatcaaatcagctttgatctcaagctgtttctttttccttttgccaccaagttgctatttttttctttctcttcattctgttctcgttaaatgatttcttgcaacctcattaatttccaattcttaaacgtatgaccatgtttattttatcacatactgtatataagtttaaaaaattgcctgagtggtgatatgtattttatataatacatatagtatatgtacatattgttaaacaatttgaatgaaataaaattttggataaatatcaggagaaaaaaaacttagatagtcatgctaatgatttcaaataatgcttcatagagttggggaccaaatagaatgttgataagtgatgtgatgatgtcccgttcccaaccatgaccaaaacaaataaactaaaaaaagctagaggagaacgaaaaaaaaatcgtcgtaattacaatagtaattaattaatgcgtatagtcaatgaaagttgtttttagaagttttgaagtgaagggatattttgaacttagctgagtaatagtccatgaaagttagattattcacctagctgacattttttcatagtttgggaattctttatacgaaaaaaaaagataaaataaaggtaagaccatgttcgtaaaaaattgtagtttcatatatggtgtttttttgttaaagtttcatatatggtgttgatgactatataatctataaatcacattggtgtacctttatttacgttatctaagtcgatatatattccgatctataaaagtatcttttcatttgtatgatcagttcattatttggttatggttgtaaggaaaacaacatatatagaaaacgacaactcgaagcatggtatgctaaaactatcactgtaacgaatttttatcgagagaaaccatcttgatatgaaatttgtagtttccgaatttaactaagcatcacgtaacattttttttcccctcgaaatttccataaaataaatacatttgacttagtacgatctttatctcttattttcaaaattttcactgacctggtctctttttctccttctcttcttttccacttcttaccagcatttaaaaaacccaaccaagtaaataaatagaaaatgaaaaattaaattgctaaaaataaaatagaaaagccaaattctataaatagaaggcttaatttagcacaagtttcagtcagaaagtcaaaaatcatcgcgacaaaaagaattgggtcaaactcctttaccggtcaaccaagtcatcacttaggtgggactattttctccacgtcaactaattattccaatcgttacacgccacgtcacgagaataagaaactccaggaccagcgcgtttaacgtcaattgccacgctggcatttttcttattacattttgcatacatacacatatagatacacatttaaaccataagtataaataaattggttacgataacttccataaccttcattagtttctccagaagaaacctgtaagaaatttctttctcttctctgtctttaaacagatttttattctgttctgtttgattaattattatctcttttgttccagtattttaattctttagattttcttgttcagacatcactagctccactaccacattcaagaagcctccttcaataatctttcccttttcctggggaattttctctctggattcattcccggaaaatcattcacaatttggagaccataaagaacacataaacatgtcgcaggacgtaatttcgtctcatgagcagctctccatggtacgtaataatccgtgcaatgtttattgtttgtcctcgaatctgtttttatgcccttgaatggtttctcttctttgggtttcctcttttctatcatacattgcttaaatgattaaaagcatgaacctttttttcctgaaaattttgcatgtatatatctatgatttattcgcaaggaataaaattattttctgaaatctttgtattttgtaggtaacatcgttttcttaattttcttagttattcgattttatcttttgtcaaattgcttcattccttttactttcttttctgtttctggttattctagatacaattcagttcatattccaaaagtctgaaacgataattagtaaagcaaactttttagtgctaactcttttgtacggtgttcatacgtagttacgtaccttctcgctagccaaccacaaatcgtcacaatacttaatcagatagaatagaacagtttatcagaattcataagatgctacatctcttcttttagtaattccagtaattaaaatttgaacttttatttatactttcgaatagaatcacacgaatttttattagaaatatataatgagtgtatcaaaagcaatgattcttgctcttacctcggcctttatttgttgttaaaaaatcagatgttagtttaaattagggaacgttttggttctaaagaaacgcaagaatccaaaaactttcctgttatggaaactctcccgccttatcgttaatttcttctctagattccctcttgatgaaaaccacatagaaggaacaagatctaatcgtataaatacatagttctctctaaacgactgtgttaagttaaaactaaccttaggtttattcaaagttattgtttcttgtttcacaagaaaatcccaccaattagctttttatgcaagccttcaacgtatgtcaataaacaaacaattagatgcatatatttacttgttctattttctgctaatttgatctttctcctgctgttgttattttgtaggatgagatcacaagtcctctcaccgcacagatcttcgatttctgcgattcacagttatttcaagaaaccttcaatcaaacttctgaagtaacctctgcttcaaacggttgtggctatgtcgaaaacaacaacaccaacaactttccagacaaatccaacagtggttcgaatcaagatcatgaagacaacaacgacaacgctgatttatcaatcatattcgattcacaagatgatttcgataacgatatcacagcttctatcgatttctcttcatccatccagttcccagcctccgatcaactccaagagcagtttgatttcaccggaattcaacttcaccagcctccgaacactctctactcttcctcctctggtgaccttctgcctccgcctttatcggttttcgaagaagattgtctttcttctgtgccaagttacaatcttggttccataaacccttcttctccttcttgctcttttttgggtaataccggtttaccgacttacatgaccgtaaccgggaatatgatgaacaccggtttaggatctggtttttactccgggaatatccatctcggttctgatttcaaaccatcacatgatcaattgatggaaattcaagctgataatggtggattgttctgtccagatccgattaaacccatctttaatccaggagatcatcatctccaggtatatattccaaaccttatatataaataatgaaaggtattgctggcaaacaaattgtgtaatgaaaccagattagtaaaccggtctgatactaaccggttatggggtttgttttcttaatagggacttgacggtgtcgagaaccagaaccacatggtggcacagccggttctcccgcagttagggacggagataaccggtttagacgacccgagtttcaacaaagtcggaaaactctcggcagagcagagaaaagagaagattcataggtatatgaagaagaggaacgagaggaatttcagcaagaaaatcaaggtctttgtgcttaaccatcataaccggattaaaccagtggttatccatataccgatttgttcacatgttttttttgttatattttgttgtagtatgcatgtaggaagacgttggcagatagtcgtccaagagttagaggaagatttgcaaagaatgatgaatttggtgaaccaaatagacaagcctgttcaagccatcatgaagatgatgatgatgatgtaagattaatcttgtttgattacaattagaaaacagattagtttttgtttgatataataaagcgtttctaaacgggggtgtggtttgcaggtgggggtaaaggaagaagaacagttagttgattcttcggacatattttcacacataagtggtgtgaactctttcaaatgcaattatccaatccagtcttggatttgagttggattacttacttggtcttatgatttacaaaaataaaacaaaaatagtattgttatagaggtctgtaatttgtatatttattagtacattttttggccatgactcatagtttgtcgaataagtagaacataagaaaagagagagatgaataatgggtgtaggcaggtaatcatgaataaaattgtagtgagtgagaggggttgtttatgttacatagaacattacaaaattttgtagatatatattatatggtatgataattatgatgtctattaatgtatttgatgggtgttgtataaataataatcatttgaacattataaataagcagttgtgttcaagtttgtcactaatttttagtatacgtggttcaaaatttgaaataaataatagtgtattatataaacttactaatacaccttctagatattaatttgaattttagtgaaataattgaatattatttacgtaatgtttatttccagcgtgcttggcatttcaaattttaaattgcatagaaaatacttagcaagaagcaacaaaaaaaaggcaagcaatagtgtctcgatccaatctcacgccaaaggtccaacgacaatcatacttttgtcattttatgttggttggtttattgattcctcgtcgtcagacgttttagaatttaatattattagaactattattggatttttgtgacaaattataagttgtttttggttcttctttcggattttctttgaaaatctttataaaaacaaattaattacgtttcacacttttatatctggattgagcacttgtatatatattataggaatatagttgaaataacacacatctacataattgtgaactataaacgaattatagtttcaagaggttttataaaagagtgtatgtagttgaccatgacccatccctaaaggtacgccatgttagatgttccaatttttctgttttattattatttatgtctaacagcaaaaaagtattgacaataaactcgtaacagaaaaatgatgttgatgataataattaaacaacatatcaatttattactagttcacaaacagaaaatgtatgcataccataaatatgagtacatgcaaacaatttagatgatgtataaacgagtagccctttagtttctacgttacagtctaagttttgtttttctttgagaatttaatattgcgtcgattaatactcggtacctacttgttagttttatacgaccagtacttgcgagttaaaaaaacatacatattaacaaaggttaccgcccattggaaataaacatgcatattaaaacccacaagattcacaatcatccattcaactgatctttcacatttccagtataagaaaacactatgaggattgtaacatcatagttattacgatataaatattgagtgacgaattagaatgataattaaattatttgatttaattttaagtagttaaagatgtttaacaagatattacattatatccaccaatcatataattaaattcatgtatattgttgtgaaaatgttgaccgcatctttataagatgcagaaactgcggtcaaaattaaaataaaaagaagttaattaacagatagtgagatgagtgtgttgtttgatccaccgaacacacacgcacctcccactaaaagccaattaaccaaaagttgtgaaaacaagacttaagtggaagactgaaacaaaatcaaaataatataataaaagtggatacaacgcgttaaggtttgtacaagtacacatatctttgatcattctcatatgttttgttgcttcaaagctttgcccactttgttcgtactcatttgattccttaggagagaagagggaaatttgtttatgctttaaatttggtgagactgacgaaagaatgagcaataatccacaaggaggattttcatcttagtcgacaatatttcgttgaatccaggtaaaaagcattgccatgattttaattttttctttccttcaaaatagtattgtagggaataataactatcaaactgaattatgtgatcgaaaattttaactgtcgttaattgaggttgaagatgcatacaaattctgatcactgcatgttatttttgcaggttttttttggtttcattttaaaaagctttgtaaataataacacataatttacaggtttgtaccaaataagctctgttttagctttgggtttcaaattctgttttacggttgttgtttgtttccaatatttgatgcatttggttttgagaatgtaatctggcaaatgctttactactaactttgataagaatctgtaaacctgtccttacactagcatagtttttaagtcaacttattatgctgtcataatctgtaaaacagaggattttttcttgatcaggaattcctgtggcatttggcaatagagatggaaggtcaaactcatgatgctcaaaacaatgttcctgagcatgacaatccattgatgaatgtgaagaatccatcaagcaacttgttttctaagaaagatgcacaatgtttgtctgttttatgcaacgggaaatggttacagattgttagaagcagtcccaaagtatcatgtgaggcctctacttgtccaagtcatattttgaccaaagtaggagaaaactatgtggctgaatctgaaaagatgcataaaaaggtaatctctttctcgagcaaaaccttctctcagggaacccttcaattcactatgagagccaatggaacacctcattttgttttcaaattggagaatcaaaaagatgtttatgtggcaagcttaagcagcaatgtccaagaccaaaactcgtatatgatccatctgcaaagaggagaatcatcagcatcctcatcacatctagttgggagaataaatgtatctactttgttctcggagaaagtcttggagagagagtttgttttgttcagtagcaatggtgagaatctcaagataccgcgtacgaggaaaaacagaggactgtctaaaaaagtagtccatgcggtcaagaacgaaagaagaacagcaagattgagcagaacaagcttcatacctgatttaggttcttgggatgagcaattccaagcacaaaactatgattgtctgctcaaaaacaagcttccaacaaatcttgaaacattagctgttgttgtgaaacaagagactattgaggacgaaattggaggatggggactaaagttcttgaagagatctcccatgttccaaagaagtaatgatgctagtgagactgaaacttcaacatcttcaataagtatgaatgttgtgattccttcagggattcatggagggcctgaagatggaccttcgagtttgatagagagatggaaatctcaaggaaattgtgactgtggaggatgggatttgtgttgttccttgacccttcttaaaggccaaccacggaaagaccagtacttcgaactattcatagaggtaaaactgtcattcatttcgtctaacacatcaatcttatagccaacccctttaacaaagaagctagctactttgctaatcttttggtgggctgtttcaggggtcaaaacatgaaacaacaggactaaagattgtgaatgttagtggaggactctacttagttcaattcgaagcaaagttgactagtctgcaatcatttgcaattgctttggcattcatacatagcgagaagcttagaccgttgcatctatacgtattttaactactacagttaagttttttacatatgttaataataataacagaagttggaaaaatgtcaaattttggagagaagaagcttttagttgctaccaagtttgttctctaaccaaagcatgcatgcacggctcctactctcttgttgtgatcatcatatcgaattagatttgtaaaatacatagcagaagcagattccttaagacttgatttatatacaatctatgtattaaaaaaaatcatcagattaattctctcacaaaggaacaaaagctatcgaaagaaagaaaagtgaaatctttttttgaccgttaaaccgtgatctttttgtgaccgttaaactgtgattttgtgaccgttaattgtgattatcaattaccttttcttgtgcttacaaataagagtctcaacgcttcttctaatcaaagccgatggtgataataaccgatggtgatgatctctgaaacaaccgtaattgatcggagcgaaatcacatcatcatcgtttcgtgattgaatgagaagttacaaacgttgcactgtaagcaccttacacattttaactaattaagctttttcactattgtaatgtgttcataacattataacaacagaacagaaaagaacttagaaaaaattgtcaaaatagccaaatcatttgaatgtcagatacatattgtcagaaaataaaaatatcttgctaccaaaattctcaaatttgtatctagacatatccatcaaatacaagcaattgattgatctgatcattagacaatggcattggcagcactagcaatccttggccaaagatcagcacactctttcccaataggaccagtaattgcagaacctttcatttctcccttggggttgacaatgactccagcattatctgtgcaacaaaaaaacacagaatcaatacttgctttcatacacaatcactaacaatgatcaatttaaggattatatagagtccatatggagcagatgcaagcgttcaagcaataaagcatctgtaacgaaggacacaattaaattttccagacttgtacgagcatcaacaccctctaaacgtgtcggtggatacttgacttaagcctggtgatatcaatcacataaactgacaaaaatcatagaatcagtaatactaaaacaatgggaatgtagagttcaaatggagcagatgcaagcgtttgagcataatagtatctgtaacgatagaacacatttaggtgtaccagattttgttttgtatttatacaccctctttatgtttcggtggatacatgacacaattctggaaatgtaataatctaaatctggcataactagaccatatactatctattcataagctagatgaccaatagaacaaatcaagctattgataattcggagtccaagtagtgtaacggtattaaacacacactaaatagtgttggtgaacaaattacgaatcctattagggttttaagagagaaagtaagtaatctaaccttcgaagtacatgaaaacaccatcctttcggcgccatggtttgcgttgcctaacgatgacggcaggaagaacctttttcctgagatcaggcttaccctttttgacggtggccatcaccatgtctccgacgcaagcagaaggtaatcgattaagacgacctttgatacctttcacggaaatgatgtagagattcttagcaccggtgttatcggcacagttcaccgtcgccgccaccggaagacccagtgacatcctgaatttgttaccagaggtacctccacgccctaatcgaaaaaaatccaaatcaacaacgattaaaacgaggttcgaaaagctgaataaacacatattgatgaactgaaaatgtaacagatctaacaactgagatagaggaaaagtgcgaacctcgcttcgacattgttgacggcttgaaggaagaagaaacgatttcggtttaatatatagtgacgcattcttcttgtagggtttcagtaggcttaaaaaatggaagaagaaacgatttcgttttttagcccaagttcaaagtatattaggcccataaaagcccaagcagagttttaaattaaatcagacgcgtcttatcactatttggagagtcccacatcggaaaggtgagagagtttgccaagggaaactttagtatatatagacttcactctccatattctcgaaccacgcagccatgtggtgagcacatagcgaactattctttcgccttttactaaagaataccgtgtgctctccacgctaagtggcatacgcctatttttggagggttcccactttactgtgggtcccaacatctctcagtttaatttttggtctcgaagtatctgagaatcctttgtggcaactctaactgttagacaattaaatctataacccggttattaaaccgtatatacccagttaaaatgcaaacagttatttaaaatatcctctattagagtctttgtgttttttgcctgttgatggatatatgaacgagtttgctatctagaatcgatagaataagctttgaggttatataagatatttggattggtttctggtgaatccattatttgtacaagtttcatggtcgtaagttgtaataactgtatttcttcataatcttctgttatagttgttttcatagaactcaatttgattagcaatatttgtcgaatcctaaaatctgaaattgcttgaggattatgagattccatatttctcaaagttaaaagataactgaaagaatcaatgatcaggtcctgaccagtgccacttgattgatatatagttgaccttaattgaaagtttgaaacaaatcccatcataagatcataaaaaatatagttatccagttaacaattaaaggacaccgtttaagtaactgctgcagacagaattgagattaagtattgacccgaatcttatcttcttttctccggatacatcaactacaacaacaaccaggtgcaaaagtatgttgagtaacaagtttcccaacaatgttttatgctggattctgttgtcaacaaaagtgaggttggattttgtttttctctctcaaaagattgtgtatatggaagagaatacatatggaatttacgaaaaacaagagattcggcttggcaaaagttacttggaataggagatttgctaattatggttaagttttcatgaggcttcctcattttactcacatcctctctccttccttagcacagagaaatttgttgtcgcctagctttttccaagttgtctctcgtcttcctccacctcctcatttttctctgtttttttgttcgttgtctctcatttttcccttattaaaaacacataactccttctctctcctcacttctcggacatctgatttcttaaacccgtatccgtctggtttctatttccttcttgcctcccctccgtgatggttcgtcattctcggagggagtcctttttcgacatggttggctttgaggtttgtcctgataccgatcttctttggccattcgggaagcttgatggtcttgatcgggatgaaatccgtgaaaccgcgtatgagatctttttcgccgcatgtcgatcatcacctggatttggaggtagaaatgctctcacattctactccaagcacaatgctggtgaccatcaaggggatggaataggaggaggaggaggatctggatcatctaacggctctggattcgggtctttaggaagaaaagaagtgttgacaacaccaacaagccgagtaaaacgggcgctagggttaaagatgcttaaacgatctccttctaggcgaatgtcgacagtagggacagttgtaggggccgtctcagctccttcatccccaggtaataatggaagcataggaagtggttcaggacactttagccctggggctgggttttttacagtcccgcctgctcggcctcgacgaccgttaacctctgcagaaatcatgaggcagcaaatgaaggtgacagaacagagtgacactcggctacggaaaaccctaatgaggacgcttgttggccaagtaagttgctctgtttttaaattgtgaatgaaactctgtttcttgattaattaataaaatgtttataactgttattttttagaccggtaggcgagcagagacaataatccttccgttagagcttctccgtcacgtgaaaccatcggagtttggtgatgtacatgagtatcaaatttggcaaagacggcaactcaaagtccttgaagctggtcttctcattcacccatcaatccctctagagaagaccaacaactttgcaatgcgtctccgagaaatcatccgccagagtgagacaaaagccatcgacactagcaaaaactcagacataatgccgacattatgtaaccttgtcgcctccttgtcatggcgcaacgctactccaacaaccgatatatgccattgggctgatggatacccacttaacatccatctctatgtggcgcttttgcagtcgatatttgacatacgtgatgagaccttggttcttgatgaaatcgatgagcttttagaactgatgaagaagacatggataatgttggggatcacacgagctatacataacttgtgtttcacttgggttctgtttcatcagtacattgtgacatcacagatggagccagacttgcttggtgcctctcacgccatgttggctgaagttgccaatgacgccaagaagtctgatcgcgaggctctttacgtgaagctcttgacctcgacattggcctctatgcaaggatggactgaaaaaaggtatttctttttgccttgtaaatggacttgatcacacaaaactgaatctgattgtgaatgtgtgattataggttgttgagctatcatgattattttcaacgagggaacgtgggattgatcgagaatcttctgccattagcgttgtcttcttctaagatcttgggggaggacgtgacaatctctcaaatgaatggtctagagaaaggtgatgtgaaattggtggattcttcaggggatcgcgtcgattactatataagagcatctattaaaaacgccttctcaaaggtaatagaaaacatgaaggccgaaatcgaagaaacagaggaaggagaagaagaagcggcaactatgttgcttcggctagctaaggagacagaggatcttgctttgcgcgagagcgagtgttttagcccgatacttaagagatggcacttggttgcagctggagtcgcctcggtttcgcttcaccaatgttatggttccatcttgatgcagtacttagctggtcgatcgacaatcactaaagagactgttgaagttctgcaaactgcggggaagctcgaaaaggttcttgtgcagatggtggcagagaattcagatgaatgtgaagatggcggtaaaggccttgttagagagatggttccgtatgaagtcgattcgattatcttacgactactaaggcaatggattgaagagaagttacaaacagttcaagaatgtttgagcagagcaaaagaagctgaagtatgtttattaaagctttacttgcagttcaagtatacaaaatgtatcatctatacactcaatatttttttctgtagacatggaacccgaaatcaaaatcagaaccctatgcacaatctgctggagagttgatgaagctagcgaatgatgcaatcgaggagttctttgagatccctattgggattacagaggatcttgttcatgatcttgctgaaggattagaaaaactcttccaagaatacaccacattcgtagcatcttgtggtaagtgaaaggatacaaatttctcatttcatacaaaccattggttactaattggtgattgttttgttttttgtcaggttcaaaacagagttacattcctacgcttcctccacttacaagatgtaaccgagactcaaagttcgtgaagctttggaagaaagccacgccatgtgctgcctcgggagaagaacttaaccaaatgggtgaagccccaggtggcaaccacccgcgtccttccactagccgaggaacccaacgcctctacattcgtctcaacactttacatttcctaagctcacaacttcactctctcaacaaatccctctcactcaacccgagggtcctccccgcgacgcgaaaacgctgccgcgaacggaccaaatcatcgtcttatttcgaattcactcaagcaggaatcgaatctgcatgccaacatgtctctgaggttgcagcttaccggttaatcttcctagactcatactctgtattctacgaaagcctataccccggagatgtcgcgaacgggaggatcaaacccgcgttgcgaatcttgaaacagaacttaacgttaatgaccgcgattcttgcggacaaagcgcaagcattggcgatgaaagaagtcatgaaggcttcattcgaagtcgttttgacggttcttctcgcgggaggacattcccgagttttctgtcgaacagatcacgatttgatcgaggaagatttcgagagtttgaagaaggtttattgcacttgcggcgaaggactaatcccagaggaagtggtggatagagaggcagagacagttgaaggagtgattcagcttatgggccaaccaacagaacaacttatggaagactttagcatcgtgacatgcgagtcaagcggaatgggtttggttgggacaggacaaaaacttccaatgcctccaacgactggacgatggaacaggtcggatccaaacacgattttgcgagttctttgctatagagacgatcgtgtggctaatcagtttttgaaaaaatcgtttcaattgggtaaacgaagatgacacaaaagagaaatagtcaaaagaatgtcatctcgctaagacgtgatctgttgtatattttgagattaagatgttacagaaccaaaaaaaattgcttgttcattagataaatgagaaaaatcttgaaaatgtaatgtttttggtttatacattaaacccggtttagagacaaccgagagcgtgtcacccatgatctaacgacatcgtattgtcgattcgatgccatcaatcgtataacttgaccttccgttccctctctccaacctatcgtcgctcgtaagcttctctcagttcttcttccgcctatattcaattagggttttgaaatttgtgttaaagttcggatttttggagtagtagcttgtgtttggttctctgaaattgactagaattcatcaatgcttcaagtcctgtgacgaaattttatctcgattctgattgattacatcacaaaagtaaacatttttcgatgattagtgaatgctgccccatagtaggattcaaatcttcttgtttggtttgtttgcagttttagacgttggaaaagtttcttgttaccatcttaaacatttgcctagctctctcattctttgaagctgtctcgtacttgtcatctcattatcaggtagaatctgcccttttactgggaagaaagcaaacagagcaaacaaagtgtcattctctaaccacaagaccaagaagttgcaattcgtcaacttgcagtacaaaagagtttggtgggaagctggcaaacgttttgtcatacttcggttatcaactaaggccttgaagaccattgagaagaacggtctcgaagctgtttccaagaaagctggcatagatcttcgtaagaagtagatattgtttagatttatctggtatgtagtcgtctttttggtactagtcattacccttttgttttcctactcaattcggtagtctctatgagctttgtcccattcatggcagcgtcgggttagtccattttgttcaatccttaatgtctagttcatctcaagaatcgccataaactacttagataagattgaaaagtatatgttgtcaagagttttaatcttcctcagaataatcattgaatggtaaattgtatcaattcttacgtctagtagctctatcatcagcttgttatttcggtgtctccttgaaagagagaggtcataaaccaggatatctcctgtgcttttatcactgctcaggtggttaaccattttctttgtaaagcatatatgtttttctctatgacagtcaagaaagacagagacaattcacacgcaacacaggtgatcaaaaccatgatgtgttttactctttgtcactgatattattatcattacatgtatcgactgattcaacaataggattctcagttttccctttcgtcttcttcattgatagctctcctcctcctgatccttttggcttcctatgacgtgatgtagactttctactatgagtagaactatctgaaagagggtaagaaccttccatatcgttggtggtaaccgagacaacacgcctcctcctaactgatggatcattcgatgaatctatcgacccgtgcctactcctgtggtgacgtcttgtgttttttggttgcatatctgatgctgaggcactgctgtttcgcctaggcggagaaccgttttgtgagaccgtctcggatttacgccttgtcttcttgtgctttggtttgtcggtaggaggcaacaactcttgtaatccaactccttctcctatttgattgttgttggcatctgctcgagaaactacttgaccattctcgttttcttgaggtttgaagtcacccatctacatgttttgttttactaatgatgagtacacttagctaatacgtatataaagtcggaaaaatacgtacagatgtacaaagcgtacccagcttggcacattggtcgcgggaccgtcggatccgatgtgggcgacatgctttacatcggtaggaaacccgatctgcatgtccttgtctttttcttcgtctgtaattagattttttgttttcatatacatacagagatgtgacttgtattgcaagaaaagttaaaattgttcttgttagtgagtcgatgagactcaccgaaaatctgagtaatgtagcgaaggcctttaagaaggcctttcacggtcgccatctcgggaggaatggtttccggttagaacttcagatgctgtaactctgtgaatgtgccaaaacctaacgtgtagaggaaacgaaaagaacaaatcaaccattgaatggaattttttaacagattagcagatgtctgtaaacattgaaacagtccagaccagacaaagatttgaacgagatcagagaattcgaaccttgatagcattgattttcattatggaaataattgagaaaagaattggaaagggagagagaaaagagagagattaggtttcgaagagggagggagagcactaaactttatttaccaaaaaaaacaaaaaaaactttttcaaggtgtttatttttactgtttatatatatatttttataaatagaactaatcttattttgagtttttgttggtgataattgaggcaacgtagtgtttactcaatcaatcctccatggggaaaaaacaaaaacaaaaaaaaactagtcgacgagaggattttacgggttgatgagaggaaggagacgagaccatcaatacaaaaaaatattggtagtctttcattacatacataattgtttcaagttttacaggaaaaaaaaccacgacaggaaagagaaaagaacaattccatgaaatcaaagttgtaataaaaagaaaaagaaaaaaaatgttgtaatgcaaagtggtttgggatttcataatgattaataaatcggagtggtgttgagagattgaaagctcttaaattggtggattcatgagtaaagaattgaaactttgcatcggattatgattaatacgtatccattcatatatgtatttgccaagtcttaagagttgtttggtttgaccgtttgtggttattattttggatatatatattcacgttatatccatttgagtttataataatcatgatgaatagcatataacaagaagaaataatgcaaaatgaagaacaaaataatatcttagaagaaatacatgtataatacactaatcagtccaaataacaatagaacaacaacaaaaaagacatcatacttctcaaaaagccctaatattttgggatcgagagacgagaatcatatattttcttgtttttattaattaattgaaacggacaagtactaccaaagagtcacagactcacagccttaatgacaagtcgatgggactggagttggctcctccgttctccgccacagcgctatcctccggtctccattggtccagctggcaaagaagcggcagcgtacgggtacctcccgatgacgtctccggaaaaagatccatcagtttcggagtctccggcatcgtcgtcggcggcatctttggcagcaaaaacttatattttctggtcggactcatcgccggcgcatgaggagatcctttatggaacctcccttgatcatctaagtaacctctacggtaataattcacgtcaaactgattcctcgcctgaaaatcaggattagggttccggccgtttacgttagtgtagtggcggaaggtggtgggtgcagcagcggcggcggcggcgggggaggaagagaaggtggaatactggcgattggagtgagcggcgttgtagtgtgagatcagctggtgtgatgataagaagactctcttacaaaccgcacattcttggggttctgaaaatggcatgatcattagattttgtgttttatagtattgacgatgcaagagagatatttgagagagatggagaacctaagacacatctatacaactatttatatacaaattttatgtgtgaaaacaaaacaaaacaaaaagggagatagtgccaacactatatgaggaaatatatttttccatgtatgttatagttctgtcttaatttgttgatgatgaggatggatttactctgtcatcatgcatgaatttagttcaggattttttagtaaaatctttctattaaagaaaataaatttatatatatataggtatatctaatcatataaagaagtcaaacattgaaaggcaaaattaaaaggtaaggtgaattcaatgcaatttaaaatttaagaatattgattgttttcattttgggaaggatactaatgggaggttgattatttgtgggaaattaatcaaaccacttttaggaatttttaaaaggtaaacacatattatacaatccttgctccactgtcatacaattatcttttgggaagaatccctaattaattttagtcatctattttggtaaatattaacaaaaatgaaatctttgcttctggtcttccatttaatcattttatggtgttaactatttcaaatatgtcctaaaacatttatggttattggagattgaaatttatttcttctcttgttgagagaggaccggtcttgagatacacgcggccccaggacccacacaattatttcgtatacatgatcggctgtgcttataaatacataaaacgttgtgatattagtgttcttaatatgaaattttgagtactataattttagtttattgttcgccattgaattaactataataaaaaatattttttttaatatgattgccatgaaatatattactatcatcaaacttattgcaaatgttaatatgattaaatcattacaatgtataagacatatcatcaaacttattgcaaatgttgaatatgattaaaccattacaatgtattagatatatatgttatctacttattatgatatagttaaaataatattctcctagtatgttctaaataatttgtaacaaaacttcactaatttatctaataatcaattgtcatatgtttcacatattaaaatggttagttgtacatgtgactttatcccatagacaaagatttatttctatgattgctatactaagatataaattttaagaaaatgttgaaagttgaccaaaaaaaatattaattagttttgtaatccacatacatgtaattacattattttattagattgtaaatttatttcaatacaagaattaatttggatacataataagaaataatttaaaaagtcagcaaaattaaagtatatttatatattttttatctgttaagagaaattaaattcattgtaattgcaagattggcttgtttcaaactcttttagagttcagacacattattgattatgattgccataaaattattggcgctagagagaataatataaattgaacaacactgatcttacgaagaaaagccatgtataatatatatttatatcttttaacaaatcatgtttgtttcttacttaccaataatttctgaaacaaagatggataaaagatgatccaactgtgaacctggcgggcggcaaaatgcagacagtcacttcctcttgctgttcccaatactgaggagctcaaggctctggagggtaatgtcacgagcggctctcgttggtgcagcttttgtggctactgaggaggacgaaggagcgaactgggtcctcagagttgtagaagaccgatcattgtttgggatgagtctgcttaatcgattctctgtgaaatcagctgaggaagtggctcgaacacttgacccagcaattgcttttcttgacgaactcaggttcctagataaagagtttggtctctcctggttttgctgattcaaccaaaaaaaaggtactttatgtgcaaaatcccaaaatgcattcaaagaatctaaatttaggacaatttcagtcttggaacttccgaggtttaccaaaaatagtgtatctattttgatgtactaaccgtgtccttggatgcaagaacattctctgaggttcttggtctactagactgatcagcttgaacgccggttcctgagccatttcttctggtgtatgcctcgaaaacacctgagaacctctcacggctgtcctgtccaactgtatataattcagagaaaagtttgttaatatctaagtttcctctacaagcgttaaagctgtgtaataactacttgaccagaacccgagctgaatcattgattttgagaacggcataacaatacattttgaaccggagagaaaagacaggttaattcagccgaaaaccaaatcgggtaaacacagaatgagagcagttacaaggaataaaaagttactctaccaatgattgtaaagttttaaatctgatgcttacttggaggcttttccgctttgtcggcagatggtactggaatattcatagctggtcttaaagttggctaatggaacaggaaaagcgtgagaaggttgatacactattcaaaatgataagaattctgcacatacagctagcttcagaatggacttactcttggtttggaattcgagctggaactggagccgaactgtggatacctcaatattgtccaatcaaatacatagtcaaactgataacctgtacatatcagaatcaaagcaatttgttgattgtgtattatgttaaaaatactcaaacacaagcacagtagaaagttatttttgacaagttcccaaccttctcggataaataggtctctgaaaagcctctttaggtatgaataatctggtttgtcttcaaaccgtagtgaacgcacatagagaaaatacgatgtgaactcaggtggaaagtttttacagaggacctgtcaaagacaatttttaagtacttcaatttcagatctttgaattcaaaaatactgccaaaaacattgcaagtcaatactcaatataccaaagaagtttatatttattggagcgggaaacaatacctccactggtgttagtcttttcttttcactgatcttgtcatacttctgctttttggtacctgcacgaaggccttgccaaggaaggctgaaacagaaattaaggatcagggacagctataattataggaagaaaatcaaaatacagatttatcgatttaccttcctcgaagaaaatacataagcagatagcctagagattccagatcatcccttctactttgctctgtgtaagagttattatattacaatatttataaagatactgatgaagtgccaagtctctcaagagcatacaaactgatggaatgcaaagaagacagttacctagggaaaatatgagaagcgataaaaaaagactcaccaattccaagatgggtgttaacacttgcatatcgagctgttccagtaaggttcttgttttccctaagaagaaacaccccgattaacaaagtgaaagtcatttaagattctttctacatgatgagacaatgtaagtacctgtatggaatatgcttgtgtgtttgaagatctctatacttcttggcaagcccatagtcaatgatgtacacctgcaaacgaagaaatgaagatgtaaccaaaaaaagaagagacacaaatgtatccttgttatcaaaataggcaagggtctcaggcataagtcttatgaaaaagtcacctggtttgctttgcgtccaagacccatcaaaaagttatctggcttaatatcacgatgaaggaagcctttaacatgcatatactccactctatttatctggaaaatttgaaaccgaaatgagttagtacatgtaatcaaatagaacagcagaagaaaggaaaagtatttaccatttgatctgcgagcattagaactgtcttaagagagaaggatcgactgcaatagttgaaaaattcttccatactaggaccgagaaggtcgatcaccatacagttgaattcaccctcaacaccaaaccatttgaggtgaggaataccagcttcaaataacacaaatgacatatatacattaataaaagaagaagatggtaagatttgaagtcaagaaagagtgatgaaaactaaatgcaaagcctacttcctccttggagaagcatataaagctttgactcgtaatgaagctgaggatgcctagctcggagaggttcctgcgtaaagaagcaaatatcgagtttcaacactaagacaagtgatcattaagacaataatatggagatttgagaactgcaacttacaagcttaacagccacttcttctccagtttgtacattcactcctgcatacaaaaacagattcaaagaaaaaagagttagaaagagtaaagacatttacccaagaggaatataagaaatcaacaatacctaggaaaatttcaccaaatgagccacttccaagctttcgtccgagcttgaacttaccaccaaccacacgatccatttttctatctcccaatccaaataagtgtttttattggtgctctagtaaccttgatctctctgaaattactctcaccaagatcgccaatcgattcactaaaattcgattgaatagatatatatatacacacctagatcgatttcttctagctacgaaatcaacaaaccaaaaaaaaaactagaaattctagtaaaaatccccagaatctcaaattatcaaagatggaaactttcgatcgtaggatgatgaacccacaaatcgatttaacaaaaaaaaaactaaaatactcttattaacttgacaaacttagcttctgctacaaccaaaccgaaactacccatttacaatcaaccatcatcatcatcatcatcgagatgcaaccaaacaaagcttcagactttagatcacagaataattagaaatctccttcaagaaaatgggatgaaaattaaaagggaagagcgagaaaaatagaaaacgcggcgagagaaaattatcgattgatggggaaatctgattacggatttgattacggaaaatttcacaaaagtagaagagaggcttatcttgttgaattagacaaaaaggtcaacaactactaatagttgcgtacttatttgtataaactgtgaagtctcttcccacatgctaatttatgtaaattaagctttaccttatctttttttcatttggcattattattagaagaaaacatcttagtcaagtcaccatataataatacaacaacaaataaaaacaataggtcccatcattagttatattaaattcttgtataaattacatattaaactttcgaattggatgccttttacttctgtaccatctatattttaaaatagtatatactatatagagaataatttgtttttcttactttttgtcggcatttattaaaatttcacagttttcccaattattcaaaaaaaaaaaaatagttaatcaaatagataaccacatttgtaaacattctttaaatggtcatagaaataaatcaataatattgatccttttctcattttgagaacaaactaatgtctaagtttattttttgttgaactaatcaacatctaaattgaatttgtcaatagttatcttcttctattaattatgaaattatccaaaagtctatgctttttaaatttataatctgttttactttttcttcaataattaaacatattatgccgacaccaaagttaacattctaaccaaacacattatagccaacacataatacgacatatcctaaagagttgaaaacgtaaatgctaaaaagaggtaagacttaagataagatcagtcataatacataagaaacatcgaaacagaaaaattaaagaatatttcaagaaagtaagaaacaatgaataattttagtattttatataataatgctttatgtcgtacaaatcaactacaaaaatcaaaataaaactatataaaaactttgtgggataaaacaatttctctctctttgcttttgatatgttttttactcgctgtccctaaggctttcactggtgagccaaagtttcttctggacaatgaaaacgacattgttctcaccatcttcactgtcttggtcgagttctgaacttgtatttaccttctctgatgccacagtctcccaatgcaaagcctgcaaatacttcttgattgactcaacaacactctgcttatctctgatgataacgaatcccgtaggtctaagaatccgatccatctcgattagtagatcctctgcactgcatcctttgcttttaatgtctgaaaatatagaccacgcgtgcaacagatcgtatgttcgaggatatgtagagaaagcctcacacctaaattaaaaccggaaacaaaaaaaaagaatggtgaaaatatgaactagtgtgacaagtgagagaatgttttcgattttcaggtttcgggtgtgtaccagttatgatttgttccgattaaaccacggtcgtagatcagttttagagtgttgggaccgtcgggagagacaacgttcatcacccacacatctttgtctttaagagcagctgcgaaagaacccatgtgagctttcatgtccattatgttcctcacagtgtttgatttgactttcgatgacatcagattccagtaactgtccacttgttgtttccaaagttcctgtaaacaaagaagataagcaaagcaatgtgctttttcaataaatctgtggaagaatgatgattaagtaagatcaatggttgcgaaaagatggcagttatagtaccgtgtccttctcaaacatgtcggttgaataaccgaaatccgcaagacggggaggagaagaagtcaacctagctggccaaggagctaacccacttcccttggttttatggtcatctgtatttaaaaaaaacaaagcatgactgtgacatatggcatacaaaacaaaagatctggtcctaattcctcaaaactcaaaataaccaacggaacagaaaaaagaagcaaatacttacgcttggagtaaggagtgatgcaagcttccattgaaacacccgcaaccgcatcaggatcagcatctgagcgacagagaggaggctgtgtcccgggctctctctccaagtaacagtcattactcaacggtttctgccaaaccacagtttggtttcttttaacggcaattctccaacacattctttcaacaagagcactcatctccttccagattttcaaattctcttcatcttgtgcgtaagcttcaggagacgaatacgcgaaataacctcccggtcttagtacccgatcgagctcaagaagaagaagtccgtctctttgaagccaatcaatcctacatcgagaacaatgagcaaactcgaatgatctgctcgggtaaggaagccttttggtacctaaaacaccaagataagcagggattcctctttctaacgcaaactggatttggttctgatgaacatcattaggggctagtgacattgtcattatatcagacgcgagaaggtaagctccaaaactcgcaactccgcatccgacatcaagaaccgttcttaatctcccttcgtcattcaatacatcgttcgaaaagttaagcatctgcaaagtcaaaaaatcattagagacaagttatcactagaaataaaaagtgagcaaaagactcttacatttgcgatcgatgcaatgtatttatcagcaccgtaatggaaatgagtgcctccaccgggaaaagaaattttctcgcctttctcaaccatccagttctgatcagacttctcttttgcaaggtgagtgtgaggtatgtttgctttccacacttcatctctactcttaggccacttaataggaacctaaacgcaaatcaatacaaagaacaaaacaatatcaagacaatgtaaccaggaaccaatcacaaatcaaagcaaaacaagaaagcaaatatagcaccttgtatccagatggtggaggaatcaaacaattaaaccgtctttcgggaggaggacaatgccgttcataatgttccattaaagagagatcaagcttcaacctcatttggtagatgaaattcctatctaagcaagggatgatttccgagtgccggtcatcacaaaccttaacatttaaaccataagttagctaacattattaacatatctcaaccagttaccagacctgagaatctgatcaaacttacaggaaaacttttggcgacaacaagactgtcttctgcattagccacagaatcatcctgtttggtatcaccattatcatcatctccactcaaataagacgatccgagttttctcaaagatcttccatattccaatgctgatgcaccttggctagaggaaccatagtacataaacaagaaacagacgaatagagccacgacacagaccgaagcaataagccgcttctttaggcctccatcagatctccctctcatcatccaaccttactatcctcccaaaagagctcttcagagtcttgataacaaaatgctctttccaagaaagagtttctgcagaaatcaagaacagaacacttataaagaatatgactttaagcatagagtttggtaaaaagccactggcacttaaaataaacagaacatgataaattcagacttggtagagtcagatccgtgtttattgggtcagaaaccactcactcttgattcagaacccaagttaagtgtaaaccaagtaagtaacacaagtgttataaaaatggccaccgacaattattttttttgtcaaagattggatctttatgcaattaaatagaaagtagtagtagatctgagagtagagtttccattttatcgggagagcttttaatgaaaagtctcactcaatttcccaggaaaagtaaaaaaaccgctcattgattaacgaatatctcagagaatgagaaggaagcaaaatacgaatctcaacgaatgaaaatcgcagaagaaaggaaaaaagattgaaaactcaccgaccaaaggagaagagtgacaaccactgtgcactgagagagatccgagaatgggagagagtgaatgaagtttgtgtattcttctttttggctttaaagtaacgatttttctttttgggcataaaagtgaataaataaaaatcgaaactttagagattcagatctccatctccacaagtaaggaaggaatgagaccttttttcactggcgaaatgtttattcctataattggaagataagtacattgttttcgttgtaaaggtctctttccatgtccacactgtcgacttgctgttaaatctttttgtttcccttatttttatttgtctagtaattaatatttggagcaaagatatacatatagattgttacaacttacaaatattttattagatttttcatgatctttgtatttagatttccacttaatgcgttttcaattccaccattaacaacaacccccacatggtgtttatctttctttttttttgtatatcaaattaatttcttgcaacttattttagatttgctatgaaaaatagtgacgagaaaaaattacagttgcctaatgggagaagtcagtgtcactgcccatcaacacggaataaaatccgtgaacgcgtttttattcattgtgtcggtcggtttaatgacttcaaatcggtgatttacttcattaaccatgcaacttgtacttattcagtttattgattagtttttaattaatatcgttcgttcgacacactcgtgaaaactgaaaggtggatgaccgacgagatctagatctgaccattaaattgtgttctcctccgttcctatatagtattttgtataattagaataattttccatgcgaatacactgtttggttaaaagaaaaatatattttgtttttaaagttacaaaaaagtttgttgactttaaaataaagtttacatcaattttttttgacaaagacagtgataagttcaaataaaatctgttgatttttaaagacagtgattttaaaaaaaaagtttcttgattttaaaataaagtttgttaacgtgttagttcaattctaaaactaacatagttttcttgttttgggtttttgtttattactcattctatttcattttatctaatgtttctaggtttggacacataaattatttgctataaatttttctatcttaaaatattattaattttatctatgtaaaatagttcaactaatgaacaacataattcaaagagtgaaatattgaagttgcgtcaaaaattacaaagaatacaaaaacggaaaaagatcaagctaaattggctggtaagttaataacggtctaaaacgtgtattagggtcctactctattttgaagctcatcagccatatataagggtcgagagttgtaacctaaaacacaagaaatcgaatttattgaaaggtttcttaacaaaaatctacagaaagacaggccataacataacaaaacagtaaaggaggagaacgaaagtctacaacggaaatgaaagaagaaacaacgacattacatatttacttcaaagtgtttctaaaaatagcttccctttttcgacccttcactttctttcgacggaggtgttacgactggagtgctacgatttggagtgaattttgactgcttgaacgcatgctcccatttcgactacattgagcaaagcgcttcgactgataatcaaatgaaatgatttaaaagtggtacgacaatagtattttgacgaatgtgtttattgtttgcagttgcaacttgttattacgattaaggtgtttattttctttgctacagttacgatcttaatgctgaaatgtacttcagttaaaatgtttcgacttgtgttttgactaaaatgttcggactaatttgtttgactacttgagtttaaatcactcgtgttttgattaaagtggtcggactaataatttgttgccttattaagtactataacatgttatgaaagtggacttggaagtgactagcgttacatttcttccaaagggtgtttatcatatttctaagccttccactaagtttcgtttagtaggaaaataatgttttcccctaaatgaatattgattttgtgtttaccaagtggtacgattaggtattcaaatgttacgagtaaaaagaataagtgcctgagttaaaaaaattttaaatgtgtcgcccctaaatggatattgactaagtgtttactaagtggttcgactaattgttaactaaagtgaatttgttcaattgatttagtgtaaattgtaaagtgcgtttttagacgcaaggtaatgactaattgttactaaagtgatttggttgaatatatatagtgttttaccaagtatgtttttcttaggcgtgagttctttatgactaagtgttttttttttttggcgtgtgactaagtgtttttaggcgtgtgtctatgactaagtgtttttaggcgtgtgactatgactaagtatttttaggcgtgtgactatgactaagtgcttcggtttatttttgacaaagagttaaagttgtgcctaagaagagtgttttttatttatttggcctttttgatgatacgtgtttcgacaaaatattttaaatttttaactaacatgcttagagtgtgggttttatatacactaacatgttcaaataagtgtttaaaagtgtcaagtttttcgactaaaaagagattcctttcgactaaaaagagattcaaaactattgttgatactagtggttcctaggaaagcattgaaaaatttacctcaattgctgatcatgttttggactgttgctctaagtagtggaaattgttgttggcttgaaagctctctccacctcgacagattcctttttatcgcctccttaacagtattccttggaagaaaaaaagtattttgattaataacattatcaagcctatataatcaaagcaaaattatgagactcatagtataaaacattgcgccgtgattaattagcattgcaatccagaagttctaagctagaaatagcaacaagaatataatagtatagaattaaagtcaacataggtcaaaacaaagcactaatcgagccagtagaagtaatccgagcgaataaaatcccaaacaatacggcaagaaactggaaattaaactagatagagcacacttatctaaagatatggacgcagtcgtgaatttaaaactcttaatcatatatatgaaagaaggctaactctctcccacaacttgacatatcagcacatgagagcttgccacctagacttcataaaataagtaatacataattagtaattaattcaacataacaattaaaataggaggatataattaatgagaacttgaaccatcactttttttacatttttaattcaatatatattttttttaattttgagatccacttaagtggctaaagtgatgataaaatccaaacatgttacacatatttcttgcctaaaaattagacgattattatgaaaaaaaataaatgaatatgcagattaaatatatataagcttttcgagatttatgctaagaaaacaagtaatttgaaagatgtttgaaaaactatccttataactaatacgtaaaatataagattatgacaagaacttaactaaactttctaagaatatcaagttgaatatgcttagattgaatatgcagagacatggttaataaagacatgttatatttttagtgtaagaaataaattttctaaaatttcaccgtctcataatctatacatataacaaaaaaacaaggatatataaattcaaaaaaaaaactgagaatctaaaacaacaataaaaaacaactcaagtacattcgtttttcagatgaactaatatagttggacttttcaaaaacaattctaaatcatatttatgtttcaataccgatgcatttaactttactttatataaacagatattatataaaataatttgtaaatagtaatacgtaaacccgcactacgtgcgggtactcatctagttaaaataaaaacgtgtataaaagtaactctcaccttatgatttgctgcgttttgccgccggatctgatgaagaaagagagagggacaagaagagacgagagtttttaaagtttccatttacatcttttggattatgtttttaacgatatcggaggctgtgtgtattactatatatagagaagctttctttaccgttgagaaaaagtagtaacggatagtttctgaattttgaagtaagttaccgtttctaagttaccgttcccgttctgacatctcaacggttaaatcacagttaccttgtccgcaacacgtgttacaattaaaaaagttttattcttgctgggctgtcgagaccggcccaaacccatcaatttgttttttaatttttacatgtccgatatgaggcttaaaggataaactggatttgatttaaggtccattatatagatcaataaaagcgttcaaacgttatgcgcaactgtggtacgtcattacatgggagttctgtatatccgtcatatcaaaacaactgtaagaaagcaaatcaagctatatataacttatggactttcaccgtgagctcacaaactcatgagaaaccttcttttctttcaaacgaaagaagggtctttgaacctcttgaaaacggcgtcaatgtctgccataacttcctgcgaaaacggccgctccgtcatcagaaaagcatcaatgtcttctttaagttgttttaccgatgtggccccgatgatcgtgctcgtcacaaagggcctgtcacgtacaaacccgagtgctaactcaaccggagttaaaccgtacttcttcgccacctcaacgtattgtatggttgcttcctgaaatcagaacaaagataaaattgacctcaaaacacttttacgaatatggctttacaactagattcgagctaatactgtttcttaaattgttttacgacataagaagaagtaagcatagttggatcaagaagaaaccttggctagtgatcccttgtaacgttccatatatcctgggaaaagattcagccttgcattttttgtagcttcttggtctgtagccaagtatttcccagacaacgagccgcctccaagaggggaataagcaagcaagccaacattgcaattttttgggtggcatacttctaccagatcaactgtggttttaacccaaaacaaaagagtttagaacatgctcctccgacacacttgctctcaaggtattctagaaagatttaccttcataccgacatctaactagcaagctgtaaccattctggatgctcacaatctttggtagtccttcgagttttgctgtgttaacaaactccgtcactccgtatgaagtttcattcgagacaccgatatagcgaacctgttgcagaattcgaggaacacttcaaaactctgtgtttgaggttatataactcaatataacatctgatttttaaggagtagcactacctttccttcaactatgagatcctgaaaggctcttagttgctcagcgaatggcacactaggtctccatttcgacgtttcatagtaaaaatcaccgaagagtggtacgtatcgatctggcctggactgaaaaaaagatcagtgtcatgattttctgacatttgatgatgaaaaacgaaatattttgcgcatgaaatagaaagacacttgctcaaacaatgtagaatatgagttaagacataaagcaaaaataaggcgatgttaccagtgtatttgaagcaagtcaatgtaatcagttccaaggcgcttaagacttttctcaacactttctttgatattagcagcatctacacgcagaatctcaccactgtcccttatgtaagctgacctttctgagtacccacatactttagttgccaaaactatctgtatacagaaacaatgaacatcaatatcaatttttataacttcgattaggttttgctgatatcatatacattcgtgaccaatatgcatccaaagtatgataaatggttgataccttgtcacgttgctgagacttcaaccagctactgatataaagatccgttttaccttgcgtctccttcttcatcggtatgggatactggaaataaacaatgatacttgaaaatttaccacagactaagcagattccagaaagctaaacacaacagtgctaaattcaccagaattatatataaagtataaaacattcacataaacacttgcaatcaaattcaccaggcaagaagagaaagatgaacaatgaagataaaaactcacagcttcagcagtgtcaatgcaattgatgccctcttcaattgcataactcagcatctcatgagattctttctcagtattttgctccccaaatgtcatctgaaattccaaatttcatcaaaacttcaaaattgaacaatggactacaattgcaggagataaagagagattgttcttacagtgcccatagtaacttcgctgatgttgagatcggaatctcctaatttcctatactccatagcattcttcgtcgacgctttcgccgaaactctcaatattctcctccgagcattcggcgatagagtaacacggcggcgcgtgaatgccaaacgaaagactcctcgaatgttactgctgctgaccaccggagtgaccgttgagtaggtgacgtaagatgacgccataccggaggttgtcgtggacgtggttcttctcgccttatcgccaccattatctactgttttgattcacgtatttgaatactctgggctaaacgatttgggcctaatgtaagaggcccattagagtcaaaaatatatattgaataatatcttgttttcctaatatgataggtctaatctcagatttcgatttatttcttcgagataatatgattatattagatgacgtggcggtacatccttcgatatcttcgataaatacgcaagagtgagcttcacggtcagacaaaagctgactctacgctctctcaaaagtcgaatatcccaaattcgatccgttttccggcgataatctccgatctagatccgatggcgaaagaaccagttcgtgtgctcgttactggagctgcaggtataactttcatctatatccgattagatcgtgtaacttctagatctctggctagtgaatcgcttgctgaatctagtcagatctctgcatagtatctggttgttccatagatcaatgaaatataggtcaactcttgttccgttggattcaacgctgaccaacgattgattgagttggtcgcatatctaattttagtaaaagttatttcatggatcgaactctgatttagaaaccgttgtttatatagttggatagagtttaagttgtgactttagatctcctcagctactgaaagtaactattgattgtgattatgcaggacaaatcggatatgctcttgtacctatgattgcaaggggtatcatgcttggtgctgaccaacctgttatcctccacatgttggatattcctccagctgctgaagctttgaacggtgttaagatggagttgatcgatgctgctttccctcttcttaaaggtagttaagggttttgttttgctgtggatatttgcattccgtgtcataagttgttttgtataagtgggaaaggagaagatgaatatttgatgtgtattattatcaggtgttgttgctacaactgatgccgttgagggatgtactggagtcaatgttgctgttatggttggtggtttcccgaggaaagaaggtatggagaggaaggatgtgatgtccaagaatgtttccatctacaagtctcaggctgctgccttggagaagcatgccgctcctaactgcaaggtgatacgatctgtttgctttttaagttaaatgaagccactgcatccaatcttctctgttcattggagtgtaacagatgctttgtgttctctattgggttctagtttacgactctcttgctcacacattcgctctcgttttgtcttttttttttcaggttcttgttgtggccaacccggcaaacaccaacgcattgatcctcaaggaatttgcaccatcaatccctgaaaagaacatctcttgtttgacaaggcttgaccacaacagggctttgggacagatctctgagaggttgagcgtgccagtgtctgatgttaagaacgtgatcatctggggaaaccactcatcctcacagtacccagatgtcaaccatgctaaagtgcagacctcgtctggagagaagcctgtccgtgagctcgtcaaggacgatgcatggtatgtataacatgccatagaacttaagaccctttctcttctctggaagcaaaatctagtttcacttaaatatattgctcattctgtaggttggacggagaatttatctctacagttcaacaacgtggagctgcaatcatcaaggcgaggaagttgtctagtgcgctctctgctgctagctctgcttgtgaccacatccgtgactgggtccttggaactccagaggttcataataaaactcttccccgttatttgcagtgctgtttttttgtaacagttaatctaatatgagttctttctttgattcaaattgtcagggtacgttcgtttccatgggagtatactccgatggctcttacagcgttccatcaggacttatctactccttccctgtaacttgtcgcaatggagactggagtattgtccaaggtaaatatgacgcacttacaaactcaaatgctcatcaattatgaaatcctagattctgcagaccctaatgtgtattttgtttggttaggccttccgattgatgaagtatcaaggaagaagatggatttgactgcagaggagctcaaggaagagaaggacttggcgtactcatgcctctcttaaacccttctggagcaaaattttcatctataaggtgtgagatcagttaaagcctttcagggctttgtccgaataagaagtgtgtttgaaagatctccaaacactgttttataacctctttggtctctttgatgagtattgtccctggtctgtttctaaaccaggatatcgtttttttcaatgtgtctgatttggtttacccatgaaaagaagaaaattggcagttgcatggttatcttttgcgattatttttttctgctttagcaattagcccaaaattgatgagctcttcgataatgggtttgtgcaattgtgatttgtgaggaatggtgttattgtgttgcaattgcaaaaagaaatgctactcttgcagattcataccaaaaccaaatcactagattaaactgaaattctaatgtggattattttaattttacttctatttttcttcacccaaatattttataaccaaacaccaagttgacaccaaaatatacatccaaaaaacttagattgcttctattttacgactatccgaaatcgaatcataaaccgtaggcaatggtccattaataaggggtatacgaggattcaaagtttgagagaacttttttatctttacctttttccttttgtaaagtaaaagcagtggattttgattatagattctacttggtaatgactaatgagaatcaagttctcacctttaagccatatagactttagatatttaatggattctacaaaagtgggcatgaccagaatcgagttcatgaaccaccgtcctcggccccaacgttaaaaaacttttttctctagcataagaagataagagtatcttcactgcgctttaggcccactcaacattcaaacaaaattcgatctcttataaaaaaatatctcacaagagaaagttcgtacatgatcccgataaaatcgtagatgagcaaatcaaagatgagatgtcggtaaaaaaaacgctattataagaacacacgccactagttgtggataaagttgtctacttttgtctcgttgtgattattatattgcacaattattaacattcatactctcatatgggtattgtttttggtctccgttagatctcaaatctttaactttgcatacccaaaataggaagaaagaagagtcaagtcactaaaataactttcacagtctttgattcgaagatctttgtcgccgagagatatccactctgatttgagttctggtaaaaagtttccagcttttgatttttgtttctctcaattgaatttctcttgcttgctctgtttaaaaggattaggattaaatcgaatctctctctgttatgtttttttgtagattattttggattttaggactcaaagattacagatttcttatcaatcattctctgttattgttatagaactattctctggaggaggttgaggtctgaaatcatggaacaacttggttagagtgtggaattttagctgatttgatctttgattcatctgtgatcataataactatgaagatggacaaaaagactatagtttggtttagaagagacctaaggattgaggataatcctgcattagcagcagctgctcacgaaggatctgtttttcctgtcttcatttggtgtcctgaagaagaaggacagttttatcctggaagagcttcaagatggtggatgaaacaatcacttgctcacttatctcaatccttgaaggctcttggatctgacctcactttaatcaaaacccacaacacgatttcagcgatcttggattgtatccgcgttaccggtgctacaaaagtcgtctttaaccacctctatggtatatactctttcatctcttattcaaaggatatatattcttattaagttagtgtagtctaagtgcaactgaggttgatgcgatcacgtttttctttgttgtagatcctgtttcgttagttcgggaccataccgtaaaggagaagctggtggaacgtgggatctctgtgcaaagctacaatggagatctattgtatgaaccgtgggagatatactgcgaaaagggcaaaccttttacgagtttcaattcttactggaagaaatgcttagatatgtcgattgaatccgttatgcttcctcctccttggcggttgatgccaataactgcaggtaaaaccttaaagagtattacttaaaagctaaaacgtttttgatttcttcaggacataagcggtagtaaaagtttatggctttttctttgttagcggctgaagcgatttgggcgtgttcgattgaagaactagggctggagaatgaggccgagaaaccgagcaatgcgttgttaactagagcttggtctccaggatggagcaatgctgataagttactaaatgagttcatcgagaagcagttgatagattatgcaaagaacagcaagaaagttgttgggaattctacttcactactttctccgtatctccatttcggggaaataagcgtcagacacgttttccagtgtgcccggatgaaacaaattatatgggcaagagataagaacagtgaaggagaagaaagtgcagatctttttcttaggggaatcggtttaagagagtattctcggtatatatgtttcaacttcccgtttactcacgagcaatcgttgttgagtcatcttcggtttttcccttgggatgctgatgttgataagttcaaggcctggagacaaggcaggaccggttatccgttggtggatgccggaatgagagagctttgggctaccggatggatgcataacagaataagagtgattgtttcaagctttgctgtgaagtttcttctccttccatggaaatggggaatgaagtatttctgggatacacttttggatgctgatttggaatgtgacatccttggctggcagtatatctctgggagtatccccgatggccacgagcttgatcgcttggacaatcccgcggtaaactacaaaacttgtcttatagtttagaattcaaagcttaataccagtttttgctatgcattcgttttttattttatttttcagcttatttggtttggttgatttagttctgaagtctatgaaaactctgtttttatttcagttacaaggcgccaaatatgacccagaaggtgagtacataaggcaatggcttcccgagcttgcgagattgccaactgaatggatccatcatccatgggacgctcctttaaccgtactcaaagcttctggtgtggaactcggaacaaactatgcgaaacccattgtagacatcgacacagctcgtgagctactagctaaagctatttcaagaacccgtgaagcacagatcatgatcggagcagcacctgatgagattgtagcagatagcttcgaggccttaggggctaataccattaaagaacctggtctttgcccatctgtgtcttctaatgaccaacaagtaccttcggctgttcgttacaacgggtcaaagagagtgaaacctgaggaagaagaagagagagacatgaagaaatctaggggattcgatgaaagggagttgttttcgactgctgaatcttcttcttcttcgagtgtgtttttcgtttcgcagtcttgctcgttggcatcagaagggaagaatctggaaggtattcaagattcatctgatcagattactacaagtttgggaaaaaatggttgcaaatgatcaaaataatgtgctgttataaagcctaacatgtagatgtgtgaatgtgtcttttaactctttgtttccttttggttatactcaaaaggatatgattgcataaacatataatgctgatattatttcaattggctatgaataaaatatacatatttgtttagtctttgaatttgtttcatctgagttgtttagtttgaggaaaaagataacggccaatttatatttctttataaagaaaagaaaggaaatctcgatacacgacgtttttatatgaaacaaatgcagttggaaataaaagtaacaaatcattggtctaaaaaccccaatgaaaaatagtaactaaatgactgaatactacggtaagatttttttaatttctataaaaatataagattttttttgatgattaaaatatttttttataatcaattacaaataattatcatatcttgaaaacaacaagaatttttttgatataataaaaatattaaattaaattacaaaaataaacgatactagaattatatttcattgaaatttcttatatatatatatagctgatattttaatacaattattaatttatgatattgatgggactatatgtttacataggattttcaaaaaaaaaatattttattaatttatcgatttgtatcgctttttacactagtcccaaatactgaaagaatttattattttataaaaatgattaatttatcgaatattaatttataaaggttttactgtacttgcatggcacaacaacgagaaaaagtccacgcgataaagcttcaatgtcaggaatcatcaggcgtcgaaatgtttgacaatggcatcggtttcgtccagagaggagtcgacggggcctggatgagggtcgacgtaatcggaattgtcgtggaaaagagagtagaagcaagatccgattcggataacgtcttctttactatcagttttggttcgtaaccattatttttaatcatcaacccctcgagtcacatcggtgatgtctccgtctacgaggagaaaaatgaagagacgatgaaaagaaagagatgattgctatatagggggttcaaatgataattatatacgataattagttttcttctcgaaaaaagaaaaagaaatgataattaacgaattatcttacttattttgtttggataaaatacatataaccctttcttttccaaattatttacaacaataccaattttgaattattttggaaacagttaaaaacaaaataagtgaataaaaatatgaattaagagactagaagaaacccaatataaatccctacgatttcaaaaccaaccctagctgcgcagtcgtcgcctccgtcgctgcactgtctagccgcttatgtccttctgggacccttgtctctatttgttcatcttctagagcgacgacttctaaaaccctaattctgctcgcgatctcttcatcgtttctcccgtctgttcatcttctccgacgatttcagcaatccttgctcctcaagtatcattcattcattagtaaacttaactctgaacactttacaacactaataatctcttaagatgatgctcacactaattactcgatctccttgtatttatgttactcacacactcttgttaagactcaaacaacttcttctccctccggtttgatgtatctcctgttataaagattaaagacataaacgtgggtcgttgtctctttttcttcaagctagtcaacgagctaaataatgttcaaacatagatatgtgaatgtgtgtcttttaactctaaatttcttttactgattttattcataaggaaatgagtgcataataatgctgataaatttcagtttacactacaatttttttaaggaaaacattttttgaattgcgtgatgattttttaaaaattatttcgggtttattaattttataattgtttgggaatagaaatatgcgaattagtttggaagagaaagccttatttaaaggcccattatcaaaaaatcaaaggacggtctctctgtgtcgtgtatcaatcactccgttgtatcaaatccaccggtcaattttcagtcagaacgaaaactccggcgacagatatggcgtcgtcaaagggaggaaacaccactgcccacatcaatactcttcaccaccgtctttatcacgctctcaatcttggcttcaggtcctctttttgctctttactctcaatctctcgatgtttaatttgctgttttccctttttgaatttgtttcctgagaaaattttggttgttggcttgttagggtttgtgatgagaaagagaagaagtggaagtgtactgatattgagatacagagacatgtcgtgaagtcgatttcagctttccttgattgtttttctcgtgcaacagctaacaatcgtcttatcaaggtctgtttccatctctaactcgtttaaatttcttaactttttttgttgaaattgtcttttttgcttgattccaaagttttttttttttttttgtgttgcttaggattcaatttctgatatagccggggctttggtgtttattctagggagtaaaaacagagcagtggttggtttggcagccaatgtagttattaggttgattcgtattgttcctccttctatcttgcattcatattctttggatctcgtggagtctttatcacctctgttatgttgtcaacaattcgatgtttcgcttccctgtgccgttgctttgaacgctattcttgtgaacgtgagagaaactaaggaaaaagaagtgtggaagattttagaggatgagaaaactgtggtttctgttgttggtaatttgcagatcttttctgaggggagtatgtcagtggaatggtttcaagagatggctttgcttctgagtacaattatgttgaagtggcctcagtctaggtattctgtttggaacaaccctgccttgatgggtgtattggagagtgttagtcagaagcctgatatgggtttgacagttgcaactttgaagctctattcttctctaggtacatatatgcttatcaaacttagatattatgttctctactgagctgccaactaaattggccttatcttgtcccttgggtgtttctctgtttttctgttcagctctttgtggccatggtgccaatgagcttttagacaatgggaagcctatgttagatatgatgattagctgcatggaggagtcaagctctcaaaatgctcgaattgaagggttaaagctagcacaaaggcttgcggtaatagcacctcgccctgttgacctttattttaactatatttttggatttctaatcagtagccgttgctcagacaggtaaccgagagtgcttgaagatgataaacatgtgttctgagtccctagtaaaggctaccgttcggaccatgggtaagtggttcttgagctcaggaaagcttgaacttgaccagatgtctttgcttgtggaggcttgtaaactggctctaatcactcgttgggaaggacaacatcatatttatttctggaagtatcggatctctgaagcgcttcttagtcttgttgtggagaactttcatagtcaatccttggatggttatgtatctctggaagaagaagttttagttgctgagaaggtactgaatgccaattttttacctagtctgaggtcatacgtttgggatataattggattcttggcagctcactgtgaggaagagtttgattccattttgcgtggagatgaactctgcctcaactttcttgtcacatgtgcctggtaagacattggttgttttgtttccctcaaccgcctctttttggatatgatcttattatctattctgattatttttcttttgacttcttttttaagcttgtccttttcgaggtcggttcagaaaggctatcaaatatgtcaaaatgatattatcagcgcctcccatagcgagtcagcatcaagagcagtgctaatgatgatatgttctccctccaaatacatatcatcgagggcccgagttaccctgtcatttatcctagaagaaggtggtgagcaaaatttgaattcccttgtgaattttctgagttatattccatcttcaggaggttacatactgccaaatatactccaaactaccgtgtgtttggtgggctttgcatgctattcatcgatacctcaatatgcgagtttcattttaagaaagcagggtttggagatacttttatctttctgtagctggtatcaaaggaattgggaaaatattggagcatcaagttttgctccttcttcccagagcatcactgaaaagaggatatgctgctgggtatgtacggaagactgggacaacaaagatgcctttcttctatacgctctcttggctttggccgagttggtaaatcattcattctttggacagaatcacgctgaagaactttcaatgaagagcggaaatttgaaagatcggttatgcaccacacttaaggaaatccgcgatggaacatatggctctggtccaaggtggtatgctgcacacatcctaagctattttggatactacggcttcgaacataagttggggaaaaggctcatgtgtgcttatgaagatgaggaatatagtgatatgcgactcctttttgctagtggaaatagtgcgagtgtaaacaaagttattatcgcggtcaggtgtccaatgctactgcctcccaaggaaggagctcacagtagctcaactatatcaactgagaaatctcagagaaccgttcaagaaatccgcatgtctgccaatgtggatattttggcacttgttaaattattggaatttgcttactctggttatgtggaagtagaaagcacgacactgaaaaagctgaaacctttggcgaaacattgtaaggcaaaggttctgctgcagatgctctgcagaagaagacccaagtggggatcttcaatacccgaaattgatataccccttgccctcactcctaaactcatccacttctcgtaagtttatcagtctcatcattcttctcgacgctaacaatcagattaactcaggttttatgacatagtattcttgtaatttcagggatgtgatattagtacctaaagaaacaaacgtggcttgcttcaactgccgtatgtgttccttaacatctcctcatgcccactctcaccgagttatactgtcgtcaggctgtgaatacctacgtgccttgtttcggtccgggatgcaggagaggtatgtaacagttactcttagttcacataatttttctttggcatatatagtgaacgtatgttggtgggtgtattagttctgattttcataaagtaaatttcaagtatccccaactcaaatggaaaccccatccggtagatcagggtaacgagactccctggaccaaaactatctgcgagtcagattatactttgggtatgcgtgtccacagtccacccctaattcttgtagacgaaacctaagaagttatttggtattttctgctcctgtgttactggaatgtgagcagagattaatgtatgctttttggtgttttattgaggaataaaagactaaacatctaataattggctcttaaaaatctgcagccatttggatagactaaacgttcctgtgagctggctggggttaacaaaacttgtgagttggttctactctgatgagttgccaaagcctccatcgggttgcaagtggaacaacatggacactgaggcaaagctggatgagcttcaagcttatgtggagatatactcgctttctgaatggtggattatggaagaacttcaaaacgattgcgctcatgtgattctctcttgcttggaatccgctagagagttatctatcaaaacaatcgaattagctgcgagtttctcgatgtggaaactggtggaagctgctgctaatcatgcagctcctatttatcatcagcttcgtgactcaggtgagctcgatgagctagacgacgagctggtaaacttgatccgaaccgccgctgttcagttttctcaacagggtggttaaattatcaacagaagcaaaagttaaagagagagaaatctggaactgagagtctatgaggctctttagtcatgctaaggattcgggatggtatatagttagtcaatttattgacactaatcccttttgaagattgtacgtgttataatggttttctgatagagagcaatctgttgtgggattttgtctcagactctcagagtcatttctttagtagataaaaagacatgaaatttctgtaagctaaacaaggtaatgtacagagtaatttatgtaagctacacaggtattgttcgaacttgatgaaaatgtttgaacaagttattgaattcgacatatgtgacaatgttggaggcttgctctatgaaaaagaaacaatctatacataaaagaggaatgacattgtccaatgcttaaaaggtcaattcctatgcaagtatctttacgctaatcgtgagagccacttattcccaatataaacttaataattagaaaaacatagtgtgaaagaaggagaagaaagcaaagatggaaatggtgaaattcgggaaagcagcacttggtgcggtgaagatactctgtcaccatgcttttgctgtggtcgtcatcgaattgggcttattcatcgatttcttctgcttctccctcttttcgaagctctttggtcatttctacatccacaaccatcgtttagttgccatcattttgttaaaaccgtttccgcgtttgaagagtgaagaaaaagaaaacagatttgttgcttccatttttgagtcctttacaaaagctatggcgcacattacaagattttataaatggtgtgtttatattatctatggatttttcaattatttggttggtttaaccttcaaattagatgtttgtgtgattcttgtatgtatgcttatttataaataggatagaagtttattttatcctttgcacgaacaaagcaaagaaaaacacttctatcttttcattaaagttatactagtttttgatctactcttattggactgaactcaatcagttataacgttaataagtcgaaacggacattttaagctttacgtaacggtcatattatcggctccacgtaacaaagaccaaactctgaaaagaccaaactctgaatcttgtctttttatagtctgtaacgcttctcgtttttcgcatgaccttctccacgtttctcttttgttgcctcatctctttcttcttcaatttcttattgtgtttgctacataagcagctttgttgtgaggaaaaaaataaagagataaacaaaacacaaaaatggtggtgaaaaactcgatcaaattcaactctcagagtgagcgcaagtctttggaagagaccaaggttcctcctatctttggccttcctccagatgccttagacgacaagaaacctacctcggattttgcagtacctatcatcgactttgcaggcgtccacaagtcgcgtgaagccgttgtggagaagatcaaagccgctgcagagaattggggaattttccaggtgatcaaccatggtgttcctttaagtgttcttgaagagattcaaaatggagttgttaggtttcatgaggaagatccggaggttaagaaatcttacttctcgcttgacctcaccaaaacatttatctaccacaataatttcgaactttacagttcgtctgctggtaactggagagactctttcgtttgttacatggatcccgatccttcaaaccctgaagatctcccagtggcttgcaggtaatttttttttcattgagaagtcttaggaaatattgaagatatattattgattctaacatcattggctcagagatgctatgatcggatactcgaagcatgtgatgagtttaggtggcttgctctttgaacttctctcagaagctcttggtttgaactctgatactcttaagagtatgggttgcatgaagggtttgcatatgatctgccattattaccctccctgtccacaacctgaccaaaccttaggcacaagtaagcattccgacaacacttttatcactattcttcttcaggacaacatcggtggtcttcaaattcttcatcaagactgttgggttgatgtctcgcctcttcccggggcacttatcatcaacatcggagatttcttgcaggtaagctcactgatccatagttggacctaaaagtataagataacataaaacagaggttttagtgcgtgatgcattgatttactttctcacttaaggttttcttattcgggttgtgctgcacaacttgtgcagctaatgacgaacgacaagttcataagcgttgatcatagggtgcttacaaacagagttggaccgaggatttcaatcgcatgctttttcagctcgagtatgaatccaaattccacagtttacggaccaatcaaagagcttctctctgaagaaaaccctccaaaatacagagacttcactataccagagtactcaaagggatacattgagaaaggtctcgatggaacatcgcatctgtcacattacaggatttgagatctttaaaaaaacaaaatatatcctgtttgaagcaagatattcagatatgtctatgttccgtcctttccttatccatgtaaaagctagtactctgttcttgaggctgcaactgcaataacaaaagcattgtaccaaagataagaaacaaatggtgtgtgtgtgtgtatttgttgaaacatgtgtggtttatattggatctttagattcaaactttgtttacttactcttctcgaggctccgtggattcaacaatctttatcaagaaatttgatcgaattgtaactagtcagagcatcagattagtacctgtctaaggctttaatatattcccctagggtttcgtaatgattcaagaacaagcaaaaacgcactcgtcgaaacaattacatacctcgacgagactcagggtcaacacggttctccgatttgacctatgacctatcggcggcggcgagaaggggtttcaggtgattagactagaaggtttgactgacggtggctaaccgccggtgggcccagaagctacgacaccattgaagcaatcaaagaaaagattggtggggacgaaaagggtttctgtgttataagccgagcccgcattattttaagttaaaagttagtgcaactgaaccaaatttatttattcatgtttgtatgtaaactatgtttttttttactatatttttattaaattgtattttatcattttaattttaattaaaaacttctatataattttccaactaaaatgtttttttttgttatattaatatttttatcttgggacggaaaacaaaaattaatgcctttaaagtatatggttctagcttctatggtgatcctgattcctgatagaagcatggaattaacgccgaagtctctcatctcatcttcatggccgtgtggtgtgggtgattttctttctccacgtatttatattttgtctttaaaaactcatctatcaactcaatgaattattgtccccacaagttactaaactcatcagttgcttataaaaactattttcaaaatgtacatgtatatatgcgtctacatatgcctttccagtataattcatgaatggaagagcaataacaagcaatggtaagatgaattccatatttcaaacgtataacacaatgtacttgtacatgctggtagttatattaattagagcgatgtaataggttatattgatatcttataaatttactttgatttattttaaaacgtttaagctcgtttagatgaatcacaagaaggtaacaaatatatcaaatcataattacacgtcacaaaacataaaagaatatgtttcacataatcattattttcattaatattttctcaaaactaattgcacaaggaaccgtttgaactttgaagttcaagaaactaagatgacccgcttaaagaatcttattcgttacagaaatcgattgacaattacacttcatgccaataattgaaacagctttgtacgcttgggattttattttatttgttataactgaaaatggtctttcacataactttcagttaataccgattgtattccctttattgcctcttgcccatgttgatattatgagtcttgttatagttctctccatattcaagaagttcatccaaaacgctatcgtccaagtactcaaactcaaaaacttgctgcgacgaggaagaagaattagccgcagtggatgaggatccggttcccatgttatactcgtgagggaagttgagaatggcagctttgcctctcattgaataggcggctcggtcataggctcgagccgcgtcttccgcagtgtcgaatgtccctagccacacacgctctccgtgcttcctcgaatctcttatttccgcggcgtatttaccccaaggtcgtctccttactccacggtacttcccttgctcggctcctcctcctccactaccactgctacgacctccttgatccatatatctgtgtatgtgtatatactgttgtgcgtcagaagagagaccaagtgacaaagaataataagaagaattggatgttctaagagttggaaacggacacaagatgtagcgtctgtttttttttttttgtctttgtgtgtgttttaattttgcatggattaaatgagatttgatttgtggaatttataggcaaggaaacaagtgggtccatcaacctaatattcgaagttcgaaaaactccacttatgaaaattatgtagatgttctttagaccttttttctccttcaacatagatgtttctcataaaataaattttctttttctttttcttttttcatttttttataatagattttattttgagaattttgtattttacatatatgtacaattttttatggctataataatatacatgtatggggtttcggaaatgtacaacattaataatatggtaagaatcatgtgcaacaaaaatataaaacaattttttgttatatccttgaaattattatattttgcgtttatattttacattatatctaaattattaaatatttatatctaaatagagcttataaggtttaactcaagttgaacttttgcaaaaagtaggaaatttatgataaaattagacagtctcttgaactaattattatagaaaactatatttgtatggtattttttggcaacagcaatggaattttatgttaccaaaaatatgatgtgtactgaataaaagagttgattggaggacccataggaatatgtttgacttgggacttcgttagtgcccacgtgggttgactctcaaaaccgactcagaagctttcgttggaccataataaattttttgtttaatacagaatctacgtgtgggggtctaagttcttgacatgactttacattttggagaattttttccttctagatatattttcacatcaattaatttttattgaataatttgcagtagattagatcaattaacttttcttaacatcaagtttacgaacataccactaacgaagaagaacaaaaacgtttactaagtacattgaatcggccttgaattgttttcaaattatgcatatattctacataaagctggaaattcattacttattctaccttaaaagaaaatataagattttgtttttcaaaatgtcgtataaaaaattgagctaaatattaatcgctaaaattttttatgacatttgaactactttctccatctttgccaacgtacggtacctgaaatctctagaaatttgatcgaatcaaatgttggttgcgtttgtaactttgtatatgcattgaacaaataaaagtttttatattagtaagaaatgtttgtaagttgtgaacgcaaatacaaaaggtattcgcaatttgattttatgctttggaaatcacgcttcccatgtacgataatctacatttttgtttgtatttaaaagcattaataagatatcatattttcattaaatataatcacaccatttagtcctctaaaatatacaaaaccaaaaaaagtagtcagcttagaatcaagtaatttgtaattgccttatacacactacagtatatagttgttaactgaaaaacaagaatcaacagcctataataccttacatactctagaatctgaatcttttaacttaaatatacgacttcgttgagccaacaaatataactttctttagttagctaggtccacaaaattaatcgctaaagttccataaatataacaatagatgtcacagtcaataagaaacttatacggaaggacttcgtataagtgaacattccataaatagtatctttcacccgtaaatctcagatattttactgacactatactctgtcgaaattgacttttataaacctattagcctaatcgtcacgtgggcttttctaataagtcattaacgttaagtcagttgaaataaggataacgacatgtccaatgtacctagttgatcataaattcatcatcatggtcacaatgtacctacttcttcaagttttctttttgttacctttttaaaaatatatattttaaaatacactaattggccctttttggctgctcctaatattggattcgatcttataggtgtccgtacatattcgaagtctttttttttagactagaaaacaaagttttggagttccctttccttctttgttcttctatcatatctgagttcctttccctttcaatcacattaaaataatgattacgattttattatgtcgtttaaatctgacttgcctttgactttgaatcggtccacgacaaatatttttttggtaagttatgacaattgttgtagtgcctgtatattttttttaaaaatgcttaaactgtcgcataaatgcgaccaaaaaataaaatactgtcgcattaatgttttattttggataaaccgagtctatgaacaaacaaaccaaaacaaccgaaaactgggcgacaaaaaaacaacaactgaaaactgattttgttgaaaattctcggtagacggtaacaaatatcatcgaaaacctactgtacttcaaaacttccttgttccaaaaaacaaaaaacaaatctaaggattcttttatatttgaaaaagaaatttaaaatagagcctgattgaaaataattattattattcaattgttcattttttttcttatcttcaatatacatttccgacgtctttcttgaattgaaaggagagatgaatctacgtttattcaacaataaaaagaattaaatttaagaagattggaattaacgtctattctattgtaaattaataatctctgggaaaaagaagattgtgtggtttcgattgatatagaatcagaatctatattgttgtcgccattacgactagtgtaagtaagggctctcgaggttggggacaacatatagctagaactaaagtctttttatgtcttcgtgcatgaacctaccaattgaataacatagaatctatagtaaaaggtttatttcagaacaagaaccctaacatatagatgaagcttttaactaaaggttatagaatatcaaggatttatgggttaatctatttcttttaccaaaatcgataatacgttgaccaattttttggataatcttcgatcaattacagcggagttccaatggaacagaatttattaactatatttttataattagcactataaataagaaatttatagtttaagtaccttttaactttcattcttttaatttgagaacaaaaataactttaatgaactcaaagatattcatacaatattatgtatggttaatattaatgctacacattattattttcaagatgacatacactagtttcattttaaatatattttaaaattgacacagtttattttcattttaatagattgacataatctttgcacactgaatatatgatggcccagcccaagttcactcgtgacccacatatggtccacgcagctgcccaaaatgggtctagaaaaactaatggaagaatggcgaaacataattgttttttttcctgtcaacgaatggagaaagagaaagtgaaacaagtgaaagcatttttttttacagttctcttttctggtaaagcatttttttatcttttttttttgttgtcatcagcatttatttatggttgttcaaaaaaaataaaaaaaattatggaaacagaacagacgatagaacaaattacatcacattattcaattttacactaaagaaattaattttatttttgtaacatcttgctttattttattaaaatgaaaacagagattacatagttatttcttagacatacacataaaaccaaaaattgattaaaatttaagaaattaattaactagataatttaagttaaaaaaattgttttttgtaaattgtgtctcattaaattataggatgttttgactcgcacacatatcaatggttcaaaacgttgaccccagattggtttctttaaatggtaaagtaaaagtcaacctttagtttgagataataaaatttaaaagccaattaattttcttttgaaatttatttacaatttcttgttatgagatctacattattatatacagtaacactcagttagatattaatctcttgtatttagccaaaccaaaaaccatcggatcaatgcataagttttggaatttctagtaatttatttccagttaagtatgtttttatagtgtagcgtagggctagaagacgatcctgatcaatgcaactaatagaatctcgaacatcaaaacaaaacaaagaaaattatagagatcgagttcatatctcggagcgacgtgtatcgatgatggtctgacgcacacacgtgaccgaccaagcatcacgtgctgctgaatgctgatccatctcaccgttgctgtgttgacctgagtcgtcgacgtggcgcatgatgatgatcctcaggacctcattcttaaaagagtagtctatagtcaaagtcaattgttaatgcggaaacaaaattctactatattaatgagatgcctagatttcttttttcatattagttttgaattgtacaaataattggattctagtaaaatcctcccaaaattgaaccaaaagctttcacagctgttgtcagtccatgtgaaaactactgatgagttgtttttcacaagtttcatgaatcaactgtttttaatggtgatttaagaaagtttaaatttaagtaatacaatgtcactaagttctatatgaaatattcttctgctgctctgccctggttgtagtatttgtttatttgtaattactgccgaagcatcaattgtgattttgtcgatttttaggtttaactgatgcaacacttcaacaaaaaaaaaaattaaaaaaatttgtaaacatggatctgaatctaattttgtcgatttgtgatttctcccactatattttttttttcttttgacaatcgtgattacggattttcatcgggagccacttatgaatattagttgtttggataaaaataaaaataatgcaaaaacaacaaattactttccactaagggttgtctccgtcgtgggcacgttttcgtttttattatgttaggacaaaactaagaacgccataagtcgatgtgtatttatatatctttttgtgttaaagatgtgtatttatacatcctctaacgtattatagaacataagtccatctaaaattcgattatatacactttgatgataaataatacacaaatacgtacacccaaaattactcaaacaactaacaaaaatagtcacaattgttttgctaaagacaatacattattgataagagaaaaaggttcaaatataaaacgaaactatacttctcaccggacctattattatgttctattctgtcgtgagccaaactcgtcaaacataaatacacgatagagactagtgagtatggaaacattgtccttctttatcattttttatttctgtttaccagttgttgttttgttttttgttttttttaacatctcatctcatttcttatatatttaaactaataaaagatgaaaaccaaaacgaaaactttgaactatttctgcggtggatttgacttttcttttatttctattttgacgggattagacagagaaaggataagtcttactaaccttgtgtctttttcggggatctttcttggaccgtttcgaatcataactagatcttcgatatctatcatattatctattttgaaccatagtttagagcaaattacttgcagatattcttctgaataagataaatttattacattttcaaaggatccttcacaaaatatatagtctgtctaaacatatcaatttaattaaccgacaagtgtggttagctggagttcacagattctaattattgaaaaatgaccactatactgtattagcgaatccaattatatcatcattatactacatacgactttaatataaacgtaatctacatggacaaacaaaactttcactatcatcagaagatccaactcaaaatgtcaattaaattactccacttgaatataagtaagcttttccttattgttttcctcaccataagtactacaaaaaatgtttaaataaaaagaaaactcttacaccaaacaagtcacatagatcgaggaaaaaaaaaaaactcctaaaagattcagcaaaatgataacctaaatgatgaaaaaaacaaagtaagatgataacctaaataaataaatgagtcatataagaaagagcctctgaaatctcaccaactctttctctctctctttcatttcattacttcatctctgtttttcttctctaccactatctcttctactattctgatctttctcttacacacgcaattacgtatatataaacactttcagagtagggaggaaaaagattcaatagaaaataattacttgatttcttgattttttttttcgttttctactgaatatttcccttcaaatcctagagggagcttttcatttagattgttttgtagtcaaatggatctaacagaccgtcgtaacccttttaacaatcttgtttttccgccgccgcctccgccgccatccacgaccttcacaagccctatattcccacgaacaagctcttccggcaccaatttccccattctggccatcgcagtgattggaatcttagccactgcgttcttacttgtaagttactacatcttcgtgatcaaatgctgtcttaattggcaccaaatcgacatctttcgccgccgcagacgaagcagtgaccaaaaccctctaatgatttactctcctcatgaggtaaacagaggactagacgaatccgccattagagctatcccagtcttcaaattcaagaagagagacgttgttgcaggagaagaagatcagagtaagaactctcaagaatgctctgtttgtttaaacgagtttcaagaagacgagaagctaaggattattcctaactgctgccacgtgtttcacattgattgcattgatatctggcttcagggcaacgcaaattgtcccttgtgcagaaccagcgtttcttgcgaagcaagtttcactcttgacctaatctctgcaccgagctctcctcgggagaatagccctcattctcggaacaggaatctcgaacccggcctggttctaggaggcgatgatgacttcgtcgtcatagagcttggggccagtaatggtaacaacagagaaagcgtgagaaacatagacttccttacggagcaagaaagggttacctcgaatgaggtctcgaccggaaacagcccgaaatcggtgagtcctttgcctataaagtttggtaatcggggaatgtataagaaagaaaggaaatttcacaaagtgacgagtatgggagacgaatgtatcgatactagaggcaaagatggtcattttggtgaaattcagcccataagaagatcgatctcgatggattcatcagtggatcgtcagctgtacttggcggtccaagaggaaatcagccggagaaacaggcagattccggtagctggagacggtgaagatagtagcagtagtggtggtggtaatagcagagtcatgaagagatgtttcttctcttttggaagtagtagaacttcaaaaagttcttcaatattacctgtttatttggaaccctaattctgtattttcctcttcttgattcattgttcaaaaaaattattttttgtatttgttatttgctgaggtgaatttaaaaaaaaatattttggaaggtgaagtaggagagaaagatatatagtgtacatgtttcttctttgtcaaatacacatgttcaatgtttacaagtcataggagtagatgagttacttgaatagtaattacagaagtttctgaaaattgaataaatagtgtttttcactaaacgagttacacgaaaacaaatcccaacaaagaactgcagggaaaaaaaaaaaaggaaacaaagaactaacctgtgaggcccaaacggcttaaacacataaaggcccaaatgcataaaagcataaaggcccaaataaatctttgtcgccgcagactcgcctttaaggtccgtatcaaatcggacagaggaggaactgagcatgacgactttccggcgtaggaattagtaaatcctaaaatcggtttctgcaatcaaaccggcgtggatcctcagaccgtgaagatagtattgatcagttttctgcgagctaagtaccgaatggttgcaggtttgccttggttggctacaacaagcaatctttgatcggttttgtttggttcaataacatttgctactggtttagtttggttactgattatactttagcttgtatataattctttcttttggtattgctagtttcaatttagtcaagaaactgtgattgacaagatgctgatcaagtttgaacctttattcccaatttaaagcattcactaaaattatacacacacacacacacacacctttctttgttgtttttgtttttggtacaaaggaaatggtttacttatttgtcaagatctgacaattggactagtacctgaacccaatagatgcatgaaacgaaccaatatcttacaataaacttgagatgatttactctttcaattgtttttttctttcatatcttgtaatgcgacagatacgatgttccatcgaggcctttcttgaagtatccctctgtgtattctttcaagtcgatgactctgtattttgaagggttttcttcagagagaagctctttgattggtccataaacagttgaattcggacgcatacttgtgctgaaaaagctagctactgatatcctcggtgtagctgccctgttcgctagcaccctgtgctccacacttatgactttgtcattcgttattagctgcgtatcaaaggtaaactcagattctcaacattgtatattttactaataaagtttaaaagaatggatcaatgaagaaattgccttgcctgcaagaaatctcccatgttgatgactagagcccctggaataggagagacatcgacccaacagtcttgatgaaagatttgaagaccaccgatttggtcctggagaagaatggtgaggaaggagttgtctgaatgattatttgtgccgatggttagatcaggttgtggacatggaggataataatggcagagcaaaagcaaacccttcatgcaatccatgcttttaagcttatcagatctcaaaccaagagcttctgagagaagctcaaagagcaaatcacctaatctcatcatatgctttgagtattcgaacatagcaaccctgagccaatatttcataagatcgctcaacggttcataagatttctcaatgaaaaaccgtaagttacttacctgcaagccacagggagatcctcagggtttggaggatcaggagccatgtaacaagcgaaagagtctctccagttaacacatgaagaagaactatagagatcgaaattactattgtagacaaatcttttagtggcgtcacgagtgaagtaggttttcttaacctcaggagcttcctcatgaaacctacgaactccatcttgaatctcttgaagaacgtttaaaggaacaccatgattgatcacctggaagaatccccaattcgatgcagcgtctttgatcttcccaacgatatcttcacgggagacgtggaggccttcgaagtcgatgatagggatcgcaaaatcagtggtagaaacaaaaggtttcttgtcggataaggaaccttgagggagacagaaaattcgaggaatctcagtgatgtgagcatcaatgagacctttcacacctgttttcgtctcgtcgaaagctttgcgctcactgtaagagtcgaattctttggtctccatttttgtttctttaacctatttcgaagattcattcacaaaaagctgcttcatacatatacaaaaagaagaagaagaaggttatcaagaaaaatggatttatgtttttgcattcttgtggtgagagaagacaagatagaaacgacaatttgagaattgtatggttgaaaaacgtacgtcctgttttgctgctggtttagtttggttcttgatcaattgattctgctctagcttgatcaaaaacgtatgtccggttttgttgattgggactggaacttatgtcagcatgacggtgccttttcatcttcttcttggttgagttttaaaaatgataaaaattcggtttaaattttaatttagatacttcggttcaattcggtttagcttttcttttccacctttaattggttaattatataaattaatcttttttctctctgaaaaaaaaaaagacaaaagcagaggaaccgaagtttaagctaacaccgagaaaggatccgtctctccgacgacaaatcagaccacctgcgacctagaacgacacaaggagacatagagaaaatgggtttcttctcttttcttggaagagttctcttcgcttctttattcatcctctccgcttggcaaatgtgagtcttttcttctttattccctccatctcttctctcgtttctccggttattggattagggttcgacatcttcttcgatgaacttctatcttgctagatccgatttgattgagaatcttccgctaaactgtttgatttggtctaagcgacatctagggttaaatctagggcttgtctaaataatcccttgcttgattttatcttgctagatccgatttgattgagaacctctctttaaggcttttaaaatagagttagcttccaagagactgtggtatctctgatcttgagccttttaatagctctgttgttcatatgatctctatctacttagatgaccaagagtctgtttcttcactatttgtgtctgatatatggtgaagtgagatacggtggattggtttctaggttctgctagtccaattccatcctgaaaaacaccatttagctctctaaattgtttgtatacacatctctgtttgcttgaaagtttactagtcatatgtgtagaggctttataagtatccccttgtcgattatcttacgaaatccgaactatgcttctctggaattcttattaggttcaatgactttggaactgacggtggtccagcagctaaagagttagctccaaagcttgatctgaccaaagcacatctctcttccatattgggagtatcattgcccaacttagaggtatgcccattgcgttgattccttgtcttcatgtctcttatgctgtctatatatatatgttgcgtctgacttggaaaactaattttgaaaggtgaaacaagtcgtgtgggctattgttgctctgaaaggcctaggaggcttactctttgttatcggcaacatctttggtgcctatcttctggttaggatttcttcacttttgtttaagtattcaaaaagttaagttgttgtattgactttggatttcaattctttgtttcttattaggctgtctacttggtggttgtcagtcccattttatatgatttctacaactatggacccgaggaccgccaattctctcttctattgactgaattcttgcaggtttgtctatacacctttcttcatttattcgttttggcttgctcttgccatgttcttcgagctgaacctagtctgaataaagtatattcctttatggctcttctgaaccttcttctatgattctcattcttttgaatcaatgttttatcacagagtgttgcgcttctcggggcattgctatttttcatcggaatgaagaattcaacaacgagctccaagaggattctgaagaagaggactcccaagcctaaagctgcttagagttcttctcttctcctccacacacaaaggcaggtaggcttcagaagagcttctgatgtctccaagcattacctttgtcattcttccttacaacttttggttccttatctattgtaggattctagaattagccacattttgtattttatcaattagtttttatatgattttgggatttaagccgttttcttttgttggatcatattatttttttcagtgatttttaaaaattggtccgagaaggtttttctggggttatgaattagaaccgttagttagattcgttaagtttcatttttttcttgttgtaaaatagatataattattttacttcaaacctatttttttaatattcaggtttatgctgtccaataagcttatcggatacctcaaacatgcaattactatttgtaaaaaaaatcatatacatggttaaaaattgtcttgcaaatccgttccaaccgttacaactttacaaatccaacggacaaggttaatatgcgtaaaataatatgatatcacatcaataaatttgtcgtatctgacttcagttttgaataaaggttatttctagagaacctaaaccgctaattatttttgtgataattataataggagattaattaattattcaaagacatattgctttttgttttaaactagaatatgattctttccattatatgtggcacacaaaatctctcaagaaaataaataggtaatcaaggtgttggttagtctaaagttggtatagggaaaaaaaagttatattatctccttggtctaaagttcatatcgtctttatcattcttttgctttttataacacaattaatatttattgaaatattaacaaaagttacgaacaatgccaaacatacaactgactgcaacaatggtttgtttgggaaaaaaactgccaccaacagaattttgatttttgaagaccaaatagataaaaggacaagagttaagaaattttcgatattttgtaattttctatgttggtaattgatttttttaatattctttggtaaattttggatttctattattatctgaagttctgaactgtagttaccagagtaactgctggttgaaattgaatacaagtgtttctttcgacgagcttttacatttcttgataatctttttcagcactaaaagaaagtagtttcttcataaacaaaaaaatgaaaaagatacgtacttattatagtcatcataaaagagaatatagtcaaacttataatttagtagtttagtctatactagtcaaaaggaaaaacacttgaacaagaaaagaaaaaacaaaacgaagcaaataataaaaagattcgaccgtttagaccaaaacacaagccaagcacacactcttgaacacgccattctctatatatacacgcatactagctcactcataaatataaacaaaaaattaatacaacaagatcctgctatgtcgtccacggcgagaaatatttctggcagcgggaaccgaaagtcgagtaggctgcagcggcgggctccaccgcctcttaagataaacccttgcgaagcgaattggaaagtggctattcctcttctatcacctacggagtcgccaccacaaaaaccaccggcggtaatgaagagggaggagcaacggtggggtaaagaggcggagaagccgccggtttttaagaagtggcagcatccggcagctccgttttactaccagccagcaccgtcatcgaatcagccgtttgcatggccaaattaacggtctcttaatattaggtctatcacacaaatacataaatatttgaatctttttaattgtatgccgatcatattgacaaatagcatattttattttttttaacattaccatctttatgcagtatgtatgttgggtttgatgttgttatgtccttgtaaccattaattaataactaatatatatagtgtattgtttcgtatactgtgtaatgttgaagacactagctaagatcgccgtgtaatttgatttcttttataaatatttttcttaaagaattgtacatgcgttcatatcaatatgtctttgtataggtgacaaaaaaaattagaaaatcgattgctaaatctatatatagcaactagaatttaacccgcggtacaccgcggggctatattgtttacaaaaatataatgttacttttttaaagattaactgaaaatatatcatattaatttgtatttttcaatgtagatatcaatctctgtattatttagtatatgattactattgtttaggtttcaatttttgaagtattgatatgaaaacacatatttttttaagtaatgatgtatggtggattttaaaattttgaatattttatctgcagtataccgtgggtcgattttttatagctaaattttttaagtttcaagttatattcgttttgttaatattatatggttttttgtgtttacggttgtataattgtattttaattgtaaattttaagaattcatccgtgatatacctttctttattgatatcgatcaaaacccgtcatcccatataaactcgtctatattatctcgttagctaaatattagtattataaaatccaagaaaataaattatttttgttataaatacaataattttaggatctcacccgtgttataccgtttcttgaatgattttaaatttctactactaatatagattttaaatttatcatagaaagtatatgatttcaattttttgtatttttttttatttaaataaagcaacggcttaaatgatgatatatataattctttttctgtatgtgtatatgattttttatgtgaatattttcattattataaattagtatttttattgttatgcaaaatgttaatataaatatttgctataaatcgaatttatgcatatttctggagtaaaattcacggaattttgtttttgaagatatatgaaaagattgtgtacagatttttagaaagaaattaaacaagatatcgtttgattaatatcttttaaaattttgtaaaactaaataataaatgcgagtggcagccattgtaaataagtctcaactccaagatttatttcacaaaatggctgcaaaaatgtatatgtagatgctataatagcatccattgggcgacaaaagaaaacgtaaaaatatattttttggtaactaagtaaaacaagtatatatagaaaacatgttttgttttgaaatctttctcttacttagttttgcaaaattatcacattaaatgttttacaagataagttggtgtagtagttgttttgcgagtgtgagttcggtttatcttggtatagtataacatcatccggtttactaaggctttaagttgttgggctgtttagtgttcaaacatttgattaaaccgattaaaaagctactatacattaacagccaagggtcgaagaataaacaagacagtgaatttttaaagctgtcgtctgatccacagataggtgaaagtttgatttcgttattaattagtgggaaacaaatggagatttgctgaaacgtactctcgataacagttcatattcaagactcaagagaatctcgtatattctaaggaagacgtacctaaacagaaagttggtcccaaaaaacgagagaaggaatgaaagatcaaggatacatgttttatatacatgaaaaatactaaattttaaaagaagtattaaacgtttttataatgtcaccggaaagaagatgtaaatgtattgatcaaatcatctgactataaaagtaattcaaatcaccatttttttaaatcaatttgaatatttgatgaatttccgtatataaacaatcagtcccgctcttgctgtataaatgaaacgtctatcaaacattagctagtcttgtactggattgcctttacagacaaaagattatactgtatatgtatgtggtctcatgcaaaaaaagtaaaaatgattctgtgtacatctgttttgatttgcatatatattggcttaagtggcaaaggtgcatgcactatttctatttctttgataaaagttttatgatgcatgcattcttaccagtgatttctttaaaaggagaagacatttgttttgtaatagtgacgagaatgtagacagaaaaggaaaggaatcagcacgtgttcatcgctcgacacgtggccaataatagcattggattcagaaaaaaagaaaaagaaaaaagcgaaaaaacctgtataacaggaaaaaaatacaatctgcaccagccgggaatcgaacccgggtctgtaccgtggcagggtactattctaccactagaccactggttatttatttaaaagatttatattggtataaaaccttgaccataaaatgttcctagtgcatccactaagatcaaattcatattaataaacaaaaacataaaattcaaaccgatatagcaagattgctgttagttttgtcttctaaatctgataagtgttcgttattgtcgaggttatgtagctagtttatatattacttgtactaaatttcaatagggcaatcaaaatatacggattttcatgtgtatatatttttctaaatttgcggtttacaaagaaaagttagtggttgatcatattgatttcttgaaagggaaatattaccaataaaatgataaaattgccaagaaaaattagtagtacgatcgataatttagtgatattgggatccaaagagatgatcatgcacttagttaagactccattttctgataagagttaagtggcggtagacccacaaagaaatttgattcggtattgttattattgagtagaaaaacaaagatggagtgtttaactaaatcatgtctaataagtagcaaggtaggtcaatataacgttttacaaacgaaaaatagcattgcatatttaattatctaccaaatatcttaagtcagtcgaataaactaactcattatgttatcaaatcagccgcaaattgtgccgtttaagtcaatactatttttaacttagatatttagtgagtagacttcatacttgcatagtctagtagttatcattgtttaatgcaattttttggttttaatgtaaacttatactactatttggtcatgtaatctcactttctaaaaaaccaatgtaatcatccataatagaaataaaacatttatttaatataattaactaatttttaaacattaaaaagaatagatttatttttatacataaaataatagaaatataaatatatatatatattattataggttgtttattgtaatccaaaagcagaataaaatttgggataggtattaagagtcataaatcttgaaaatagagtcattaattaataaagctgaaaaggaaagattaaaaaaagaagaagaatcctctaaaattgaatttggtaagagtccacgtaggtcaagaagaagaagaagaagatgtcgtgctcgtgttgtgttccaaacgaaaagcgtctatgttctcttcatgtaccgtttctgggtcccacccccctttccttcttcactctccccccaattcctccctctctctctctctctctctctctctctcaccaaaacgtaaatctactctctctatcgcagcagacacagaaaaagagagagcgagagactctgctcacacacatatttacttccctaacttgtctctctctctacacattctggtgagtttcgtaagattcaacaatcgtttagacttcttcttcttcttcttctacagcttttacgttttctggaaaagagatttttggctgatcactacgttgcaggtatatgatttctcaaatgtgagatgggtttgatgttccttttcgctatttctcatctgattttgaattttctgcggattttgtgaggaatcggtagattttgatgtttgttcttgtgggtggttcataacttcatacatttaggggattaaaagaaaattaatttacaaattcggtccttgttgtgaaaaagatttataatctaaaagacattaactttactctctccttgaacaagttttgaattttgaatctttttctgattttgattttcactatgttcataggtaattgcacaattctgggtatacaaaatccaaacgttacgcatattgaattgaaaaatctcgattttgagttctgggtatgaataaaaatctcacctttttaattaattcttactcagggaaacagtaatcgatgttaaagacattgttagtccaatggcttgtcttcttcttcttcttcttaatcggttccgtcgtcaccgccgcagaagacgacggtagcttgtcgttatgcaactgcgacgacgaagacagtctctttagctacgagacaatcctcaactcgcaaaaagtcggcgactttcttatcgcaatcgcttatttctcgatcccaatcgagctggtttacttcgtgagccgcaccaatgtgccttcaccttacaattgggtggtctgcgagtttatagccttcattgttctctgcggcatgacccatttgctcgctggtttcacctacgggcctcactggccttgggtcatgacagctgtcactgtcttcaagatgctgactggtatcgtctctttcctcacggcactctcgttagtcactctcttaccattgcttcttaaggctaaggttcgtgagtttatgttgagtaagaagaccagagagcttgatcgtgaggttgggatcattatgaagcagactgagacgagtttgcatgttcgtatgctcactaccaagattaggacgtctcttgatcgacacaccattctatacactacgcttgtggagttgtccaagactctggggctcaagaactgtgcggtttggatcccgaatgagatcaagacggagatgaatcttactcatgagttaagaccgaggattgatgatgagaatgagaatgagcattttggtggttatgctgggttctcgataccgattagtgagtctgatgttgtgaggattaagagaagcgaagaggtgaatatgttgagccctggttctgtgcttgcctcagtgactagccgagggaagtcaggtcctacggttgggataagagtccctatgcttcgggtttgtaactttaaaggcgggacaccagaggcgattcacatgtgttatgcgatattggtgtgtgtgcttccattgagacagccgcaggcttggacttatcaagagcttgagattgttaaggtggtggctgatcaagtggcggttgcaatctctcacgccgtgattcttgaagaatctcagcttatgagagagaaactcgctgaacagaaccgagcgcttcaggttgcgagggagaacgcactgagagctaatcaagccaaggctgcgttcgagcagatgatgagcgatgcaatgaggtgtcctgtgcggtccattctcgggttgcttcctttgatacttcaggatgggaagttacccgagaaccagactgttatcgttgatgcaatgaggagaaccagcgagttacttgtacagcttgtaaacaatgccggagatataaacaatgggacaatccgcgctgcagagactcattatttcagtttgcattcggttgtgaaagagtcagcttgcgtggcgaggtgtttatgcatggcaaatggttttggtttctcagctgaagtttatagagcattgcctgactacgtcgtaggtgatgatagaaaggtctttcaagcgattttgcatatgcttggggttctaatgaatcgaaagatcaaagggaatgtgactttctgggtttttccggaaagcgggaactcagacgtatcagagaggaaagatattcaagaagcggtttggcgacattgctattcgaaagaatacatggaagttagattcggattcgaggtaactgctgaaggtgaagagagtagtagtagtagtagtggtagtaacctggaggaggaggaagagaatccgagtctcaacgcttgccaaaacattgtaaaggttggtcatttgtgttttgtatgtaaatgtgctaatgacttggtttaacacttttatcttgttttgtgacagtatatgcaagggaatattcgggttgttgaggacggtctaggtttggtgaaaagcgtctcagttgttttccggtttcaactccggcgatcgatgatgtcgagaggcggtggatattctggagaaacgtttagaacctcaactcctccgtctactagccactgatcattgacgtcaggaagggggggaggggaatgtagtgcaaaagaaagatttaaggggtggaatctgagaatttgtaaaaacagtaggggctttaatgagattaacagagagagtactaaaacgttgtcgttcggttgtaaaaacctgaaagttaactaggttttaacctatcgtgtaggcaaaaggtatgatgcagacttgttgtaacttgctggtgataacagaattcaaagtaaaaaaatgtgtcggaggatgttccttacggatttgtgatttacaagcctaccaactcctttgtcaaatattgtgacgttttagatgaagcttataaatttattgatttctgatccagaaaccgtatacaacttgtatccacaatatgtatccaggtacatattaacttcgaccttttaattaacttttgtttttaaaaggtttatgtgattttttttttttaacattgaggtgattcgtgcgacctctctttctctctatttatctctctttcttttcctccgtcgtcttttttggtttgttctctctctgtagaatctcataggagctgccattagcccattcaacgaattagcttctctttgctctttcttccaccatctcaggttcgcttcgatctacaaccaataagcttcttctatatctcctcctttgttcttcggattttgcgaggctttatgttccgattacagtctttcattttgataccacaccgattttgattttccccgatcgttgatttcatctgggctttgttttgttttccgatgtctttgatgaaattatgaggtttctctggatattttagctgattgaaatgatatattgcttcgccgccctctaatttttcggctgatttttttttgtttgtttgtaattttaccaatctaattttgaaaattggaaattagggtttattgcccatcgattatctgatgtgggttttaaagggtttcgattttttagccatgaattcgttatactcacggataaaatctagaaatgattgcggattggtatagtttgagagagccagatcgttgaatatctttgtccatttcaaatcatgacttggcatattgttttctgggtatacataattgtggggattacagaattcaaaatctaatttatttgctccaatcgttaattgctgatagttgaaggagagagagagctttgacgaaacaatttcatactggggaatggcagaggctgttgatgaagattctggggttggacgatctctagaggagagttcaaatggacaacacagtcaagcaggagaagcactctcagagtggcgctcttctggtcaagtggagaacgggactccatccacatccccctcttactgggatatcgatgacgatgatgattatggtaggtcttttcactgtttggtttcccagtgagtaaaacttggatgtggctaatttcaaactgagtttctttatactttgtacaagtgcaaatttcttgatgttaacatacttattttcatcttaatgttgcaaggcagagatttctctttgccttagtatccgatgttgaaaagaatgcatgcatctaaaataattgttggggtggaaatattctagtcatgtgctagagatctttatctgtttgtgttaaggagttcagttttgtatagcatcctactatgtagtatttctccttctttgtttggtttactttattgtactcttgatgaatgtttcagctgtgtaatgtgaactttattatcttcttcaggcctgaaaccctctgagttatatggacagtatacttggaagattccgaaattttcagaaatcactaaaagggagcatcgtagcaatgtttttgaagctggcggttacaaatggtacatggcatctgtttatctttctcatccttatatcttgtgtcacaataaaatctcgggatgtgattgttgaggctctgtgttgttctatttgtcttcaatgtgtcaggtatattttaatttatccacaaggatgtgatgtttgtaatcatctctccttgtttctctgtgttgcaaattatgataaacttcttccaggttagtattattgtccacttgtctgcatggtcccttttctctctctggatacctagtcatgtaggttcttttgctatcttggaggcaggctggagtcagttcgctcagtttactatatctgtgttgagtcaagatctcaagaaatcaaagttttcaggtgattttttcagtcttaatttacgtacccccgtttgaatatgcagacaactgaactcacttcttacagatacactgcaccggttttggaagaaagagcatgattggggatggaaaaagtttatggagttgcctaagttaaaagacgggttcatagatgagtctggctgtcttacaattgaggctaaagttcaggtgatcaggtaatgcaagattaactctttgtaaagctataagtaaaatatttaccacactgtccatttttccatgctgccattcgcttacagctccacatgttcgtatgttgttcaattaaacacatgtgataagattatattctttcattttttttggtatcactgattatgcattaaggataatatccctataattggtccttgcagagagagggtagaccgaccttttcgctgccttgattgcggttataggagagaacttgttagggtgtatttccaaaatgtggagcaaatttgccgacgttttgttgaagagaaaagaagcaagctagggaggttgatagaggacaaggcaagatggacaaggtatttcacatttcaacttgtaccttttaactcctccagatttcggaaatgcgatcatagtgcattgctatttgtgatgataagtgagcaggaagtagctgagattacttcttcttttgaggaaaccatgttatgttagaataaattgttttccaatttccaccatccgtttggagtccaaaataaatttctgtagactgtagtctaaaattttatttggtggctgtggctctccactatctcttatttacaagtcttgatagccaaggttgagatgctgagacggaaaatccctaaaagaggatgtgggaatttttctttagttcaacacacttgttgaaggccaggatttacaccaatctagtatagtactgttgccttacttttatatttcctgtgatatctttctctctgaaaattgagcaatttccctaaaaaggaatgaattatcattcttggttgcagcttcggtgttttctggttagggatggaccaaaactctaggcgtcggatgtgtagagagaaagtggacgtaatcctaaaaggagttgtaaaacactttttcgtagagaaagaagtttcatccactttggtgatggattccttgtatagtgggttgaaggctctagaaggccaaactaagaacatgaaagctaggtcgagacttttagatgccaagcaattgccagcaccgattgttagcgtggacaaagatatgttcgtattagttgatgatgtgctgttactcctagagagagctgctcttgagccattgcctccaaaagatgaaaaaggtcgccagaaccgtacaaaggtcggctgaaattggttataaaataatttttggccgtaattccattatctgttatcatatcttcagtcatttttgtcattctctgatccattattccgtttcagaggacttctggcattattcactagaaagttacttgtattgaaaattttgtttttgttcttcgatgcaaatctaggatggcaatgatggagaagaggtcaacaaggaagccgatgagcgtgatgagagacgtttaactgaattgggtagacgaactgtggagatatttattctttcccatatcttcaggtaacaatgtgtaatatgtttctatacggtatgccattgtgttcttccttgatgtgcttacatatattacttccatatctctgagaactgcagcactaaaatcgaagttgcacatcaagaagctatcgcgctaaaaaggcaggaagaacttattcgtgaggaagaggaagcgtggttggcagaaaccgaacagagggccaaaagaggagcagccgagcgagagaagaaatctaagaagaaacaggtgtgagactttcttctccttctgcttgtcctgtacaacttgttggatgctgatcggagtttctttggttcttgaatatttataggcgaaacagaaacggaacaaaaataaagggaaggacaaaaggaaggaagaaaaggtgagttttgcaacacatgcaaaggatctcgaggaaaaccaaaaccaaaaccaaaacgatgaggaagaaaaggattctgtcacggagaaagcacaatcttcagctgaaaagcctgatactcttggagatgtgtccgacatatctgattctgtggatggttcggctgacattcttcagcctgatttagaagatagggatagtagttctgttctttgggatactgatgccttggaaattcatcctccatcatcagaagggagcagtagaggaagaggcatttcgatatctacacccaatggaattacagaaggaaagagtcattccactatggatgatagttcttcaacttgttctaatgattctatccgatcgggggtaaccaatgggtcctaccaagggaattccttgaatttccgaaaccagaagtcgccgaacaagtaagtttgtttcggctgtcctttgtttcttgtcagtcctgaatccttagtgatacgctttgtgacttgcagaggaaagaaccaacaagtgaaagcaatgactgatgcccacagtttagcgagtgaaacagatgatcaaccctcaacacttggaacagaccccaagggtcagaattattcttccgaggcaagcaacgttggtgaatctgattgggttgttgtctcccacatccaggagccagagggttctcgaaatcgtattcctgttgggagggttcgtcattcatgcttttaatgttttgaaattagaagatcgctgattgaattattggtttcgtgcaaagaggtccagaatttcacaatttagttgtccctttttcaaattcattttgcaggaacgcaaaacggttcaatccattgtgaactcggtcgacatggatcgacctaaagagaaaagcactgctgtactttcttctcccagaaatgttgccaagaatccttcaccattaactcagacaaaaccggagaaaaagagcatttcaaccgcagacggtattccaaacaggaaagtactggcaactggaccaccttcatcaagccaagtagtgcttccttcagatattcagtcgcaaactgttggtctcagagctgatatgcaaaaactctctgctccaaaacaaccaccagcaacaactatatcaaggccttccagtgctccaataatccctgcgatgcgaccctccccaatcaccgtctcttcctcagttcaaacaacaacatcccttcctcgttcggttagctcagctggtcgtctaggtccagatccatccctacacaaccaacaaacatacactcctcaatcctataaaaacgctatagtcggtaactctcttggttcatcatcatctagtttcaaccaccacccaagctctcatggagttgtcccgaccacattgccatcatcatcttactcgcaagcaccaacatcatcttatcagtcaagcttcccttacagtcaagatgggctcttgtggacaggaagaagtcccagttctgtaaacatgggcatgtacaacaacacttactcacccgccgttactagcaacagatcgctgaaccacatggacgttcagatagcgcagcaacaagcacaaagcatgatgacggatgagttccctcacctagacatcatcaatgatctgctggaagacgaacagtgcagcaacatggtgtataacggaagcatattcaatccacaaccgcaagtgttcaacgggcagtactcatcataccatggtgagttattgtctggtggcaggaccaggagtttcggagaggaaggattgcattacatggcacgtggaccatatggtacagacggaatgatgccgagacagtggcaaatgacgaacatggacttgtcgttgccagcaatgaggagcaatggaatggaagatggaacatcatcagcagctaattaccatcacagttactttggtttggacgcttcgaatccaagttttacgtctggtattaatggctacaccgagttcaggccatcgaatggtcattgatcagcaaatggagagaggggatttgtaatgtttttattttttttaaaaaggaaaaaaaatcatgaatatacaatttgtgtaaagagagttgtcttcttgtcatcctctacgtttcaaatggtttttttttttttaaatatagtataagatagttttcgcatagaaaaactcttccctgaaagtccctgaatagtttttataaataaattatactcctctttatctttaatcaaaagaaactgaaatctgtctaatataaaatgtgtgtgtgtgtgtgtttttttgtctaatttatttttttctttctttgtctaatttgattagatcacttctttatttgaatgagtaaaaactagaaaaaaatgtgagccatttaaatctgattcatatcaaaaaattttcgatttaaaaaaaaaaccctcaaaaggtgttgatacggaaaaagaaaagggaaagaagaagagaatggatctagaatcggtgaaaaagtatctggaaggagatgaagacgaaaaggccaaggaaccaatggtggcgaaattaccacacagattcctcgaacgattcgtaaccaatggtcttaaagtggatctcatcgaacctggccgtatcgtctgctccatgaaaatccctcctcatctcctggtaacaaccacatgaacaacaaatccctaatttcgagaaaaaaagaatccctaatgacttttgtgaatttgttgaggaaagaacgcagggaaattcttacacggaggagcaacggcgacgctggtggatttgataggatcagcagtgatctacacagccggagcttcacattccggagtttcagtggagatcaatgtttcataccttgatgctgcttttctcgatgtaacttcctttccttctttcttaaatttattagatgtctttctttgcaaaattgattgacatatatataaaaaaaaacacaggaagagatagagatagaatcaaaggcattgcgtgttggtaaagctgtagcagtagtgagtgtggagctgaggaagaagacgactggtaagattattgctcaaggtcgtcataccaagtactttgctcctcgttccaacctttgatcgttcaaccaacctttcttcttttttacattcaataaacaacatcaaggtgtttttagtctttgtcccatttgcttcttattattattgatactaataaaactacattactatatgtttttctaataatacaaacaaccttactttttctctatatgtgtttacctcgatgttgaactaagctttttttttaatatacagatagatcctgtttaaaaaatttggcttatatatttgttactgtgaatatgatgatcatttcaaggtgatgatgcatttgtaaagtattgatgaggtttgtggtggtaacttattagaattgtttatgtttcactatttttagtttcgcattatgattactttaagttttgatacaaagttggtaccatccaattatttcaatcaagttgttcattcctgccttttcttttactgttttctcacatccaacagatatgtagatcttctgttactacttttgttaatgtatgtgaagcaaaattcaaattaacatagacacatgaattcattaatcaaatttaatcagtgttcatgtatattatcaaactttgtagctcttatttgaaccaaaattcatgtatttttatcatcaaaatactccctttctttcttcttaaacttttatcaaatatatgagccacacgagtatatgacctttgattcaaaagaaaaggggaatagaatactgaacaaaggaaaatgacgcaggtgatgtgatcagttttgtcgaaaaagaatattagttgagatatgttggtttcatacttttgatctttttttgttagtttatgttattactgtatctattagacgatgaattacattatgcatagataaacaattaaatcactagtcattttggcaatcatactttgaaaaaccaccccatccgcaataagtcaagtcatcattaaattaccacatcatgcatgatatcaaatttcatataatattaatatctagtagtagctagtagtactatataataaacattaaataaatcccactagatgcattcttaagagaaatcttccaagaaaaattcagacatattagatgagaaaagaaaaatccaaactagaaatcaatgttgtgttgagttagtgcttaccctcgcagtctcaatctccttcccaaaaagacttttcaaaccaaagaatggtgaaacccttaggaggtaatggtcttcctctctgcatctctctcttcgtttaccagtaaacaaacaacaaaaacgtatttgaaataataaatactattgttttttatttctttttctctctctctctctctcttattgagttttgttgatttctttgctatagaaggaacaagagatgtctctaatgttggttgtaaatcagttgatctcctcctagcttctcttggtggtcttgccgccgctgtagcagctgcttacgccggagaattactccttcgacgccggaaacttgatcaaggtgcttccatggggtataaagatgtcaaaatcgcccctttgattgagaggaaagactcaggtcgacgatcaaacctagagagattctcccactatgttggtaagtattcttatatcctttcgatgcatctcaagaatgaacatggctaatacttttaattaacaaaaaaaggattgctaacaatttcaagtaaagaagatagaaaaataatcaagatcgaccaaaggattagaataacataaaaataaattagagtatttcttaggcagacggaaaaaaagaagagttactatttcttgggttaatatgccaaaaaaaataaaaatatgtataggtaagcattaatgttttggtgataagagatttcaaaatggggtatgtacacgtactctttatccataaaatcataaatgctagaagacctttccacaacaacaaaaaatgagccctttgtaattattttatccaaacataattttggaacaattttgtgtaatcatatatatgttaaaaatgcagcaaggcagctcggatttgaggatccaaatgaatacccacaactatgcaaattagcaaatggatatttgttgaaaacaaaagggtatgatgagaatgtggatgagtatttggagaatgaagctgagcgtgattctctctatgttcatctccttgaagaatttgatagatgcattctcacttatttttctttcaattggacccaatcttccaacctcatctctcaggtactttgatttcaatcaaattcagtatatttttatttggtagtctgataggtgaagtaggctatttactacaaccattagcgatctccaataatgtgtatgaataataaatattatcctataacacaaaatgacaggctttaagcgatgagtcggatcagaaagttccaaaactcaaggatttcgtgatggcagcaacaaggtgattgattgttccatatccatgactttatatatgcatacctatagttacatacatataaattgcgttacccgtaatcgtcgttgcgtaatgattccaactaactgtaccaagcgtaacatataatgtagaactgactattaatctataactattaacaaacattgtagaactaattaatggctttgttaataatgtaggaaacagaggtttgagagagtaacaaaagatctcaaggtgaaaagggtaatttcgacattagtagaagagatgagagtcattgggagcggaagcagtgagccacactgtacggaagtaatgtctccggtggctcataacaaacgaagtcccgtccttctccttatgggcggaggaatgggcgcaggaaagagcaccgtcctcaaagatatcttcctagagtataactcttttttcttgtatttctttaacatatggtggttataagcctacttaatctttctttaaataaccagaaataatattttgtaggtcgttttggtcggaggcacaggccgacgcggtggttatagaggcagacgcgtttaaggagacggatgtaatttatagagctcttagctctagaggtcaccacgatgatatgcttcaaactgctgaattggtacgttgttcttagttctagctagccatcctcgattgtgtatatatatttggctttaacatgctacatttctggttatttccttatatatattttaggttcatcaatcatcaacggatgctgcatcgtccttactagtaacagcattgaacgacggacgtgatgtgataatggatggaacattgtcatgggagccattcgtcgaacaaatgatcgaaatggcaagaaacgtccacaaacaaaaatatcgaatgggcgaaggctacaaggtgtccgaagaggggacgataaccgaaaaatattgggaagaagaagaagaagaaacgaaagaaaatggcaaacaacaaaatctgaaaccttacagaatcgagctggtcggtgtggtttgtgacgcttatcttgccgtagcaagaggcatacggtaaagattcatcaagttttcacattttcgaaaatattttgtagtctttgttactcgttgttagctgctattatcatgctaatcgtaaccaaattttgtttttttataggagagctctaatggtgaagagagcagtgagagtgaaaccacaattgaattcacacaagagatttgctaatgcattcccaaagtattgtgagcttgttgataacgctaggctttattgcaccaatgctgttggtggtcctccaagggtaaattagtcaaaagtcaatatcaaatctattacgatgtcgtttttgggagagatactgatgtgtgtgttttaattggttggtggagcagcttatagcgtggaaagacggaaatagtaagcttctggtggatccagaggatattgattgtctaaaacgggtcagcagtctcaacccggatgcagaatccatttacgagctttatccggatccaagccaattaagcaaacccggttctgtttggaatgatgttgtgttagttccatcgaggcccaaggtccagaaggaacttagcgatgcaatcaggagaatcgaaaaggcccaaccaaaaaattgatgatatttgtgaactagacctttgaaattatcttcttcctgaatttgtcatttgtttccgtcagctttttggttaaataagttaataaaatggtttttgttgtgagttgacatagctagtggaattgagacccatagtcattggtcacgcacatcaaccaagaacaaattgcagtcgataaactaatattttgataacagttacgacttgatcctatcgtatataacttcgatttaacaaacacaagtcgtaatttctaaaaaacaattaactcaatttgtttgaaaataaaagtttcctttttcttcgtaacaagtgaagtcaaatgtttttcactcgtatctcttacaacgttttgatgagatgataagagaagagtgggcccacatatttgcttaacaatacacgttttagggttacgtgtcactaatgttattgggttcatttaatctgggcttaaaagaggcgtgtatcatgttgtaatattcccatttgggctttcatataatgaagttgggccgacaaaaaaaaaaaggactagggttcccaagtatcccactatatataattttagtcgaagaaaattcttttatttttctcttgcaaagacctctcagcagccaacgacagttatcaaagcttaagccgttttagggttttatccttttgctgagatccaatcatggtgagttcttcagtctcaatatctgactgaatcttcttctctgatttacattttccgattgctgaacaattaatggtgaatgttgtaggcggatgttgaaccagaggttgctgctgctggagttcccaagaagaggacgtttaagaagtttgccttcaaaggagttgatctcgatgctcttctcgatatgtctactgatgatcttgtcaagctcttctcttctcgtattcgtagaaggtatatatcaaaccctagactagtctcatttttagattctgtgattgatgtttgacttcattttgactgtttgtgaaatgttcataggttctctagaggtttgacaaggaagccaatggctctgattaagaagctgaggaaagcggtaatcatttcttatatagtcttgaatgtttggttagttcttaagttgctcgtttatcttcactttgttgaatacttggtgttgcttggttagttctgaatatggttttgtaacaattttagtgcaagtctcttctgtttgtgttctctctaagtttgtttaagattggtgttgattgttttagtgatttctggatttgttgtcttgtttcatacattgatacatttctgattctcgagttcatgattaaattccatgttttattgagattcataaccttgttgctgtattagactctgtctggattgcctttatgaatgtttacactgtgtttgagtatgaatgaattgttcctacatcagttactgaatctcttgtctatcctgaatgtacaatagccttgtttctgattgttgcattctgtatatctgagtaagtgtctgatttcgaacttgcgttttggttgattaaacagaaaagggaggcaccacaaggtgagaagccagaaccagtgagaacccacttgaggaacatgatcatcgtccctgaaatgattggaagcatcattggagtgtacaacggaaagactttcaaccaggttgagatcaagcctgagatgattggtcactacctggctgagttctctatctcatacaagccggtcaagcacggtaggcctggtgttggtgctacccactcttccagattcattccccttaagtgaaaagcttctattggggaatgtgtttacttgctcgttatatgtggatctaagtacgtggatctcttatgtttttgaagctttataatgacattactttagaagctttctcaactctagctcttgcgttttcattatcatgttacaagaggatcttaaatcaaatcattttggatttttgttatgtttatgttgttataatttatttggatttgattaattgaaaatgaagtgacacctagaacttgctcaaacatgggtattgttgttttccttgttattaggactctgcttaacattacacttttgttaagagtaacaacatacatctaaaatctcataacagaggatagaaatcgtacccactgcaaaaaccagatactcaaattagtccacttcacgacaacagattaatgggcctttaagtatatggacatgggcctttgtcagttataagtctcccttaaccagttgacttgtgttccctctaactttaacaaaagattgttcctgagaaattctagggtttctgaaatcgaggagagatccaatcggcaatggcgaatcaagtgatcaccggaatcaaagaaacagctcagtcaattactggagcggctcgtccatggggcgatttcctcgatctttccgccttcagcttcccttcctccatcgccgatgcaacaactcgcgtaactcagaacctgactcacttccgcatcaactacagtatcattctctctatcctcctaggtctaaccctaatcacacgtccaatcgccatcctcgcgtttatagccgttggcttagcttggttcttcctctacttcgctcgcgaggagccactcacgatcttcggattcactattgatgacggcatcgtcgctgtgcttctcattggtctttcgattgggtcgctagttaccaccggagtttggctcagagctctcaccaccgttggatttggtgttctggttttgatcttacacgctgcgttaagaggaacggatgatcttgtgagtgacgatctggaatcaccttatggaccgatgctctctacctctggcggtggtaacgacggtgctcgtggtgattacagtggaatctgatcaacacgatttgataatgagtttggggatttagggttttgttgttttgtaaattgtcattgtttgttttgtgtcccattaaacattgttaatgacaaaatatgttttaagacgaaaaccggtttagaggaagaggattgatgttacccgtctgtgagatgatatggtttcggtctcccaaaactgttctcttttggtttttatgaaccttgttaaaggagaagaaaaggtttgaatccataaagagacaagaacagagtacacaactttcttcattcaatctgatgattcatagtagcgccgagcaaactcaatcaagagctcaagctttaaagccagcatccgaacacaaagccattattgttttgacaaaacacttgtagccacaacctcatttatcggacaaatatcttcactggtaactcatatttcgcattccttcatgtttggtgttgaaaatttccatcacatgcataataagaaaatttcgtaagaggaatgccaccactaaccattgaatcgtttatagaaagaatcaaaacatcaacagagctccaccacaaaccctaattaggaatagactcggacaccaacaaaaaaaaaacagaatcagaaagttcaggttcgacctacgacccggtttgatatccggtttacgttatggtttacatatattgtatacttgacccggttagaaaattccttacaacttcttctgcttctttatcttgataacaactgtgcttagaaaagccacggcccatcatgtgtaatgaggcctatggaattttaaatggattccattattatgtgatagagaaactatcacccgtttttcttgtttgtttatagctttattatttttaacaaaagtttttctaaaactataaaatatttttaacatatagttttatatgttgctccatctatttttaaataatgtattatctgcgataatttaagtttggtgaagaatcctctagagcgtcaacttgtcaaattaattattgaccccatcaaacatcgaacatgcttctgcctgatccaagaaatgaagacaaatattaagatactgaaatttaaaacatttcaacgtaactaattgtacaatgtttgtgtttacacatacattagtacacatattttctatatatatgcatgcatgtacgttggaacgatactttcctaaaacttcgatttgttcgttttgggattcaacatcttctccatgtgcttccccatttatcaatatttacattctcagttttctttattttatctatatattttattcttaaacttttttttaacgttaaacatcaaattaaataaggactgcttagaatagctccattataaccagtaaacaccattaatccaaaagggccctatatgttattatactatatctattatgtcatcgatatatatatatatatatatctatattttattgcatatatatgtcttttaccttcaagttttacacatgtgcaatctcttgacaataataaattacttgtagctcatttctgaaagtgataaaggatacaacgtaattccatatttctagtggtttttcatttttcattatagagaggatatttgtgtataattatgataaccttgttaataaatttagttggtataaaagttaatattcctaattaatttaatgggaaattaaatgataaacaaaggtaatgaaatgaagagacccatgaatatgcacatggcattgctccctctcttccctatgggtcctatttctctattttatttcctccaaccaaagccaattatcactttaagtaccaacaaatcaatataccaacaaagtgaattttccccatttttgtaattatattcatctgatataacatatgtatattgtaatattgtaattctaattataccgacttcgaaattatacttggggaaagtttactttagggtcaaatactcgatcgctatgatctttagtttcactttcaagacgaaccaaaagaatactgttctgcctttagaaaataactgactattaagagactgaaattaaagagaagtaatgtgagattaaattttccatagtggaataaaaatcacatattccttatacgaatatacacatctttggcaaaataaataaataaagacaaacatatacataggaataggatgttcaaattattacacattttccattacaaatgtctcaaatatttaacttaagttcattacacataatagcatacaaactatatctacataccaaatccagatcaaaacacagacaatcaaaagaaactgaacaatgtatttcatcgtaagaaaaaaaagagcaattaacaccaatcaatgtgttaatcaaatatataatcgataccacttatccttttaatttgacttcaagctctgctcttgcacttctccatcgccctcggagctgaaatatttttacaattaataagcaaagacatttgaccacggtatttattctgttaaaagagtatattttttattccctctgttatttaatctctttctttttttgcatttgacaaaagagaatcaaatatcatgtattatatcaatgatttaaaagatcaaagcgataagttttctttcgacaaatttgttctttacggtagaaatataattgtgcgaaaaataatgaacggtttaagcgtttgatgattagacatcatcttaaacgatagcatattaaattatttaggcgaccaagttatgcggttgaggtgtacattatagtaaacttttaagctcttttgtaagttttttttttctttttggggcaaatctcttttgtaagctattttaactatattgtatacatatacacgtaaattttaatttaaatgggtaacaaactgaaatcaaaatttaatcaatgtgaatataatatgcattggtagaaaatacataccgagaccaatggcatccgatcctttcatgagacgtaaacgcttgcatgtatcgacgaacattctaataaataaaaagattaaaacaaatggttatttattagaaacaaataaatgacataaacaaaaataaagctcgaattttaaccgaaacaataaagctctaattaaatggtaattaataagggagaagaagaagacgtacggccaaggaacgtcgccgacgagcatccaatcaccgtctttgtcttcataagagggaacatagtcccagctattcaccaaatccatcaatttcctctcattcatgaagtctatcattccttcttctcctccatgtttgcctaaaataatcttaggtataagaacttgatatcctgaatttaaacttggtggttttcttttatggtgcaacaaatgaaatatacatttttcgcaattggattttatcacatagttttcttttcacagtttctaaactactactaacgggttactcaattatgaaatatttgtatactcgataacggtaattcatttgggactgatctatcatcatgatgattaatttttctttctatagtaacaattaattagtaactaaatgtgcatggaaggatctacatatatatataaggaatatacttataaaacgtacccatggtaaaagagctgaacatgttggacaaagcattagaaagctcatcgtagcttttatacatcctcaaatcgattttcctcaagtacggtgctccgtccattgataccttcacgaacgccgccgcctccgggccaccgcttgatttttggcaggaaaccatcacgttcttccggtatgatctcaccggtggccatcccacaacttgtgccctatattttttttaaaacggaaaaacggttatgttatacaagatatagactgtagttagctttgacgtgatgtcacataaattttacttgcatgagactatgggttaaacataattaaatatattaagacattggacgatttaagaagagaaaaaaaccgtagacatatgataaaatggttttggcgaagaaaaatatatatctttaatgaaatttctgtttttttttgcagtcacctttacaaaaatgttaatattaagagcagtagagaagagtggaaaataaatcataaaggacaaaatagtaaaattacttggccggaggtttggctggatctttaggacaagcactcttctccttggaatcaaaagtcacgacgtcatgagtcgtagatccttccttgtttgcaggctcattattcagatttagcttcagatcaaccgtctctgagaaccctctcttgtttccggttaccggagccactgtatctccaccgggaagaccaagacacagctcagtctccctcagattcagctcgacactgcccatcattattaacctttcttcttctttggtgttcttcttcttgggaaggtgatgaggaagatggaaaaatggttttataaaaacactcaaataatacaaagtgagatgagtctgtattatatctctgtctaggaggtagctgcatgtgtatgtcgtatttaagagatctttgattaaacgggttttagacacgtggatgaatctaagccctttgattaagtcatcatcctcgagttttagtcttttagactaatcagtaatcactgttattactctattactgttattgaatctttcttatgatttatcttgtagattatgtatatattattgcatttgactatacaaaatggatatatattttaatccgtctttaatcgtttttctcccgttaaaagagatatataacattttgagattacaagcgaaagcacaagtgaaggaaagattttaaaattacaagtgaattatgaaacacattcgaagcaaccaagtgaattaagtggtgatgaaccgattaattgatatggggtatctaactaaatatatgtatataccatatggtcttaaaaactatatcaacgtatagtttataaatatatattcttttgagtggcgaggtcgcagacatctcatatgagagtgttacaatagagatgtacattattattaatataactatattatgctttttgacttctaaatataattattaactaatgaatatatattcatgattttgattatttttccccgtaagattcttcgccggaaccttccaattatgcatatcacatccacatgattcaattattcatcccacaataaaagcgcagccctcttgtatataattattctcatgccaatacaaaataaagcatacggtacatcttcaatatttattgattaaaaactcacctataaacacgtacagcgaaatgtgtatctagacacataaaaacgcatcattactctttaatgtttatactttgtagttaacaaactataaattgcaatattataaacaccactttgtagttaacaataaaattggtgattaattttctttacagatatttacagattaaattgactactaaaatataatgtctgtttttgattattgaaaattatttttcttcttttatattgcttgtgttattcttgtagtatgaaagttttcaacaatagggtagtttttttttttttttgtagttatgaaagcacctaaatttgtattacattttctattaatttgtctatattatcgcatttctaaacaaaaaaacaaattctgtcgcacttccaaaacatattttgtttttatttcatcaatcacgcttccaaaaacaaaaatgatatgttttggaattgtattttcacggcgcttttgcgaattttcaaactttcgttcaaaattcgactttagtgatctactagacactggttttagttcaaagtaatcagttaggcgtaaactgtgaatacgggacgtttaaataacaccaagcgtactaaccataattaaccaacgtaaattcaataaatatgaaaataaagagggaaaaaggcatattcctaccctaataaaatctatgagaggggacatgagtggcatcaaaatccaaaggaagagagggtacaattaacatcaccataaattccaaagccaaaatttaaattaatgagaagaagaaaaacatggagatgataaagggacaagttacatcaaataaaattcaggggcgaaaacatcttaaaccctacttttgttccttgccttgtctacatcctcctctttaacccttttctctccttttgtttctatcccaaaaaactctcatgagttttcaaatcaacgtaccccaaatttttcaatcgaattttgggtcactttgtcttatatatcacatcattttgtcgtgttttatcaatgtgtatctactttgtctgatcaatatatatatctactgatcactatggaattcacatgaaattgtaaaccagtgaataatataaattctcggtccagcctacatgattacaaaaaaatgcgcccgcacacataaatggattgtatgcgaaactttaatgagattgaaccaatgcaaccaaatccatatatcatcagtattctcaaggatacatatggagaccacattttctttgtcacacgatagagaccatcttaatttgatgtgtaattttggtaatgctttttcacttgattatatatatttttcattttttgggaaaattatatataggtctaatcatgtattttatatgcatggtgtcgaaattaatgagttattttcaaaggtatatatgtgtgttaattatgaacttgcaagataagaacgtgtgaggaccaggtgtactttcatgtggacaatacaaggccacaactctcaacattctaccacacagaaaaataaatcaatagtactggttcatttgtgtccatcttcaattttttttttatagttttctcatttacattagttgttggaatatacttctcgcatttaaggaatgcagccaaatgacatgcattgctgcatgcatgcaattgaaacgatccacaaccaaataataagtttacattgactaaaatgtaaaatgtgattgtatgtgaaagcaacaactcttttgagactcaaacaaattactttacgtcaacacttgctctacagtcttatatatgtatatgggttaaaacgatcaattggctagaatttaaagaacctaatagaaaagtatatttcagttctccattctattattttacttttgttcgagtcatatttagtttaaagtgtgtaatagtcatatttttaaaatttttgatatgtacattactaagtataagttacatatttacatctatattatgttgcttagttctaaacacataatatgtattgaactattgaaccttgttctccaccacaaaatggttcattttttctgtacaacttaaaataatatagaaaagaaagaaatcttagtatatattgaagcaatcatttccgctatcatttgttgcattatttatttctctggtgagtttgcttcatctccattctgacattttcgaccgacgatatatcatatatatacaatatttccttttagtcgtcttttattaatatttatttatgtaactttttgtgaaggttaatagttagtagattatctcaattcctttggttttttcaagaaatctaattcgaaagtaaatatgtgaaagacactcatttagcaaatgactataaatggagatgtatcttaatcaaatggttaagtctattttcagtggagtttgattccactgtcgcattatcccatataataaaaattgtttatgaattggaatttgtcgatttaaaaatataaaaagaagaagaagaagaaaatgactacaaattaactattccttgaatatagtttcagaatgtacatattcagacaatttgctcatgttcttacacatttctagctaatgataattaaatggttttcttgaagtatatatttaaaaagtaaaaatgcgagaatctgctctatacgctcatgatatattattctatatgttggcataactcttaacaatatagcctcgtggtgggggctaaccacagtaccgttgcttggaatgtctactttttaattaatgtttctaaaagtggttaattactagattaattaaacccccaattttattaatagacaatcttgtaaaaaaattaatttgttatctctgcgtttttggtgatggtccacagattatttctatacgtgttatgataactaaacagtctttattttctcaaagagatttaattaaggtttgttcttattttatttatatatactcatttgtaatcatcgtgaaatggtaatcaaatatattgggatctcaaaatatctgatattggttgatccccaaaactttaacggtgagatcaaagacgatttgcagaatccataaattaggtaaatagtgggatgagtaagagatttgggggatcgctttattgattacatttgaccggtaaagatattctctttgtccaaataattccataatattttgacaaggaaaacattttaaactcatacaaatactttgaagataatattatttatcaaaagttcaaaactatcactgtatcacatattgacgcaaaagttttttttttttttttaacgttctataataacctaaagagtgtcaaacattgactaatatttgaagtttttctaatgcaaactaaaaaagaaaaaagaaaaagaaaagaagaaacagatccctcaaattaatgaggaaaccccgaggttggtttacgaacccaagttgagtaaaataaaagattagtagtaatatgtggataagaaaattgtaaagttggctttatggttaaagaaaatgggaaaaaaatagtggtggttagattgaagtggtccagatacgccgtcaaagcaaaataaaactccaaaatgtagcggcccagcccatttaattactcctataaagatggtccaattgcaaatgaaaatgtgttaaaatttcggaaagcattatttctactacgaaggaatttaactaacttaataaagaaaatattctaaactttggaccacaccaattattatacaatgtgttgatttctattgtaaatcatttatatcaacaaaagagtcataagtacactctaatttcgttggttaagtgctaaaaatcttgcgcggtttagctttcggattagattttataaagagtgctataatcaaccagcgattctgtgatcagatgtgggacctgcatcttctgtcattggttacacgtgtacggttgatacggtggcttgagatcttctactgctctgtagggcaagcaaatatttgagtgacatgtgttatgattaatcatgtcggcaaatacaattacgaacgaattatcatcattatcttcacttctttggctaaattgctaatggatattggaggaatttattaggttttaatccgacatataagagtatatacaaaagaaaaatattaatttttcaaattttattttagaaaaagtttcatgaaatattttgcgttaactgctactatagtaaattcgtgattgttacttaatggtctaatttatcctttaaaaaaccaaaacaaatcatttttgtgtgattagttgttgtagctaagacattgtcattttattttcagtataagttactaaattcgtttatatatataattaaattgcaaagtatgctacagtatgacatataatgagtgcagaaaaataaaagatgatgccataatactatagtgaatgagaaaagcctgcggatattcatgcctaataaaagtctttaactccttatggataagatatatatgggaatacaaaacatttaatttatatttattttttatcttacgttccactgacggattataaataaattttttaggaaaaactttatatttgtttgtgtgtgcaaactttatattacatatattagtcatcaaatgcttctatatattgtgaccaattcacaaataatgatataaatatatatatattcccatcagtttttcttggtataaatacaattaattcaattcaaacttatgacctgttctgtcaagaaaacgaatctagtaatttatgactgaaccaagaagagaatgtttctcaccgtacagaagaaatcaatgcgtgatgagtactgagtagctgttagcagtcacctctaattgtatgaatttattttgttgaaatatgttcgttaatcgttagtacttgttgaaagtcactacgtacgtatatatgtagataaaaaaaaaaaaaaaattcttttaggattattgttacacgtataatgtaaagttataacataagttcttaacaactctttgcatagtaccgattcggacttcgatttcgaaagccatgcatgagaaaaccaaaaaatggagccaaaacttagatccggttcaattcgagtaggttatgtcaaagacgtaaacatctacaataggagctccatataagtagaatacaaccaatgccacgctgtaacataaacaaagacagcgagaatctgttaaagatctctcaggttccaaaacaaaactacaagaccccattatgatgttactgacatttaactaaagccttgtgctagttgatccttaaggaagatgtcctgtcgtgatgctcagttttatttcaaattcatatatacgtgtgtgtgtgtgtgtggtgatcatgattaataggttagagacagagagacaaaagttgtgggctttaacaaaccccagtaaagaacaataagtaattttgtcacgtaggctctgtttttggctcttcaacacccaaagtacctgttttttgaagatgtgagacataaattattacttatgatctcaagtcaataaactcatcaaatctgaactacccacaatccaaacattgaacactagctacctttacatatagagttaattaaccatccatctattgagaaaacgagtaaaatatgtattcggttgttgttcttggtaagaaaagattatgagcttacgatccgaaatttcttggttgtgataagttattaatgggagatagagagaggtgatatgcccatatggcataccacatgtggtgggggattcgaagatttgatctggaccgtctatcacaagaaagaaagatgaaaatattttgtttttgggtttggacagatgggagaaaaagaaagtgtccccacaaatgtccccaagaagatgggacacacttttgcctcaaagttgctgttactgctaccgacaagcttagctttttttcctttgtccttaattcagaaaacagtttcttctctctctaccagtatctatctttattctcctttaacttgtataaaacactcagcttcctcgaagcctctcatcttcatcatcagcagcttctctatatctctcctctctttcaaggataataaccaaaagcttttctttttatcttctcctgcaattcttgaagaaatggatgagtttgttaacctcaaggaaacagagctgaggctgggattaccgggaacagataatgtatgtgaagcaaaagagagagtttcttgctgtaataacaacaataagagagtactatcaactgatactgagaaggagattgaatcatcatcaaggaaaactgaaacatcccctcctcgaaagtaagttaaactcacacaaaagtctctgaatctgtagtggtggagaattcagttgattgaccgtgtttcttcctttttgcagggctcagattgttggatggccaccagttagatcttacaggaagaacaacattcagagtaagaagaatgaatctgagcatgagggtcaaggaatctatgtgaaagtaagtatggatggtgcaccatacttgaggaaaatagatctgagttgttacaaaggatactcagagttgcttaaagctttagaagtgatgttcaaattctctgtgggagagtactttgagagagatggatataaaggttcagactttgtgcctacttatgaagacaaagatggtgattggatgctcattggtgatgttccatgggagtaagtcttctttcatatacctgtctgaaaacaatttccacaaaatcaaaaatcagaaacaacaattttgtaagtgttcttatgggttctgtttgttgttgcaggatgttcatatgtacgtgcaagagactaaggatcatgaaaggatcagaagccaaaggtttaggctgtggtgtatgagatatatcttcaagaaatctaacagagacacaaaagaacttgaagaaaaatagagtttcttttggttcagagaaatctctgtctgtgcttgggttgtcgggtttctcgggcaagatctatgttcattggattgaatccaattcatagcctttatttacctcatcggtaaaattcaaatgtaaacatgcttaatggtcttaagcatatgaaactggaacctaattacattttgtttcagaaacagggcaaaaggttgtccttaaatctttggttatgtgtattacattaattaaagtgttatgaagattgaagagttgtttttatatttgtagcaattctgttttgcgttctcattgatcaaagagattttcaagcaatacccattttctattttggttcactagttcttagatcatattattgatggtcgaggttggattactcccattaattaatacaattcgatcaaagccaacatgaacataaatcaatagaaacaaaaaaaaaacttatcttatatgagaaatacgttttgcccaaagcttagggttcatttcatcagccaaaaacaacagacacctacctctctgctttcatggcaacatatatatacgcattagatccaatcagaagatgtaagactagacaggccgtagtaatgagtgaagcttttggaattgatgaactgtgttacgagcttcttcgttttctcagacatggcgggagagaccttgttcacgcctgaaacagcaaaacgaataatatataatcagcttgtaaaatgcagattctttagttatagagtttgaaagattgatgcaaatgtaccaataagactttcaacaaaagtacgaaacagaattccaggaaagagtcgagagaaaactcacctgtagcttcttcttcttaggccttctcttcctcttgggtttgtgagcatcagaattagaactcaagttgctactctgacttgtatgcgaactagtggcagcatgtgaagactggcttcttctatgtgaagtgttgctggaggaaggtatctcattcctcttcacagatgaatactgacgagatgttgatgcaaaccttgaccgtggtggtggcattaaaaccctagtagagtatggcttctacaataaaagaaaagaaatcacttaccaaaatactaacattcaatatataacacttcattttcatattctttgatcccccccggaattgaacaagttacgtttctgactttctcggcgtataagagtccccagtatcatgcaacaacaaaactgtgagtagctttcgcatcatacctgatttctttcgtcactggacatgctcgatgttgctctaccagaagcactagaaaccggctctctgagaaaaaaacgctgacaacagtcagagatgatctttactggaaacgttaagccagaaaagagtcaacaatcgacttcttctagcatagaaatcatatggaatttagaggtgaatacaccactagcctcgttgactcttcttcatctctcatgttatacactaatacaatcgataaactacactaagtattgagattaaagaaactaatccacatttacaaggcgtactttgtgcttttatcagtccactcatcatccgcatctgcttcgtcacttgaacttccgttgacaaagaagtcatcgtcactcaggtccaaaagagcatcatcttcgctccctgtctctgtttttcacacgaaccaaaaaatattaatgatcaacataatcagtattttttcaaaagccaacagaaggtcggaatgcatgcaatgacaaaaaaaagcacgctgccccaaattttaaacagaaattcaagggaaaaaggacccatataaacatctccacatatcatcattaccttccaactctttcccactggcagcagcaaaaattatgttggctttgatttgcttccgcaatttacttctccgctcagatacttgtaaatcatcagatccactaaatagcgatacatacttctcattcttggggaagaactgcattgcacatatcaagatctcagtagcattatttcaacagactcattctattggataactaggaaatgtagcagaggataacacgctgaagaaattgtgaaaaagaagaactcgtctattcttccgactaacacaggaaactggatttggattgtataaaatgcttaccctaacatattcaaggtcttctttgagtctattgagttgcccacctatttctgcatcttgcacataaccaccagatgtactccgatgtagcttctcgagacgtcttatactcctttcaatctttctccgctctacacaaagaaagatgtaattgttttgtccgagtaagccaaatgattcagcggaaaaacaactcagaacaatacaaatatacaatgcatcaaaaataaagcactcaccgaagaatctgacctttctgttccttaggaagattttacgttcaaaagcaagacggaaatggatatcttgctgcttcttcagatcatccaacttcttttctagagcctctcttacttcaggaggaagatcctaagagacaattgcatttgtacatattcatacatcaaaattcatctcttctccattaaagacatattgcttctcgaaatcaattcatgatctctcataagcaagttaatcgaccatgatcctattataatcataagaaacaaattcctcaaaagatttaagagaaaacactgaaacctactttgattagctaaattttcaatctaaaaggccggagaaggtaactctaaacgctaatttcgtaggaagagaagaagagtagttactttacgaatcatgcgaccgatggaacgaatttgattcttgagagaggaattc

SEQ ID NO: 10 - DNA, 100079 bp, Arabidopsis thaliana
aagcttttagggttagatctatatttattaaacgcaataaatctctgtagagtcttacctgtataatcactcagatttggacagaatccgtggtagctttggttgatactatgtggaagaacaccaacattgatctgagacagggtttttactggttgctttatttgcgtatagtttcctaggtcatgggttttggctggcttcatttttcaatgaaaatctggggtcttattgtaagcttttgtgactatcctttagttgttgtagccatatcaatttcatattaaatcaatgtcacctgattatcccgtaagggaagacaaggagattgattttgttcctgttgtacagcctattgtgttgttgcggttgattctgctgggaggcaaattcccatgtcctttttggaaagagtaaaagaagattttaacaagcgatatggtggtggaaaggctgcaactgctcaagcaaacagcttgaataaggagtttgggtactttttcattatctcttctatttggatgatcttctcttttatattcgtggactgactctttttggtaactttgaagctctaaactgaaagagcatatgcagtattgcatggatcatcctgatgagattagcaagcttgctaaggtgaaggcgcaagtgtcagaagttaagggtgtaatgatggaaaacattgagaaggtttgaatctgaccctttctgtcctcaatgtatatatttacatctatggttgacccatctgaaagagctcatctagtcatactaagttactgtgaaatcaattactaataattcaatgcattacatcttacgggaaatgtccagtttaccaatgtaacaccgcttacatatgcgactcattatttgcaggttcttgaccgtggtgagaaaattgagcttttggtggacaaaaccgaaaatcttcgctcacaggttagactctctcatacccttatctcctgcatctatttgcctacactcacacacaaagatgaacatgctttttgagttcatagctgactcatcctattaccatatcttgtgtctaactgaactcaaactgccacaggcacaagatttcagaacaacaggaacgcagatgagaagaaagatgtggcttcagaacatgaagataaaactcatagtgctcgccatcattatcgcactgattctcatcatcgtgctctcagtttgccatgggtttaagtgttaagcccagaaaattcaaaacttctgagatctttctcactcggtacatcgtagtgccttctcttttattgttcgatcttcaatctaatgtttctgcttgaattggttttgtatagatagacatatatgtatgctactcatttgctatattgcttgcatctgatgacattgatcccttgcgaaccagtcagtacttgacaagagatccgaaactattaaatgattttgttgactgaagattgcattgtggtggtgatgataaaaatttgagattgtattgacgattatacggcgtgatgtgtgctggttactttaaatttagataagagtagtgccctctctatatcgttactagggatggtagtacatatatatacgtacgtcatattccgaccaccaaggttgttttgttcaaactcctcccgcaacgcttgagtagatcttgtcggccatcgggtcgtttatgagttcaaacatacgtgtttactctgctatcagtaggagcaaccaatacagagtttagtagtacatacagaagcatcttgtcaagaaacaacaatctgtagtcacaatggtataaatatttgggctattttagttaagtgggccgaatatttaatgggccgtaaaacctaatttgagatcctgcaaccaaaactttcccgctaaaacactctcattcccgctcaagctcacaccagattccgattttcacttttgttcaccgagcaccaaatcccaacaaaattccgatacggtcaatcatatcagagaatggaattcgatatcccattgccggaggagcttgagcttctagaagccaattctcatttctacgaagaagaagatgagtacctaaactttgaggagccgccatatccttacccaatcgacggcgatgaagaaaaggaagaagaacgcgtcgcgcacaaggagcctcatgtccgacaatcggaatcttctgatatcaagggttgtaaacgacccaggagtctaatttccgatccgattgtgaatctcgacgaagtctctccagcttctgataagagaagcaaaattgatgataaccgggtagaaattgaagatgaggattggttacgcttctctccggttaaggaagtagttcacgttatggaggaggaagaagaagttgtcattccccaggagactatgttgtccaggttactatactgttcatgagacttaccgactcggaatttcttttttagtaatctcgttattggaatttgcagatacgcttctgagatagatggggaatgcttcccaatcacagcacctgacggaggagatagggtttatgcgaaattctgccgggctttgggagatgaagaggtgaacaaattggatgtgaaagacaaatctaatggtaccatgtattatctatttcttactggggaatactcttttcttgtattcattcgtttctcaatcttctgacaagaactataattttctcgatagttaacttatatcattcatttgtttttttgcaggtcttattaaagatcctatcagtgttcttttgcagcaatcagagaaagaggcatttaacaaggtcttgcaagctagttctgaagatcagaatgaaaccatttctgcagaaacgtctgtaatgcatgagaaactctgggtggacaaatattctccgagctccttcactgagcttctcagtgatgagcaaaccaatcgagaggtacttttcacttcttggtgatgaatctggaaaattagatgaagaagagaattcggtagaatagaggcttatttgttgtactagttgaccgttattaatgttatttgcaggttctgttatggcttaagcagtgggatgcttctgtttttggatctgaaattaggagcacgacagaggcagtattgtcagctttgaaacgacattctaccacaagtcatcatcagaaatcggattcagcttttacaaggaaaaaacagttcaatagatggagtaaggagagttttggatattctaaaaatgcagaagtgagcaataccaacactgcagatattaatgacttgtggaacaaaaagtccaaacttactggtcctcctgaacaaaaggtgagcgataaactgatctagacttcaagtttattcttataatctgcttctggttgtcttttattataaccataagtatgcatcggttgtaaaattcgtagtttcactgttgttgtagatccttctgctctgtggtgcccccggacttggaaagacaacgcttgctcacattgcagctaagcattgtggatatcgcgttgttgaggtattcttgtataccttttactttccatgataacgaatggattcttcatcattttgttgcagcaacgtttctgtatgtgcatttcttattcttcttttcttgtgtattatgtttaattcaacctgtgttattttgcagatcaatgctagtgacgagcgatcagcatcagctattgaaactagaattcttgatgtagttcagatgaactctgtcacagctgattctagacctaaatgtttggtatgctttacatactccttattcgcttgggacctttcttcattatgtcgaactgtattactccatgttgtctgaaatggaagagactgacactaatttatgtaggtgattgatgagatagatggagctcttggtgatggaaaaggagcagttgatgttattcttaagatggtatgtgtatgtatgctggtactgagactttggttaagtttgggtctacttagtatcaactctttgcttgttttacctctttcccagtttcagtaactgcacgaaggtttttggttaatcttatcttacgttgctagctctaaacctcctttgattctctttatcatttcttgaactttttctcctcttggagaccaatttgggaatgactatgtggactatgtattagcatttctaagtatataattgtatctttgctacataggtgttggcagaaagaaaacatgctacaggcaaggaaaatgtagagaatgtaaagacttcctcgaagaaggaccgccgaacagcaccactatcaagacctgtcatttgtatatgtaatgatttatatgcaccagcactaagacctctgcgacagatagcaaagtaagttcaagttcaacgttctgttggctttaagggtctctagttcctgtttgtgtggtgaagctagcacttttttttattattatgtagagcatactgctttcaaagtgcttaactgtctccggtacacgttagctaattttgcttatcatatgcttattctagagaattcttctcttagtaattagtatgataataagcccccatgcttctgttgcagggttcatatatttgttcaaccaacagtgagtcgtgtggtaaacaggtaactatttcttactctactgtgtgcgaagaagaactcttctaagtttcttcactattttgttttattttggtgaagctacggccattgataactattaatccaactgttagtcacctgtaagactattttccactctgaattgagagtctggaaatttatcattccacaagatgtgactaaatttgttaaatagtatgaaatgatgcagcacatctcattgctatcatggttgggaagtattttggataagaaccattgaactatattcatattaaagtcaaaatttctccctgattttagatatctatcaaaatcgtcttactaggctgatatgtgtaaatgacaggctcaagtacatctgtaatatggagggtatgaaagcaagatcattcgctcttagtgctcttgcggagtacactggtatctttctctctttaatttggtttttagtgtgatcttaattttcttagagaaattttttggtcgtgtatttgtttcctacataattctgctatcttttgccttttatttggtggttactggttacagaatgtgacattcgctcttgcttgaacactctgcaatttctctacaagaagaaagaaaccatcaatgtggtgagactttgatacccttcttgcactggctctgtgttttccactttcgatttgatttgtactagcccatctagctaggaacaccgtaacagttttcaacatttttgttctataggcaactaactttttatttggtttcccatccttggggatttagccttctgataagctaagacccgccttctttctctttcagattgacattggatctcaagttgttgggcggaaagacatgtcaaagagtctgtttgatatctggaaagaggtaagcccaattaaagtgtcgtagcaatctttgcttacagataatttcattttatatttaagcttgcttcctctttctagatattcaccacgagaaaaatgaaacgagaacgatctaatgacgcttctggcagtggggccaaaaactttgacttcttacactctctcgtgtccagtcggtatgtactagacaatgaatttttctttcattattcaataacttttctgctttgtgtattcatccttaagtttaactgaatgtgcaggggtgattatgatttgattttcgatggtatacatgaaaacattttgcagctccactaccatgatccagtgatggacaagacagtaaggctaattaatgactttgaatccctatgactgttttgttctgtatgtttgtgcggctatgttctgaaataacgtatgtgtattcttttttacataaagatcagctgcttggacggtcttggaacttctgatttgctgcatcgatacataatgcgcactcagcaaatgcctctctatggtaaaggctttaaagctcagatgattgcagagtcctgtaaataagactgatattttctttttaccttatgatgtagtttactttcctagcctggtgatacctatacaccgtcgtgtggcccaaattcaaaaaccaatgattgagtggcctaagtcataccacaggtgattttggtgtcatattttattgataaagaaaggcaacattcaaagcgtccctttttactagtgcttctcaatatcaaatgtaccagatgtcgaacacttttggtagaaaagcaggagtctctgcggtcttggcaccacaagatacctccctatattggaaggcatttgtcaatcaagtctttcgtagaagactctatttccccgctattgcatattctttctcccccaactcttagaccggtatgtcttcatctgttgaatgttggtttttctttgtattcattgttcctttcatggtttactgtgctgctcttctaagcatatcatctttgctattctcctcaggtggcatcgcatttgctatcagataggcaaaaggaacaactggcgggtttggtcatgcttatgtgttcttattctttgacttataagaatgtgaaatctgatcctgttctaagtagcctcagggaggatgctgcttcagatgctttagttcttgctttagatccacatctatttgatttcattaatttcaaggttttgtttctttttcttttcttagtatctgtccactacattctgcctttggagataatactcatcgcctttccaacatttgacagggtcaccaatttaaacatcatgtactcgccttagcgatgaaacaagtgttggtacatgaagtaagtcgcatcttcttccactaaacttgttatggatttgtgcctttagctgcctgaagatcttgattgtctgattttcaaaaacatgttaaaaactcaggttgagaagcaaaagatactgcaagcaagtggaggaaagtccgggatcttgaacaaacccgaaattaagaaaataaatcaagacttagcgaagaaaaccaatgctgcagcaaatgaaagtcaaagaaccccagttacctctaaacctccgtcggtttcagttgggactgcgacaacatcaaaacctaattctagtgatgtgaaaaaggcatctcgcaacgcccttaatttcttcgacaggtaattggaggattggatgtcatttttctcaactagaacttcattatatcccaagctattatcacccatagaaatggtggatgacttgcctcatcggaattaatttcaaccagacagctcagtgacagaaatcatgactaattgcattttgtctggtaaaaacaggtttaggaagtcaaggaaagattatgaagatccagaggatgtacaaaatcgagcaactgcaaaaagagattcacgtcctcttctcttcaagtttaacgaggtatgtcacaacctccgggatatagcaaccaaccaaaagctcctctaaaggatgattctaagataactatatacaaaccttatgagattcaaacttaaggccaaattcgaaatattgacactgatgttatgtgtatgctttatacgtacagggtttcacaaatgctgtgaagagacccgttagaatgcgggagtttctactatgattctgcaacgaagtcagtcttagattggtgcgtagtagactagtagttacatactaagctttaatctgatttatgacaatgtttgcatatgctaagaaaagccaagtaagagagaaaatgaattgtgtaaatacccactgtttttttcgttggaaatcttgtttactatatattttacacaatacaacatatatgtcattgacagtaaacctaaaccccatgcttgatatatcttcgagggataaactttctaatgactagtgtagttgcattgcattctatcagcaatatctttatctttcaatgcatttgaatgtagactatgtagtagaagaattggtcgaactccaaaatcagtttgagaaataaaaagaatttggggtgagagaggctcgaactctcgacctcaggatcactctgtagctatgagacctacgcgctagccaactgcgccaccacccctttttgtgatattgtcacaagggttaataattgattcttcgtttcgataaaagacacttgtaatctacatttcctttttgatttaatcattactatgcaacgtgattcaataatatagttctacaattgtgtacatacatatgacaaaccaaatagattatgatatgttctcaaagagtatctgtatatattccaaccatataacaaaagagagttaaaaaataacaagaagttttccctcatgtattgtactatcgttatgatttattcatctagaacgcatttatttgtgataatgtttatttgtagtactgtgttctaatttggtccttagctagggtccttggtcaaaaggccttattgtcattagactttccggacatcacagagctcatccacaccgcctcctctctcaaacacagcggctgctcccattcccgaacctgtgcggtttcccagtcacagtgagagtgttagtgtgtacgagagagtgggagtcaaaaggagagtgagagtgaacatattacatacctatacacattgacactacgccaaaacgacagtctttaccacgtcgtttcatctcatgcagcagcgtcgcaacgcatctggctcctgagaatgtgtagttgttagatgaggaaggaaattaatgatatgtgaacaaagaggaagcatacctgtagcgcccaagggatgtccaatggctatggctcctccattgacattgatcttttccgcgtctagcccgagcttgttccgacaataaacaaactgagatgcaaatgcctgaacacacagtaggattttagacaaagaatataaggcctataagtaatagactatgagctggagtaaatgtaaaggaagaagagttgttctattatcttaaacctcgttaatctcaaacaagtcgacgtcattgagttctaaaccagctgccttgactgcagcaggaatggcaacggctggcccaacccccatgatggctgggtccacaccaactgcagaaaatgtcctgtaatgtgtccaagagtgctgttactaaatgaagcaaagaaaggtcaatatagagtatcaactatcaagcccacctgaatacaccaagaatgggaaggcctttctgcattgcgacatttctcctcataaggagaacagctccagcaccgtcacttaattggctagaattccctgtttgacacaaaggaaacaagggatttgggaaaaagatggatcaaacaaacatttttctctgaaaatgaccaattaatctggggaaagtaccagcagttgtggttccgtcttccttaaacactggcttcagctttgcaagtccggaaagggttgtgttaggtcgaatcccatcatccacagaaactgttatgggtttctcatcacctgtctttgggtcaacaatctgaaatgtaaaaacaaaattcattaaattgggtaaagagcacttgatgcatcctgaagaatctaacatgttcacagttgttgcaaggtggaaaacagcatgtaccttggtttttacaggggttatctcatccttaaactttccggaagcagtagcagaagcagcctttctgtgagaatcaacctacacatttgactcgataaactaagggatggagggcaatatcgaatacatgcattagaactaagaatgcttatttgacttacagcagcttgatcctgctcctcccttgaaacattaaaccggtgtgctacattttctgaagtaatacccattggaagaaggcaattgtgagcttgttcaaacttcttcacctaaaacaacagaatacgttctatgagagctaatcattcaacagagccaatcaatacactccgggaaggaaggagagagacaataagagcatggtacatttgggttgactgatcctttccatccccttggattagttgtcatggactccagcccagctccaatacctgtattcaacgtaatttcagctcaattcttcatgccaagataagacaatttatgtaaccaaagatagttactatcttaccaatgtcataaaaaccagcttttatggcagcggcaacatcagcaacagcctgaagcccagatgaacactgtctgttcacggttctgatgggaacagtttcttccaacagacaaaaagagcataagcatacaacaaacgaaaaagaagaaaagattcaggattaccataatacagaagaaaatattaccggggaaaccagcatagaacgcagccatcctgcattcactggctctctgagatcctggtcccaaaacagtacccactacaatgtcaccaacttcacttgggtttacattagttttctctatcaatgcctagcaagaagaagcacacataagtgcaaattggaaaaaggggaagccaaaaaacaggaaacagaactgaacaagacatactctcaatacagaggcaagcaactcgtctggaaatgtatccttgaagctgccacgttttgccttgcaaagtgcagtcctttgtgccctgtgaatcacaagaagcatagaaaaaggttcaacaagtttccataaagtcttgcacaatatcaaaagaagaagagaaacttaacgcgacaatgacaacatcatctccatattgatatgcagcactgtctttggacaagcaagctgaggccttgtgaggtagcaacacaaacagtaagagatacattgtaattcaaaaacaattcctataccaagatattactaataattcaaaaaaaaaaaaaacatcgaacaagagccaaccgaaatcagccttgagagttatggtttcagtaataaattcgtaatcacatgcaaacaattgagagcaattagcgaggggaaattggaaacagaagattcgaaatcaaagcatcggaagagcttacagagagagaggcgtcggaagatgacgaaggttgaagatgacgaagcagtatcctttgtctctccgttgctttttccattgttttcgtttgattattttgaagcccaaactgggctaaaccgttcgttgtaaagcagataaaagacaaaggaaaaaaaaaactaaaccgcttcatcccggtttaggatgggttacatacatatacggtttcagggtttagcggaatcaatcatctggttttgatgctaaacgacgtcgtatagagtaagatgtctttctttctctctcagaaaaactcgacagtcatttcttcgacggcacgtttctcttatgaattaaccctaaaaacgccgtcttagtctctcttcgagcctactttcaaattcgaaactttcgttcatctgttctctacgtaagtctttgctttcttcttttccctgctgttgttgtttctttttggtttttcttctcaatgtttatggagaatttttcgtttttgatttccatggattatgagttgttacttattaagtttggtgctttggtctgtttctcattggcataatctgtgattagtatctcataatcaattgtagtaatcatttagttacatatgctttatgattaagctgtaacagttttgttggaatttcatatgtccatgtttttcaattccaataatttaacattgaaacaaacaaagagcagctcaaatggtcaaactaaatcgagaatcctgagttggcgaatagaatgggagctgatgtcgtatcaagtcctaaagaagattgagatccatctgcttagcgataaataagtaaacatgggccaagttagtgaaactttcgatctataaaatttgctttgggcttgtatatttatgctaccacgacatgaggtggtactatataggtcagggctgattattctacaagatagattacaatttacttaaacggtctcgttagcgcgtttgagaacaacatgattaacgttgaagagcgcgtttcataaattgctggatttgaaataatttgagaagatgagttaagtgaggcgcgtttgagaacaacaatggagaacgttgcaatttatgggctgagttttaatgggttgggcttattactccaacatattgctttacataaaaaaaagttgtgtttttttacacaattgaccctcaactttcttggtatacaacttttacctaaaccggtaaatgcttctcaatactaatttacagactccacacaatctcataaatctatattcttcccatcttctgctttcattcaaccaataaatttaaaaccaacccaaaaaaaggctcatgtatctcacaacttacgtttatttgagagggcttttaggttcttcgcttgggttgcaaggcaacagtcattgatcgaagtcgttcaacaatctccgtaaacgatggccgtactcctggatcgaatgaccagcattgctccatcaacttcctccactcagcttcacaccgttcaggcaccggaggtcttaacgtattgttcacaattccacctttttatcaaaaccaaacagatcaaaaattagatcataaaccaaagctcaatccaagttcatcttgttcaaagactgaagaactgctcatgctagaaacttaccaatgatggcaccgcaatgcagattcgcatagggttcttcgcctgtcaagatctcccacatcacgataccaaatgagaaaacatcgacctgcaaaaacatgttaagattaaaacaaagactcttaacattttcaatgttttgattttggactcaacaacatactttctctgagacccgattgctgcttccgtttagcagctctggtgccatccatggaagggttcctcttactccaccagagacaagcgtgtttcgttttattctcgacaatccgaaatctccaacctgcaaattcaacagtgagactaataaatacagcactttactcatacaacttggcttgaaattacctgattttggggaaaagtgttaccttgcaaatgggtcgttgtggatccctcaagtttacaagcaagttatcgcatttaagatcaaaatgaacaatatttttcatatgtagatactccatgccaaatgcagaatcaagagttatcatcagttttttgcgcctatcaagtaatctgtgcccaaagtttttccatcagtaaactcagaatgtcatatcacaaaaggtcatacaaagatttgacagattattgtgtacctgtcttttctctgcaagacatgcctcaaagatccgttcaccatatactcagtcactgttgccattgttccaccaggtccatctggtacaactccataaaaggccactacgttaggatggtgaagattcgccaatatccgagcttctctccagaaatctttagtctgtttcagtaaggcatcagtgaaaactgcggttctgaaattcccttcaaaagtacaaagactcgagagaagagttaaacctgccgtgcttgctcggatgatccaccagagaaacaactattctttatcctcttgatagcaacatcagttcctctccacttcccatagtaaacagttccaaatgtaccagatccaagctcgtgtaagtcttcaagatcagtgtttttaattatctgtaagccatatattccagcttcgatttcaaccattgcagcttcgctgaatgaatcatcggtgtttctgcttttcttgtacttttcctgcaatatgaaaaaaataccagagagataaaccccaacctgacacacaccaagacagccagaatttctaatctaaaggaaaacataaatttcgtacctccatttctgattcatgatccgcatttgtaatctctttctcccttgtgtaggatttgtgatcatcatcggactccctatttacttgagggacaatagtagctgataagagattatctgaaattacttcgttcgtcacatcctcaactatcaactgtggaccaagcagcttgcttttgaagaaatcatctgacccctgcgtgtgcataaaagtagtttctctacttcccaccttcctaagtggcaatccactatagtgaatactctcttctctaggaagagatttttgagtatctgaatcatcgctatttgtctccaaatcctgcacataatttgaggaaaacagacttagaccagaaagactgctaaatttacgcaatgaatagattaattatgcttacatgtctcggaatcataggttcctgtctcagaaataccacggggaaatttgtattgggtgaggagtaatctgctttatcacttgacttggttgtactacatagttgatctgtagctgaagtgtggcttctgatgagaatatctagtgacatgtcatgctggaaaccattaaatttttccctcgaacaatcaagataattttcgttggtgttaactgataaagagaacactgagcttcctgaatcttgtgaatcacttgaagtaatctgagcagctggttgatgattcggactgaaataattcggactgaaggagctattactgttactaccatcctgtttctttgttgcctgatcaaaagaatcgggattattatcgcgattgatccaactattaggaacttccttggtgagttcaagctccttgcatctcttgccttctggattattgaaatagatatcatcactatcttcccactttgatgtagccacaacacgtagattctttctcaatattttccatggttgtttggtaaatgcttctaacccattgttgatttggctctcatcatgcagctgcggatcagaaagagcgtttttcttaagcgtcattttctcggctccgatataagcttggccatgggggtaaatatcatcgcttggcctccggtcatgaagattcacttctggatgcttctgcttttgtgtagtagtctcaaaaaagaacctattttgctgtgggaagtttggagcagccaagtaagggtcaaagaaaccattttgatcggcaaaataaggaacgtcggtgtttgctctcttgtggactgaaaaaggagatgttggaggagattgttgaccaaacgagttcctgggaatctgcattttcggcataaaatgaacagcattcgtgttcccatatggtttcatgaaggttggactgttgctgtctttgtgttcccatgtatgaacagaagtaggcgagtctcgaagatgaaatgtagggctaaattctgaagcattcccaaattgtgtggtctgacttgttccactttggccgctggaactcttttgaggactcacatctacaataccattaagagctgaaacatactgataatgatctatatccgtctgctggttcgtgtttcggtttatgttcatattcctttcatggaaaattttaggactctctgatgattctgtggaaggtacaagaaagaccctaatcctctgggatccagcctttgtttcagcttcttgatactcttcaatcatatgaagaagatcctcatctgagcaaaccgatataagggcatcaagatcttctcctggtaattgatacttgattgtatgcggatggttgcacaaagcataagtcttgtgcatcaattcgtttaatccaacatgtttgcgtattgagataatccgagtctcccctccaatgtatctaagcttgccatcaccaggccgctgtaagatccttcccccgaagctacaaagaagcttcaatacttcaggcaaataaacatctgatattgcagtttgaaacatcttccgaggtgagtctgcaacatttgactcagcaaagtaaccattcgaggaattaataccttctgacatgttggaatcaactctttgaaggccaagaattctgttgaaatcctcgtaaacaagatggcgattattataattaccctcaacatttctgttaacaccaccatgttgtagtcttcgttgagcaccaaaatccctcaaaaactcatttgaaaattcctctcctgtctgagaacagttattaccgcaaccaacttctccattgaacctatccctacctaaatgctgattggagctgccaggaaactccattctcatgttctcaagaaccaaaaacgctttattctttcttctgcacaatctcttgtatcacagattctgagtaaccaatttctgttcttcaactccccaaatttcaaaacaaaaaatgttgagaggaaaatacaggattctcttacgctctttgaggaaatacagcgaacaggtaatggagattcacaagccacaagcaattttgtctatcagcaaacctccaacaaacatcttcagggtatattgctacaagatcataccaaatcaaacaaagaccagagtctcattcaaacgaattagaccagaaattaccctgcataacaacaacaacaacaacaacgagaaacaaatttcaaaatcaattttttctgcaaatgttgatcacacaaatcaattgtatatacatatataagcaacgagatcattgatgacaccgaatgtggtgtaatcgaattgaaaaattggagctttagatgaatttgattacctagggaaaaatggccaatgagattaacaatgaaggagaagaataacaaacaaacaaaagatgagatttttgggtaaaagagaagaatgtttctagagattgaagtttttcaaaagttgaggtttttgatttgcgagagagagagagagaagagagacgcagagaagcgctctcaaaataacgcgggtgggtgacaaactccaaacaaaataaaaactaaacctttctctctcgaaattctctctttttatttcttattcttgaaattatttttgattttattcgttgcacttgaatcatgggtgaaatcatcttcaatctattaataattttgtcttatcttatttttatttttttcaaatagtaaattcataaattgcatgtggaggtttttgagggaacgtttttatctatttctttctttttttagccaattccagaaactcttttattttctttactcatctcttagttttgttaaccaaataaaacagatcatccaaatttagatttttattgggatcttacctaaaaagattgtgtaggatgtctatgcatgtatgtttttaaaaacatggtatatagttgagacattatgttgtgcacgttgagctttaaatacctccattaaatctttattaataacatatcaacccccttgcactaaattaaaatcttcacaacattaagatataaccagaattgtttgatgagctattcaatatattgacgtcatgacatggcaaactacaagaaccaaactttaagttgcactaacaagtaacaaataagaccgttttttaaatgatgaaacaagaaaaactaaaaaaaaacattagtctctctttctctctgtctgagtcttaaaaatgcataagctgctaaagagaacaaacaaagcgaaaacgagacaacatccaacaacatacatcacagagcttcttctaatgttttctttttcctgcaacactcttttgtaaacgattgaatagggaagagagatcttggatgttggttttacctatatgattcaggacgttttggtttgctctgtatcacttgctcaatcttgtccagaacaataggggtcaacaatgggatcacatcaacagctttcatattttcttgaatctgtcaaggtacaaaaaaagaaacaaaatctttcagatcttggatccaaatctagaccgagactcgctatgttaatgctttataagcgatcaagaactaacctgtgactcccttgtggcaccagtgataacagatgacacattaggatttgaagcacaccatgcgattgcaagctgagccaaggttacacctagctcatctgcaatgggtttgagaccgctaactttcctcagcacgtcatccacaagtgatctattggcaaggttctgcgaaagaaattaaaaccaagacatgtaccagtgtattagttagatgcagaagcagattgaggtcttagcaaatatgaccaagaatacacaagaaaaaggaaaaaaaaggaatactttgtagttctccaatgcaaatcggctgtctgagggaatagctcccttgttgtatttaccagtgagcacaccagatgcaagtgggctccaggtagtgagacctataccatggttggtgtacagaggaagaaactctgtctcaacctacataacagaagagcataacttgagctacataacacgagactacaacaacttaagactgtacaagataagacgcaaacatgaaagtaaattaaagaaaaagagagtcagattacaaactttgtgcctagcgaacatgttgtattctggctgttcgacaattggaccaaccaaatccaaccggtcagcagctccccatgcctccgtaatttgttgagctgaccattcactggttccccaatagaaggcccaacccttatcaatcacgtagttcatcgccctcacagtctcttcgataggagttgaagcatccggcctgtaataaatgacccaattcacacaaaaaaaggaaacatttttaataaacatatgtcaatcaaagaatctagtgacacttagatcaatgcaaagatgccacttttccaaaatatcttgtgcaatgtatggcaaaatgcagatcccaattatcagatatgaaataaaagtggaaaccaaatagatccacactatacagcactaagctacatcataagtggattcaaattgtaaattttataaattcaaaaacagcaatttgtactaaaggcaagcacatgtaagaaaattaaatgcgcagacaacatagtacaccagaaatattcagataaaccttacactcaaatcagatcatatcaaaaccctagatcttcaaagaaccaagtgaaaaaaaataaaatcactaaataaaaaaacaaatctgaaattggtcacctgtggcaatagagcacatcaacgtaatccatatcaagtcgtttgagagaagctttagtgccttcaacgatatgtttcctagataaacccttatcgttaggaccaggaccaccccagaagatcttggtagagatgacgatatcggatcgacgccaacccagttcacgaatcgcttgacccataatctcctcagcgcgaccattagcgtaaacctcagcgttatcgaagaaattgactccatgatcacgacaacactgaagaatcgatttcgcttctttcacatcgagctggttcccgaacgtaacccacgctccgaacgagagcgtgctcacttttaaacccgatttccccagattcttgtactgcatgttttcagaaatcgattcaaatctgttgatctaaatctcactatcgctctctctctctttaggtctcaaagagtttgttgtaatgaatgaagaagaacagacaataagtactctattaccaatcttaataagtgacaacacttagcaaaatacggtaagctaccggtttggttttacttttccggttttcatgatcaaccaatatgtaccaaaattttgaatgtaatatcatagcaaatccaacactcgaatacgatgatttctgcaatttccggtacaaaattaggtaccaaaccatattgaacctccagatattggttgttggtaagaatttatccggtctaaaggtattccggttaagtcgcaatttgtataaaatatgtgattttaattcgtgatctaattaagatgctgatccctcgtactaaaaaagaaagcgtgatctcgtaattttaattaagatggaaaaaaaagactaaaaagagaagatttttatttggctcctaatgggtcaaagaatcccatgtgaatgactttagtgtagtctccatgtacctaccaatctaatgacagacacgtgtactttcttttatgaaaagttggtcattaatagaagagtttttgcagtaatggaagaactttgcccgtatacgaataaaatcaagtcactgtcacgtgaaaggtttcatcagtcactcaactttggaatatttcaagtccttcacgttcacactgggttttaggttgttgggctttgtttctgtataggccttttaggaagcccatattatcttactccatattctagtaagtagtaactcacgtcacacatagagatgtttggatatgtaaacaagagatcgacatgacacttgtatattattaacatctaattccaaaatttaatgattttggctgataaccgtcaagtcttgatatgctgttattgtaatacatttatgatgatcatttatatagtttatgggacgacaattttaatactctaaaaagttttttaaagtagacatgttatccaccaattacacttattgtattttgacaatttttagaaaaggtctattatattagctattttactatgttaccaaacatgttatgtataactctttactataaaaaaaagtcttaaaaggagttgtatttgtattgttaaagtaaagaatattagaaggggaaaagaaaaatagatttagtaataatgtttgagaatcaagtttatgattatgagaagataatattggataaagagaaccaagtttatgattatgagaagataattaatattggtagacttgatgaattataaaatttatctgctgttttggtaatgaatgggttggagaaacagattggattcgatgcatgtgagtgtggggtttggattcgttaccctctaaaaactctagttttattggccaccaagaaaaaaataagaggaagatagattagaaaattcgcctaaatctcccaccaagggttgacattttttctcgattttttctcgtacgttatcaaatcctaatctagctttatctgcccttttctttcatgtaccccgatactaatcatatggttttttgctatgttaagcacatgcatgctattataaacggcttcatatataattccctaccacagtttttttaaaacgtatgattttacttttacctagctatatgatacatgatatattgctattagttgtaagaaattttgagtttttgcaaattattcaagatctgatatatataaaccgatacattttgatgaaccactcgattaagagtactactaaccaaatatgacgtttttgagaaagaattttatcatacctttggatttaaaccaatttatcttactatttatatagcttttcgcagtattttttaaaacacaaaaaagtatttttctgttgaaattgtatggattatgaagatcacaggatcaacttagttcacgggtatcgtttttagaagatttctatcatctatactatacttataagtttaaactctccacttttttccatttgattagagaggcacagtgagtgtttcatgtgagtcttttctaacattttgtagtttacttttcgtttcttgtttttgttgaatttttagaatacttgtcttcgactaacttctaaagaaaacggtaaagtgccgttttattttatctgcgaggattgggaaatatatatgagtcattttccagcaaatctttaatcgccgatctctaatcgtatgttgatctctaatcgcgcaagaaaaccgtatatattttagaacagtatcttaggtagatctcacatgcatttttcatctttttttgctaattcgtaatataatgacaccgcatagttagaagaaattaatttgacacgtctcaatcgaatttaacgttgcaatgacacgataaagatcatttatatgaaaattacggaagaaccttctagcgtacgtccgatcgagaggatctaaaatcttttggtttctttcttgtgtgcaaattttgtcatttagttttatataacaaagacaaaaacaacacataactaaactaaaaacaaaaccacgtctcttcgtagcacaaaacgacgacgtacaatgtcgataggatccaagttccaactattcgatatttttgtaacgtttgggagtgtcggtgcctcagctaatatagtaaccagcgacaaatacaaatacttcgaattatccactatatatctatttatatacatacctcaaaatgtaatcataaatatatcacacttatatacatttatggcactggatcatgatgaagatgtcgtctccaaggtttgattcaaggaaatcaactgaaacatttacatgcagtaaagatatgtcgtaaactggaataatggtaacgacgattgatcgtttagctcatttaatattttcgcgtaatcgtccaattcatcaaagaaagacacactcttttactgaacttgtaatttttggctgattaaacaaacactatatggctagactttcccggtttaatggttaatgacaaaaattagtcacagagtcgaataatgggttcttgctgtttttcacttaggagaggtcgtgaggaaaatgagaaaaaaacgatgagtaaaaaagaagtgattgggaccaatttgacccgcgagttttggcgtaaccaaacatttcgcaccaacaagatcttctctttattatagctttttgcacttttacaaaagtaaatttgagcaataaaagtgtaacaaaaaaagtttcaattattactagttacccgccaatccaacctcccccataatgcacacacatggtacacatcatatatgtaatatataggacaatattttcttacgcgtatatatatatatatatatatatatatattcagaaattaactaattactgggaaacataataattaaaaaaatatttaaataatagaagatgataatgaagagtgcattttgacaatagtgtatttaaatctaattatatatgttaagcgaaacctatacaaacttcggagtgatctaaatttttagctaatagatcattcgattttacaaaaaaaaaaaaaaaaaatattattttctatttactatagctttacaacattcttttaattacgacagtgatgtttctccaattgataataatgttccataataatcaaacggaaacgagtatgttaatgtcaccgtagttaaactaagacaaaaggttctgacttctgaaccgtttgatcgtatcatcaattgtagcatgacgttggatcatcattatgtacccaacaaaaacatatataacgttgtactcaatatgatcattcacttcaagtcttcgaaagtaagttagaaattgtcaactatttaacaattttttttaacaaaatccaaccactcttcagaagcttaaaaaggtaaaaacctaccagattattctttcacaaattacagtcgttagattacttttcaaataatattgtgtagaaattctttatagtcacattttgaatgatagtaaccgtctactctaaactattatgtttaatctcaataatccatattttatagttggagtgggttgagacttgggagacggtcaaaacgttacaataatattcttagtttaaagctcgatttggtagaaagtttgactttacatatttgtgtattttttggataggataggtccgataggatttgggatatgatatcatgggttcgtccaagttatagtaatgttgggattgggggtaaattggtaaaactataattaggcaaagcgtgaagaaaaaaaaaattgacattatgatgagaggagttcgggttgttgcatgggaacattatttgtgctcccataaaggtaaataaaaaccaaattataatcatgggatatttaactaagaaaacttgatatcacgaggaaaatcattataagttcagatttaaagccttttcaaatatagcgtacataactatattctatatgtagtcgatgtctcgatgaaatgcttgtttattaaggagacgaatccactagcaatttttatatccaactaatttatttattttagtttctttctcaaaatataaatttcgattgtagtttaattgataagaccaaattcattgagcatgcagtaccctagcaaccaactaatcgtgagaacagtttgaaaattctaattgggatagtcaagtcaacgacctcaacgcgtattctttaagttcttccgttttctttttttctttctaagccgtgattaccgcctcggaaaatcatggagttttcacggaaaataatttttagactatagttatatactctaataaatacaattgcaatacccgctaattcagcaggaaactatgacaactggtttccgtgtacggaatgactctcttgcccgcatcattcttgatgatgtgtcatacactacaaggcaagaaaaaatcaataaataaatcaaagttaatagtagtatagtatatagtataatctgttttgctcagtcatattcactcaccgtaaatgccaaagtgaaagcatcagtttgaagccagttagcttctgtttttttattatgtcatattcaaaatcattcaattattcatatgtcaataattactcggttacagggtgaaattttataatctgattcgtatgaaccaacgactcaaaagtttagctagctagtagctactcaaaaaaaaaaaaaaactacttgttaaaactacaagtttagatttagacatatgttcactagattttgacagctacgcattccttaaaatgtctgatgtttaattagcatgatttactaaaatagacttgtatttattatgttaaaacaaaatacgcagtttttgttcgctgaaaatgttccaaaacaataatattctttaagcgaaaaatagaaattcatataattatattacagttaagggaaacaaaaagaggaagaattcgttggcaacaattgacaaatacctaaagcgtgcgaggtcagtaaatcacacgcttgagcagttagtggcggttagaacggtaaataaaggagacggaattaacaagtaatcacgttaaaaaaagctaaacgaagaatcaaattgtgtaggagacgacgtcgtatagatacataacggccgtctgtcttaacggctctttttggtgtcgtcttcttttatttttattttggtctcccaccagattctataagaggaccaatatatctccaaactcgtacattcactgtctttaactctcactactctctctctctctctcctctgttctaattctctaggaacagagtaaaagactttggctcagcttctgcctctccaatggcggttcttccgacatggcttttagcaatgatgtgtttactcttcttcgtcggagctatggagaacactacacacgacaacatctcttctctccctaggtttttatctctactacaatctctctcttatttttttatgaaatgttaagatccatgtttctttcaatacagagaatcagatttttattattatctgcattagtaatttgatatatttttcattctcgagctacattttgctcagattccacaataaatcttccgaaaataaattcttcgttttcacattagttatttgttatagttttcattcgttctagctacattttccatcggattccaaaaataatttccaaaagtataaaaatattaaatttactgttttagttctattcaaccgacaaaattatcaacgagagaaaatagtttttgtttttttcaccttttcgatatctactacaatattccctcccttcttcaaagtaaatgatctgagccgttaaattgtgttatgatctagatccaacgatctaaaccgtacattccgctttctttctttttgctgcattcagtcaactttattacgtagctacacttgactctgtttcgtctattttacccattttgacctccgacaatgcgatacgttaaaattgttccatagggttgttttcgtcatttaataaacctgtcgacgacacttccttctctaacggtttctccggttagcgaattttatggagcagtgtagtactagtgcagtgtggtgcattccccaataattatattaaaaacattacttattatatactatagtttctcacttgtttagtagcatgtgtcaatcattaatttcctctagattctcaatttttggatttctaatgatttcctaacaaatattagatccgacgaaaccgaatggaaccaacacgcagtgacgaatccagatgaagtagcggacgaagttctcgccttgacagaaatgtaagtaccaaaatcttctcgtgatttttaactttatcattgaattaatatatactacatgtttgtggggaaaagtcacaaaagtacaatattgggtatgcatcgtcctataagtgctaactaatattcatttacaatagtgttgtgacttttgtttcattctattgttgaatcaagatctatcctactaaagctgtcacatttatttctcccctaaccaacttaattcgttttttttgttactatattatacctcgtctataaatccccatgttcacactattataactatgacaaaaatagtgtatgcgcttaaattattcttactactgctgagatctactcccgtgaacaattggcattcattacttttctgtcaggattcttgaaaaataagacaatactattattttatgtttgagaacctaagttgttaatctttctctgaggaaaatacatattatatcacctactacatgtttcatgcattgttagttttaaaaggtattattcattctatttttctctatgtagagtagtctttttataaattttaaatttactaaaagaattctcgtttttttctgttttctttttcaattgttgttgaactaaatagtagtagctcccagcagacagttttcacttcaaacaccacatgcactaataatactagacagatccgcgtccaacgcattattgcacatatatataattatctatgttttatgtaagaaaaactataccatgtccttttccaaaattaattatctttcacatcaccaaccatgcatacggctgagtacagtacaatacgaattcgttatatttacttcaacatacgtacacttttaactgttcattaattatccataaatcctctataaatttgatcaaaaaaaataaaaatgtttattaagcactttggacagtacccccatgtggtcataagtcgtaacagagcaatccatacgctttatacggtcaaaaaacaaagaacggtatccgttaaaacggacgggcttgatcgtcgttatccaacggtgattgtttgtttgtccttatttaacggttacctttaacgtcgtttccttcaggaatcttagccagagaagagaacctaatcccaccgacacacgtctatgaaaaaagtctaacaatatatatgtagtatttatcatcaaccatgtgcacatgttctgatttgattttgattttgttttttttctttctttcaaataatttatttcaaattccatagcgagatccagttgagaaaaaatgaaattaaagtcgaatcttactaaaccggatatgattttacaggagtgtgagaaaccataccgagaggaggaaactaggttactttacttgcggaacaggaaaccctatcgacgattgttggcgatgtgaccccaattggcacaagaaccgtaaacgcctagcggattgcggtatcggatttggaagaaacgcgatcggtggtcgtgatggacgattctacgtagtcactgacccaagagacgacaatccggttaaccctagaccggggactttacgtcacgccgtgatccaagaccgaccactatggatcgttttcaaacgtgacatggtgattcagctaaaacaagagcttatcgttaacagtttcaaaacgatcgatggacgtggcgcaaacgttcacattgctaacggtggttgcatcacgattcagtttgtgacgaatgtgatcgttcacggattgcatattcatgactgtaaaccaactggtaacgctatggtgagaagctcagagacgcattttgggtggaggacaatggcagatggtgacgcgatttcgatctttggatcgagtcatgtatggattgatcataactcgttgtcccattgcgctgatgggcttgtggacgcagtcatgggctcaaccgcgattaccatctctaacaaccacttaactcaccataacgaggttcttttcaagacttgttgtttcattagttaataattgcttcttttctttggctgaattcggtttttgatgatatggtttgatctacttttttacaggttatgttgctaggacatagtgactcgtacatgagggacaaagctatgcaagtgaccattgcttacaatcattttggagtcggacttattcaaagaatgccgaggtatatataaaagacataacaaaacagagtgtgctctgcttttgtgttctgtttcttgagtattctccgtttttgtgcttatgacaatgcgattaacttctctttgcaggtgtcgacacgggtacttccatgttgttaacaacgactacactcactgggaaatgtacgcaataggtggtagcgcaaacccgacaatcaacagtcaaggaaaccgctatgccgccccaaaaaacccctttgctaaagaggtaattaataactcaaccaaaataagttagacccgtgagtgattttgtgaatgtaagtttgtgacatttttgatgtttggatgtttttgataggtgacgaagagagtggacacaccggctagtcattggaaaggatggaattggagatcggaaggagatttgcttcagaacggtgcttacttcacttcttcaggagccgccgcgtctggcagctacgcacgtgcctccagcctttccgcgaaatcttcgtcattggtcggacacattacttccgacgctggagctctaccttgtcgcagaggacgtcaatgttcctcatagttactaccccaccaccaaaattcaaaaccatcttccattatattcagacaaaagtgtaaatttacacacatttgtcatttaaaaagccaattatcttttttttttgtcttttcggtgtgtgtgtttgtgtcgatttttctcaacctcgggtttgcttgcttcaaccgcaagttaacacaagaaaagggaaaagaaccaacctttcatgaaaaaagagaaatccccgaagtgttgttggttgtttggttctatctgatcaactcagattgttcttcgtctgtccctgtcttctatccagagaaacaagaatattatctcttgttttcttttcttcttgtaatttttgaggtttataaattaatatagggtctataaatgatttgtgaatctttttacttttcattgtattataaatgttggctggatttttagctttaatttcccatgtggttgtaacttgtcatgattagtacttagctttgtagcgattgaagcaagcaatagtagtaattgttagtttattaaaagtttgcattaatgttatttaaattccaaagaaatatcttaattgcgacaaattcgaatagccagctattttatcacccacacttgttttcaatatgctttccttatcatgcgtaactttagaaaagtaacaaaactattaattctaaaaatattaattttgttattagtatttttagtgtgagaagtccctaatctaaaaaggtgtaatattagatcaagttggttatgtatttttcttcttaaaagcatatatatttttgttgggaagaacaaattagcatatctatttttatttggctttttgcattggaaagtagatcgtacgttaacataaaaaacaagagaagcctaaaacacgctaaattgaccccatgtgcccacacatgacaaaagatcaaaagagtttaaaatccacaagtaaaatgttccgacaaataatgataacctttttatatccaccatcattagttagggttttcattcaggataattatgattatctataaaaaaaaatatcattttcacaactctgtaaacgataaatgttaattcatcaacatcactttaaaaatcgaatgatttatacactggtggataacacgttttactatgttaaaaacatttctgtaattacctttatggctttacccaaccaaatcaattaacatcaatctctattccttctccaactcgaagctcaatcatatctaaagagactacacatagtatcttccattattatgctccaaaagctgagacaaactctctacatagtcgagagcttttccaatggggttttgtaacagttcagagcttttttagcttttcagctacaaaacaaagactttttaaccataatacaatcttcacttagatttataacgtaatcagatatatcataataattaccaaatcaaaactttaaattttcaatatattactttattgagacatacataaataatatgatatataaatgggtagattttaactaatcaccaccaaggatcttgttcttgatgatatcggtagcgtttttagcggtgcctaaaacaccagagacagaacctttagctttttcagtgatggtatccgttgtctcagtgactttctccgttacatcttttgtcatcttagtcacctgttttaccaaattaactaatccgatattataaatgtgataatatcatcaattcacaatttatatctagaaaatgtggattgatcaattaattactcggccagcagtagtggaagcgacatcttggatgtactcagtagtttccttcacttgcttcgctccttctttcactgcctctgctgcttctttcaccttttggcattgctctgcctcttcttttccctattccaatttgagtttaattataactaaataacgttgtgcttgaggactttttttacattgtttcttacctgtaagggcctcggtgacgctgaaacgaatgtcctatatagtggaacactccttgccgttttaccattagagatcagaactttacccagttttgatgcatacatcttaacttctatagaatcaaagtgttgaagacaattacgaggtaatagaacgaatatgttcgagagaattaagtttatcgcaaatcagatcttttgtttaatatcctaagacgcaaactctaataagaagctttattttctcttattatttataaatgagagtattaaatttgtccggttatgagcatttgtaggtttctttgtggtttgtctttaacaaaacccaaatttctcaaaccctgattgttcgcctatagactcgatcttcgttttttttttgtcttaatcactcaataatatattgtctaaagtacattgtatatcattagttatgaattatgatgatatagctcgacatataaattaataatagaattcaaatgctcgctcgctgactgtagtaccctgatatcactagccaatacaacttacgaaaaaatgaaaaatgaaaaaaattttaaactcgaccaatcaatcgtccatggtatagttgtatcatcagacagcctttactaaggaaaaatgttataaattgggttcgtggccaaatttatgactttcaactgtcaccaaccttacattttgctatataaaccctaagaaactcattataaacttcaacaacataaaagacgatcaatataatctagaaaaaaaaaaagaagagagaagagagaaatgtcgagagctttgtcagtcgtttgtgtcttgctcgccatatccttcgtctgtgcacgtgctcgtcaggtgccgggagagtctgatgagggaaagacgacgggacatgacgatacaacaacaatgcccatgcatgcaaaagcagctgatcagttaccaccaaagagcgtcggcgacaaaaaatgcatcggaggagttgctggagtcggtggattcgccggagttggtggtgttgccggcgtgggaggtctagggatgccactcatcggtggtcttggcgggatcggtaagtatggtggcataggcggtgcagctggaatcggtggatttcatagtataggcggtgttggcggtctaggcggtgtcggaggaggtgttggcggtctaggcggtgttggagggggtgttggtggtctaggtggcgttggcggtctaggtggagctggtttaggcggtgtaggtggtgttggcggtggtattggtaaagccggtggtattggcggtttaggtggtctaggcggagccggaggtggtttaggtggagttggtggtctcggtaaggctggtggtattggtgttggtggtggtatcggtggtggacacggcgtggtcggtggtgtgatcgatccacatccttaatagagagtatttgttggttagggttttaattaaggaataattaattagtttcgatgttattgttggtcttttaattctgtgatcattagggtgacttttgatctattttctagtttgggcttttgtaacgtttgctttgatttcggccgtggtgttatgaaatgtgcgactctctatgtttgaatcgttttggtttaggaggttctcttcttccatacttttgcatgttcaaagacaaatttttaattaagaggaattatcaaggtttccgacgagatattttttgaaaatgaaattggtttgaacttgtaatgatatttaaaatatgaaaacatcactcaaaaatggatggagtacaaactttttccactatatatacattacatgtaaaaagtgtatagatttcgtttttgttgcactgtctaactctaaataagtcggatatcaaagttagtatatagtaaaaaaaaaaaaaagttagtatatatatccaagtggtaaaacccgtaaaattaacatatatatatatatatatatatatatatatatgagtttggtcaagggttttgaaagatctcgactaagagaagacatatgagttttggttcaaaaagtccttcgataatcattagaaacgaattaatatatagtaaaattgagtaaaaatgttaatctattaaccaaaggttaactatatagaagattaatatattataaaactaaccaaaacattggatattggtatatccggattattttcctcgttgatgatcgcaatattgcattcagccatctactacacacttcctcgttgatgatcacaataatgcattcagccatctactacacactgacacatatgattcgtaatttcgtatgaaatgtttgaactcatacttttaatttacatatttaagatggacgtaacaatgaacatttgttcagaacttgagattgtactacccctataaataacgcctatttactaattactatgcatggttcatcatggttggaaatttctttgcaaatgatctagtgtatattaatccaaaatatataggaaaaatacattaattgtgggaggaagacagcaagaatccacaaaaaggaagcactaataaatgacgtaataattgcgttgggatgagagggacacaaattaaagaagataggatttgcatgtcaaacacttgttgtcccatttcatgcatcgtcctctctattgtctatttcgctgtcacaacctctaaatttacatctcatgcaatttattacgacgtatacatacacccttcaaatttttattcgtttgcatttgtatatatatacatatatattagctagtaaaattaatcacaatttataattttgtaatcattaaaaatattgtagtaaaaaaagcaaaacccaaaaaaaatagaaaagaaaactgaactggttggtgtttgtggtattttttttaataattttgttaaggatttgatatgggtttcaattttaatggtggaccgaattgaaaatcatcgagtgaaaattgagctacttacaaagcccaattagatccaacgggcctcaaaatatcttttatattccattttttttaatttgtttttgtttaataaatcaaaaattgaaaagcgaaaggcagagaaaatttccaatataggcgaaatgtaaagagcgggaagctaaagcctagagagagattctcacactgccaaaacaaaatttccctgtagagagagagagaaagagtgagtgatggagaagaatgcgatgaagttactcgaagagatcaaatcttctgatgtaagcttctctttgatttccacctttgatttgattttctaggtttctgtatattttttccaactaaaatcttctggtggattttatcgcttccggtagtcatttctacgaatcctctctgttaaatcgagaaatttcttctgattgctttgggttttgtgatgtttcttatcaatttcccttccgattaagtttctgcagcttaatgtatatatagagtgattaggattcagttgagttctgtagctcatggatctaacgagcttcgttttcttcattgttcgctcaacagcttatcgagaatcgggctcaattactcacgcggctcagtcagttagatgttgaagagaattctgatttgccttcttttgtggagagcctaactgtatccccagtcttttcatcagttttgctgattttcaatatcttcagttatactatgtttaaaattgagatgtggatatccattatgtgacggttggattcaggataatgaagtgacgaacttatatctgcttatttgcatgtttcacttggattcatatatgctttaagtggtttgtttgtttgtttccaagtattccttgacagctgtatagacactctgggaagatttcacatgtcttgacgtttccctgtgtttgttgaacaaggcgattctgcctgtggcttcaaaatacctcgctttggatcggcctgattgctcacactactttcttgcttttgctattaaggtacaatgttttcatttttattgcttactgctcaacctcaattttggaggggtgttgtattatcttttcttattccacttcttctaggtaagccaatggtgtgccaaacatttaaacatgtctgttatgtccatggaggagtctcaagaggaagagcattccaacattttctttcaggttatttgatgctttttggttctggaagtaggattctgtcgcagcttatggtttcgaagggactgagttattcaatcaatgttatgcagcttcttttggattatcttcgtttttctgcctcaagctttactgctattggaaaaacttgtttcatgactgatgatgcctcagctgttacagttcataagtttgtttcagagcagctcaatttgacaaaggagttgataatgaattccaaggtatctttgaaaatcatctttatctttcgctagtaactacacgtaccatatcatgaaacatttttaacatttgttttgttgaaattactactgtaggttgagaatcaacttgagattattgttttgccttgttgtcatctgttaataactttcacctttctatgagacagaaagtcgaatccttttcctcggagatttttaaggctgtgcaagtggtaattgattctactgttcgtctgtgcaaagaatactctcaaacagtgaatcgtgaggtaagtgaaatgaagacgagtggacatgtaggaaaggcaaggatggaggaaggcaacgctgtgggtaatttggtgagcatgattacgctgggagttaaatctctgagtgaattgggtatgcttgctgcaagagatggtggaaatcttgtggccattcttaatacatcttggaagggtgtgattacattgcttcaactagacaagcagacattggtatctaaggtagatgtaggagaaattatcttaaagctaatatcactgatcaaggactccctgagatttgctgctgaggcttggtcttgctcggtgaaggaaaacatatctgcaacggaagccagaagggtctttcttcctgtgaaattttatcttatcaatgctgttaaagttgtggcgctgtttccaagccaggcgtctatggtgtccaaggatatagcactatgcatcttgatgatctctgctttcaaagtttcactgagccaacaaactcatggaaaatccgcaagtgaagtaatgactgatcttctggagaaaacaactgtagatcttctaggtgcactgttaaatgcagctgaactaacacaggaattcaggctcacacttcttgattcattgttcgttgatgaattctcaaaccaaatctgtaagaagcagagccatgattctcacacaaaaacatcattggtggatatcttgtctttatctgttgaatctgcgacaagtgctagagatttgctcctggcccgagttgtattgttccagtctgtcatgaggtattctttcgagcttgacaaagatgcaaagcttgcaatcaccacaaagctgcaatggcttctcgacatattagcagacaaagaggtttactcttcagttctttcctctcagctaccaatggcagatggttctgggaagatagtaatctgggaatcaatgtattcagctctgcttctgtctctcaaaacccttatgatcatactctcttcaactcctgcctgggaagagcttgaaacattcctacttcagaatctcttgcatcctcacttcttgtgttggcagatagtcatggaactctggtgcttctgggttcgtcatgccactgacgatttggtggtcgatatgattaatcaactttgtacattcattatgtcaatgccatcatcagaaacacctctttgtccagattccgttctcagaagaactacaaagtccatctgctttcttcttacccatagccccaaatctttaacagttcaagtttacaaacatatttctactgagagcagatctgaccatgcacctgatgtatatctagcattgctgttagacgggtttccactgaattttcttccagacagaataaaaaacgacgcaaagagacagatatttgcagatttcttcaacttcatcgagaaattcgatgagaaaccgtcaaattcctccagatacactctgcttggagctccagttttcacagtatctgcttgccttcggatactgtaagtaatgataatatatctattcttgagacttctctggggattttattacacgagatagcaaaagtcagataatagtaactgaaaatagtgtgagcgaaagggtacattttcaatttttgtgttgtggatattattgactgttgttgtttttcttccgtgtagaaagatgagcatatcagagattgatgccaaaactctgaactttgtcgtcgctctcattcaaaagtacagaaactccaaagatgaaacgacgaaggaacgttacagtgagattctcagcgaaacattatctatcatctcaagaagcgaacagctatacacttgccaagagatggataatgtcataacagagcttcaaaagctattcaattcagaaactaatcatcatcataatcatcttcgtaagtccaagccaaaccttgctctcttcttgtcaggactcagcaaatacgagatgtctgaaaccaaaaagtgtccaaagagcattgcggtttgggaactctaccatatgcttctcaggaaacgccactgggctttggtacaccacgcggttactgcgtttggatacttctgtgcacgtacaagctgtaatcagctatggagattcgtacctgaagacgcggctctagccttcgatatagcttctggaaaagaagcgaaaacagagcggttcatgtcggaattaaagatgtttttggagaaagaacaagcgcttctttcaatcacaccttcagaagaagaactggagttactttcgaaagaaggcaccgaggttaaggcaacagtgcagaagcttctagaaggaagaagccagaggtcaatggaagtagagaaacgaccgaacaagaaaaggaaacttccagaaggaatttgcagaggaatggagttattgcagaatggagtgaagaggattaacgagggtttaaacgaattgaggtcagatgaaaatgagagtgaagagtttcaaaagagtttatcgaatcagttttcgtgtcttgaagatttggtctctcatttgttaagcctcaccgcagcttcggactaaagtatcttcagtggctatctatcacacactgttaaaagacttttatgctaacagatgtttgggattaaagatgttctttaagaaagaacaaagcgcttctctcaaatacactttcacaagaggaacttgacaaactttcctcttataacatgataaaaagttgaaatagtagcggatttacctcttaccaccgaaatttttgaacaaacgaggttaagttgtcgacaacggactataagatttttggggccaaaggcttaattattttctcaaggtaacattaaaatattttaaaaacattattgtaaaaatattaataaaattgggacttctttgtaatatattttgcttaatttcatcagaaaatgtggggccaaagcccatgtttttttggacgatcaatttcgcataatccattaagatttaatattattattttattttttttgtctgggtcaaaaccacactaaattctcattttactgatttggatgtttgtttggtcacatgacttttacactgatttctttgtttgtttggtcaatagtcaatgggatagttactatgtgaagaaaccgtcgagcccttggaatactataaaatcaactccaagagcaacctgaaaagccacattcataaatacaaacatcaaaatggaaaaagtttctattgtttgcttcttcttctttcttttatttggttcgggttatgggggcctcccaccgttctggcgcgctacggttgtcacgatgacaaacttgattggcggtccacctcttaccatacattgcaaatccaagcaagacgatctaggaattcacgtggtgcctttcaagcaagagtaccacttcaagtttcaaccaaatctttggaaatcaacattgttcttttgcagtttccaatgggacagtcaattcaagtcgtttgatatatatgatgctcagagagatcaaggtatatgtgatgactgtcagtgggaaataaaacctgatggtccatgcaggctcggtaaaaaggcgaaatgttttccttggaagtaagtttgtactcctgcgatgatgaagatatatatatatatatatatatatattcaaattcaataaaatcaataaacagaatatttatgcatttcttactatttaaagatttgtttcttaaagatactcattgacatcggaatgcttagagtaagaaacaaacatattttggtagacacaaaaccggagtaaaccgagaattattcgttatcttcactggttttctctcttaaggtttgttgttgcatactcttctcactaaggatgtcaaaatggttaacccaattcaacacaactcattaccaatgagtttaggcttcatgggttgacccaactcattttgttaaataggaaaagcaattcaaacagtttgagatatttgatgctttcagagatcaagatgtatgttatctatgtaattggactgtcaaagctgatggtgcttgcaggcttggtaaagagcataaatgttttccttagaaatactttcatatgactgattttaatgaaaatttgagaatgaataagacaatatcagaaatccacatcacgtcaaaaaataataacattttttgtagacaataaatcaaaaccggatcaaaccggattattctttatcttgggtgtccaaaatgagtgaaggatcttccttccagacaacatcatcataagaaaacgctttggctaaacaagaaaccaactgttcatgaatcacttcttctgaaggaagcagagtatccgtctctcttcgcaaagatgtaacttctttatcagcaatcccacaaggcacaatgtgctcaaagtacttcatatcaggatctatatttaaggccaaaccatgactagtgattccagaagatatcctaaccccaatagcaccgatcttcctatccccaacccaaaccccagtctcacatttgtttcctgctcgagctttcacgccataaatcgaagcaaactcgatcattgaccgctccaatgtctccacgtagttcctagcaccaaaaccaatgctgcgtaaggaaatgatgggatataagatggcttgatgagggccatggaaggtgatgtctcctcctctttgagtataatgaagttcagctccgatttttgtaagttcagattcagggataagtagattgtgatcggttctacgctttccgagcgtataagttggtggatgctgaagcgagaggagggtatctggaatctgatgagcttttctctctgaaactaatttctcctgcagtttaagggatttcaaatagttgacagtgcctagcttccaaacctccaaggttctaggggatctcatttcctgcacattaacacagactccataattgatcactttatctctaactacttaggttatataggaagattccaaacacgacctttttttccacacaaacttaatactactgatgggggtctaaaagcatgactaacacaacaaaaaatttccaaaggcagcaaacctaaaattaggaataaaaatctgaggagctaggatacaaaccctatgaatagtttttggtaccaggtctttgaggtattttatcgaacacttaacatgcatacacaaagaaaaagacacggaggattaccgtaaccgataaaaacccatataaatgatcgtatacatggtacaagagcaagtaatcggtaaagtaagaggctttgaagagctagattaccgtttcagttcttctcctccaccgaagagtttggacctcagagataggttctctccagattagaaattttggatttattaaaagcttcaaaattcaacgactttgcacttgtacccttaagttttcaattttcacagaattacgccttatctagaacatatctcaacaattcacaccctcttattttaattccaacatataaaaacccagtgattcaaatcgcaaacaatcttttcagggaatgatgctgtttcttatccctttgtatttcagaattaagaaaaatacaaagattgtacaatttcaaaacttaggggtcaaattcgaaggaaaaaaggtctagaaaagtttcagttttccaatagtttgatcttctcaagagaagtattcatctgcctaatctcctcttcagacaagcttttgctacactgctcaaacttctccttgtcgcacttcaaggctgtgtctctacacgctctgatgcaaccgctaatatcgagcaagtttaagatcaccggacagtttccgatgcttttgaccaatgtgattgctaaccaaacttgtctgtgttcttctcttgatgatcttacaatgcatagcttcgtgattggattcacatatttcacttggaaggaaccgagagacgaacctagaccacactcgccgaaattgacgaggatactgtctttgattgctttcgagagattgaattgtgtaagaatgatcggtgttccttctccgagaagatccttgtccggatccagaaaaacttccattaacatgtatctgttcttaaatcccaccatgcttcttcgaatctcctcgatttgatgataccaagtcggcggctaaagatattctgaacatgtagttagggcattttatatgtaagaagaagaagaagataatcacgtgactccacgtgacttgcttacttatggacttgggtctttgaacatatctgaaatgggcttagttatagcccatttcatctcatacgactccgtgatttgctaactaatgggcttagttatatggtcctagcctagttaatctccaacgttcccttcgttgttcatcggaatccctagaacactcgatttcagcaaaatcaaatcggattcagtgatcaaaagtcaatttggtcgagaagaaattgagcgttgaagatgacggaggcgatgataagaaataagccaggaatggcgagtgtgaaggatatgccgctgcttcaggatggtccgccaccgggtgggttcgcaccggtccgatatgcccgccggatatccaatacgggtcctagtgcaatggccatgttccttgccgtttctggtgcctttgcttggggaatgtaccaggtcggccagggaaacaaaatccgcaggtaagaacgacttgtaatagctcgttcacatttcaatttttcctctaaaattcgagatcgccttggtaaaattagtgttgtggagtgattgatgaccatagtaatgtagtgaaggatacattttggttaataattgttgaaacttgagtatgtttatcgtaggaattggttaatattattaacctatggaaacataggcttgttgaatcactgttatgtattctgttattagtattccccgacattttggttgaagcttaatcagcatgagtttagccttaaacgaatataaagttcgtcaacaatttgtaaactcttaaagccacaattgcaaagatgtgagaatctgttatgatgaaagcaattatctagttgcatgttttgatagtagttatcgggatactgtttctatgtagatagattgttttagtattatatctggcttgatcattaacttcttatgcatttacaatggtcctaaacaagtctgatttgatatcagtaagtatcaagattaatgctcttatcaagattgatgtgatgtttagggcattgaaggaagagaaatatgctgctcgtagaacaatacttcccattcttcaagcagaagaagatgaaaggtaaaccatattctcaaatttaagtcaatgtgcctgcagcaaccttcagatagcaatcttgtttcaatccccgttttgcattctaggtttgtgtctgagtggaaaaagtatctggaatatgaggctgatgtaatgaaagatgttccgggatggaaagttggcgagaatgtgtacaattctggtcgctggatgcctccggctactggggaactccgtcctgatgtgtggtgatttcctagtttctctcaaatgcatatgatgatgatgaatgatgtttcgctgaggattgatatgttcttgttatatctttttttcttcgggtaataagagaatgattcaacagacagtattcttcttgtattggttttctcttaagtgtttcaatcgtaatatgaggcaaaaacagtttcatgattcatcagcaagctgcaagaaattggcttatttgacagctccaggtgaaaaatattcgaaaaagcttaccgagtgaaatcgaaccaaatcatatataattatatgtgaatttaatatccaaaacaataaaattttgaaaacaagagttcttgaaaatgaaaaaaagagtaaaaccttttcagaaaataaataaaattaaatgctaaatatagtacatgaaaatgagaaaaatatgttagatttgtgaaatcgttaatgaccatggttaaatggcgggatccaaaatccggttagatttcacaacgtcatattaatttagtatttataaaatcttttaaaaaaaagaaaaaggaaaaaaaaagagagttgaaaacatttttaaaaaaataaaataaaaataattaaatgctaaatatacatgaagatgtgaaaaacatgttggatttgtggaatcgctaatgaccacggttaaatggcgggatccaaaatctggttagatttcacaacgttatattaatttagtatttattaaaacttttaaaaaaatcaaaaaaaatttgaaaaacttttaagaaaagaaaacaaaaaataaatgctaaatatacatgaagatgtgaaaaatatgttggatttatggaatcgctaatgaccacggttaaatggcgggatcaaaaatccggttagatttcacaacgtcatattaatttagtatttataaaaaacctttaaaaaattatttatttaaatgttttagtgaaagttttagttttggttaaaataatttttaaagaaaagaagaaaaaaagttagaatgaagaaagtcctagtgtaacgaaggcctcatacagcaaagcccattccaaagtcctagtgtagctctgtcgtaacattatccaccaattttaggtcaattttgtaaaactaaactacaagatcattccatgggaagcttctctccgatatgcaagacaagacgccaaagaatggcaagatgcagaagagtacacccaccgtttatcatcaaaacctgacagagtaacgtcacaagaaccaacagctaatctctggacaacaccccctattggttggacgaaatgcaactatgacggcacttaccacagcaacgctccgagtaaagcgggttggctcttacgggatgatcgaggaacctttctaggtgcagctcatgctataggctctattactaccaatccgatggaaagtgaactccaagctttagtcatggccatgcaacattgttggagtaggggctataggaaaatttactttgaaggtgacaataaagaagtctcagagattgtcaatggtcggtcttcaaattttgcagtttttaattggataagagatataagcgcttggagatcaaaatttgaagaatgcaagtttacttggacaaggcgattttcaaacatggctgcagatgctctggcaaaacaacaacttcctttgaacactcagttttattgctataactatatcccgtttgtaataactgattttttacatcgcgactttgctacagcaaattattaataaagctgatgtttgaggaaaaaaaaaaaaactacaagatcaaaccctagttcctccgatgaaattgcggttagaaaactaaatattgattgacctaattcaaagagaccttttttgtgcagaaactaaatattaaaaatccaaggttccaagagatcaaataggaatttaagcgagaagcaacatacctgagtctcgtgacaacggcgcgtggtttgcgtcaatacttgggactctcggtgagatccgccatgatttgctagagagatcgtgaaacgcaagaaaacagagagacaaacggtggcgagatcattgatggtgtgatcaccgagttacagttccgacggttctgacggtggtgaaaatggatggtgatcatcgagctttgacgttctcgtgatcggtgagttctttttgtaagagaggaacagaaacaaacagaggctaaaaagacaaaagaagaagaagaaggtggattttttgttttcttctcgtaatccatgctttggaccttgtatcagccacttatgatcatttgctatattgatgctttccaattttagagtattgaaatgggtttctttgacaatcattttgagttagtcatcattccttgttctgaatcaagaattggcttttgttatgttgtctaggttctgcttgtaactagagtaatgctattgtagtctctgttgtttatttgtagaatcatagagagtcgtggaagcatgttttagttgttactctcgatttcttgtcgatgttgtggtgttataaattgagcgttttaaccaatacaagttaggagatggttagtatgtgactatgtgttagtggccatgtatgtagttcgatcagataatctgaatgatgtgctaaagagcttgcataggaagactgcctttgtgttagcttgcatagagacttgttgcaatatatgagactgaaaactattatgtgaaaactttaatttgtgtacaaatatttttaactcttaaaattaaactaacattgtaccaattagcacatgaaagaaacacagaattctgtgaacatatgatgaataactatataaacacattatggattcagttaaggagacagaaacaagaagatgaatttcagatatatagcaatagagtcacttataatcatatcagagcttatactttatacaaattatcactttagtccttaaattaaaaccgatttaatcgacaatcttgttattctttaaaacaatttgttcttattttcaatctttaaattttgcaacaatcgacagaacttatcgttattccgtgtttttattttcatatctttcttaaaatgtttcaaaataatatatgtttaatattttctgatttacaatagttattaagttatatgaaatataattattttaaattttattttatttttcagaaaactcttataagagagcttaccattagaatatgaaaaaaaattaaaactctcttataactttttaaaaattttaataataaaaaaatggagaaagcccgtgaaagagctcttacgaaccaaaaccattcagtccggttaagaattggttatcaagtttggttcctaaaagatatccaagttcaaaagcaaaaaaatatcttcttttctctctctctactctcttctcttcttctcttcttctcttcttctctggctgggcaaccatgattactgtcgtcacctccaggctctctctccttcctccagtcttctccgtcgttaactcttcttcttcgcgttccaaaggtgctcaatttatttctgccacgtcttctctttatagcactctgttttacacacgtcgttgattcttcagttttttaaaagacccgtcttatacaaaatttcagtgtaaccgatccctgaaattcgttaaagggatgaaattttatctaagattcggagttttcttttcgaacatagtggtaatgtttgtcgaatgcttgatttggtcttccacagctgtcactatcgagtttgaagatagaaatcttgtgttaacttagtatgtattactgcataatgtcaattctgtttgaaagcatcagaatttcggaacagatttttgtttcgtatagcatcgatctttgtcttgtgtgtttttatcttctctctgaagcctgcatgaacccttctcttatggctttaattgcagatatgaatctagagccaaaaaagaaggttaaattaagagaagactggagagaaaagtccagacctatcccacccggaggaacctatccagctaaagaccattgcaggttttttctttcttttttgtttgtttgtttgtttacctcactatttttgtctcattcttatcaagatccttggtgttctgatgggtttgcagtcagtgcgggctatgcgacacctactacattgcccatgtgaaggaggcatgtgcatttcttggagatggaatgtcaaggattgaggtaatgtccatataaatggataagatttgatactctttttaattgatgggctaagattcttattttgttaatattttaagttcttgtgcagagcttggaacctgttgtgcatggtagaggaaggaaagcagattccttacaagatacatattttggggtgcatcaagagcagctctatgctcgtaagttgaagcctgtcgaaggtaaatagacacttcccttccactgttccacattttctactaacttcttttcctggctcaatctaagctagggcacttttgtgtctcgttcaagatgaatttagcttagctttgttgtttacttttcattctattttcggttgcaggagctcagtggactggaattgtcacaaccatagccattgagatgctgaaatctaatatggttgaagctgtcgtttgtgtgcagaggtaaaactactgttgaatttcagaaatggactaggcttacatttatcgaccatgctgtagatttttccatctatccatgtaactgatttattgaaatattacagtgatcctgaagacagattatctccaagaccagtattagccaggttttccaccttcctaatgtggtttattttgagtccattcttcttcaagtcgccattttttagatgtggatccatattttgctgttactctggatatagaagcgtattgatgtttcatttcttttcattctaaggacacctgaagaagttttggctgcaagaggtgtcaagccaactctgtctcctaatctgaatactcttgaattaatcgaggttatttgccaaacccttatttcttgtttgtgttttcaatcactgaatccatttcacatgaacttagaatttgtattgtaacaggcttccggagtgaagcgtcttctgttttgcggtgtgggttgccaagtgcaaggtatgggctcaacatacttttttgtggacgtatatttcaagtttctccatatcgtgactctcatagtattgtaatgcagagtgatttcttatactgcagcattgagatcagtggagcagcatctgaatctggaaaagttgtatgtactaggcaccaattgtggtattttcctcatcctatctagatttgttttttctccagaactttcacaactagttcttgtgttgtacttttgaacattccatgttgtatatgttatttcggagtcttgtatgcttaggtctagaaatgcttatacatttttaaacaagtaaaaagaacatctttgattaatagtggacaacggaacacgagatggactagacaagtttctgaaagcagctagtaaagagccagagactgttctccattatgaatttatgcaagattacaaggttagcattaatacaaaaccatcacttatctgtgcattttctttggtgatgccaatcttgttcaatttctcttataggtccaactcaaacacttggatggacacattgaagaggtaaattcgcttaaaatactgtgttgctctgcaattgcagctgaaagccgtttttaaaaaactttttttggctaaagcaggttccctatttctctctacctgcaaacgatttagtagatgtcatagctccatcgtgttacaggtaatacaagtctctgcattgtctctataccttgaaatagataacctgtcggaaatttttaaaacttgtctacaattacaaaccctatcttttttattctgcagctgctttgattacacaaatgcattagcggtgagtgtttctctagcaattaagatgtcttttcacttaattttgattctgccaatttcaaacatttcctgatatgtatgagcttgtttatctaggatttggttatcggttacatgggtgttccgaagtattcaggtctgaacatgactgaccatccacagtatattacagtgaggtcaatatttctacgtattttgacatggaccatataggttctcgtggttggataaaattagttttgtttatgccttaaaccacagaaatgaacgtgggaaagaaatgctcagcttggtagaaaaccttttggagatcactccaacaatcagcagcgtaaagtttctaacatttatatttgttgttatatttaagactttaagagtccacttaacaaataacatgaacaaacacaccttttgttgttgtttcagggtgatcggcgaccttttgtgacagaaactgttaaggcagacgatgctgctaagtttggtatgttttcaaacgtattcgaaactcttttgtttcttgaatcgtctctgcttaaagacattcagtttcaagcaaagctagatgccaaaaagaaagttctcagcaaatgcatgcaactaacattgtgctaaagtcttctaactagtctataatttcttaggtcaaggtcctgctcagccagcgccactatttgttggaaacattattgcgttcatcctaaatttggtaagattatttccttatgaacacaaaccgagaaacaagctcattgcataaaaagtcaaagagtttcttaacttgcaaaaccattcttgcttcaggttggtcctaagggtctagaatttgctcggtactcgttggactaccataccatcagaaactatttgtacgtaaaccgcaaatggggaaagcaaaggtaagatctgaaacacactcctagagataaaagtttattgcgatcaactgtgtatttctatactattggatcgttctctaatgaccaaagctgcattaccatctacagagcaaacacccacatgccatcatatgccaaaaagatagtggaaatgtacaacaaaaacggccaaatagataaaatgctctccaagaaatgaacattttaggcctttctcatgtaagtttccaaatgtatatttcatcctacaagtgagtaaatgtacattggtcctactgtttctcaacttgtagtatgttagtaatatccaaaactatttccctcgtgaatttggtaagacaccggcaagaaaagatgggtcggtttggtgttttttggcagagaacagagaataagaaacagtctaaatcagcggctgaatccaaatcaacccatgtgggttccttcctccatatctttaggttaaggtgatgtccgagtaaaaggttgcagggttttgcatgagaacatgaataactgttttaagaggatgggaaccagacatttacacagttggggggaattagcttttaatgtcttttttttgcttggacaaagaagaaggaaccatggttaagcttcactcgctcgctcactcactcactcactcactaacttactcatcaccatatttcacacattggaaacttcaaattttactctctctctttttttctttttttgtctttttgttagtcaagtctctgctctgctcgttcaatgactttgctgcagagactctcagacctcaagtgaaactcataaatgtctctgctcttttgcaccatagttgattttttctcaccagaggcattgtcctaatacagagcatgtaaacgttttttctaataatatatttaagtgaaataaagcttactttggtaccttgaattaattttgagttgcaatttgacatataacaatgttagagaattcatttacgtattgcatattttggatctgtatctgtatctgtttcagtatatatatatttataactagatccaacatcatatataatatatgatttcactcaagtttttctgagaaagttgtataatgttatatttattatccatctgtgtttcaaattagatacattgttcatccctaatggattttgcatatcctacagaaatgcatgtttcagtattttcaacttgtgttccctggaggttgtaatccatgaaacaactttaatatggactgtccaagacaatcatgtgtaaatcaatcatttgccaaatataatgattacaaaatggctaataattccttaatcagttaaataacagctctaacttgtgagagtattcttccaataatgaaacagcatgaaattagttgtttcttttcctgatcaacaacatcatcatagagataacacaacatgcatcgttgagaaaagaattacaaaaccgtaaaatatatttgtcatattagattaagcaaaacttcttacaagagttcaaaatctaaaatgaagatttaaaaaaaatacaacaacaaaataaagcactcttaaaataaaaatacataaaaaagccacatcttcctaaaaaaacaaagaaaaatccccctattatttttttcttttcacaattctcttttttttgggggtattttcttccgaggagagggcttaattatcttcttctttttttgaatatttttttccctaaatttgataatgatgattagaaatgtgaaatacaacgacgatgacgagcagcagcagttttcttctgttgcttagactcttctttccacctattagcaatatcatgagccacactcatagcatcaagcgacgcaccaaacaatccttttctcgtgaaccctaccgcatacaatcccgcctctcctttccatccgtttggaaacgggttttttggtatcccatcatcggagaagaagtcgttgtcctgttaatacaattaaaattcaacacaccaaattagtacacatacgaatttattgacctaattcttagtcctaactgtcattaccggatttctatttctaaccaaaaactagtaccacgtttttgtatccttttcgatgaaaatataaatgttaatggttcatttgcatttattgctcacattcgaaacacaatttgagtagggttttcactaaactaggaccgggtcgggtggttttttttgtgtgttttgtcttccgacatcattaaatgtctaaaatttaagctaaaccttgagaagaaacaatgaatgaaagatgttttatttattaccttaagccatgaagggacgttgcttctgtatccagtagctagaataacggaatcaatctcaagaacacggccatctattagctcaactttgcctttgccgaactttatgattccggggacgattttgatctttcccgatctgattttgggtaacgctccgatgtcaagaaccggagttttgccttccttgttctttagctctaacggtccaattttcggcctttttagaccgtatttatcggtattccccaagataatcctcgccagaaagagtatagtcttgtccgcgagccaaacgggcatatacttcatcatcgtaactcctaattcaaacgttgatttcccaaaaatctctcttggtaaaacatgaacctgataaaatcaagaaaggaaaaaaaaacacagactattagatactgctctgttttagaaaacagagtaacagaaacagaggatgctctgttttaggggctataaagatttgaacttttggtactttttttttttttttggtttaagacttttggtacttacagcgctacgaacgaccatcgatgggtttgctccgtgattgtagagatcgagagagacttccataccggagtttccacatcccaccaccaaaacctttttcccttggtaccttccaccggatttatagtcaccagcatggagaacatcgccgccaaaatcctctagaccttcaaaatccggcacaactttctcagcgttctctcccgttgccaccacaatccatctgcatatatactcaaactcgcaagaaccgagctgacccatgtttgaaatggtcttaacccgccacagcccgaacgtctcatcatatttagcggactggactgtctcgttgaacttagggttgatgtcaaagttggctgcgtaggactcaaggtactgaataaactgaaacttggtagggtactcagggaactcgtccgggaaaggataattgggtaattggcaaaactgtttaggtagatggagtttgagacgatcgtaggttctgttttgccataatgaagcaatgcagttagctcgctcgaggattatgaatggtaccccttcacgtttcaagcccgcagcaacggctagacctgatgggccagctccgacgatgacgggtccattgacccagatgcaacgccgggagaaaatgtcgctgccttcggggatgaggttttgaaacatactcgtgatgttgatagacttcttgttattatttccatacatcttccacagagtttagagtttgcttgtctggttgtgaggagaaaacagaagaaattttaagaatgtagaagaagaaaaaagaaagattttggaaactttttaagacaagaggatggagatgtaagtgtatgtgtgtgttctgttggattggagaaggagatgtataaatagagaagacgacttgatgcaaattggtaattgtaaaattagtaaaaatattattattatatatttagcttctgaatgttatttatatctcaaatgataagctttgcagcccaccattatttctttattttttttttttcatatgtcccttacttattggtaataaattaatcctcgtccaacaaatacaataattagtcacaagaaaagtggttcaatattttgcatcttcttttctttgcatggcaaatatcaactacgtatacaacaaatatacaagatgaagattgactcttttaattaggaaaagaactaccaaaatgtttaaaatcattaagagagattatggtcggttcagaccgaattaaagagactatttttaatctccttttagttgccaaaatcttatagtccaagtcgaaaccagataaaatagaaaatttaaagcgtattgagagagaagatatacatgactttggatatacacttgagaagagaaagaaagcaagataattaaatttgatgtcaggttgctgccaacgtgggaatcatttagggttaaaaaaagtgatacttatatgttgcttacattgatcgattacactgaagagacatgacaacgcattttgcttcacgatcatgtatatacataaacatgaaaggtccattgggacttcggagtttctcttttgctcctctttggtctagttttagagaaatacaagaattttaggcatactagttatgtaactgttatacgattttaatgagctacactttatatagtatttttttttgctaaagaaaactttatatacattttattcacattttgcgacgattataacatagacagagtttatggagaaaaatgtatagaaaaagagttaagttgaaaaacatagaaattacgcaggggaaattttaaagacaaaatataactgtttatgttactctttttttggtatcagattatattacttttgttggtaggtgtaatatttaataagctaataattattatttttcttagaaaagtaaataaatgtgtatagacggctgtggaatttgaggcaacgtggttaaaccttccatcaggtgtggctacacatcccacagacttcctcaatccacagactaattaacttttttttcataaatatgttagaaaaaataaaaataaaataaaaatgtatataatgataatttatgggttttgcttgacgtattgggtcaacagatatcgccacatcaagatatcttgggttcatgagaaatatatattggttttaaatgataataagataataacaattttgtaataattttatatgtaatttccgggttttttcaatatattagtacgaagagaatcttaaatttttaataaatatacttataaacatttgtactagcttttgttattggtggtgaagataaattgttatcaagatccagtgaacctatctatataattaggttgttaagacattcattgggatgttgcatatatccaaattaaatgattgctcaaaactcccatttgcgattcaaacgtcgatttctaatgagaagctaaacatttttttttgtatcaataaacctaccagtggtgaatggtgataaataggcaatttactactagaagtttacaaaattagtaactttattgtatatatagtgttaccaaaaaaaaatgaaaaagaattcttagctcatatgcatattaatgaaaaaatatttgacgttaactttattctaaactataccaataattttttcacttaaatatgatcggaggaaaatgtagaataatatgcaccaatctagaggaaaaccaatatgcgcttgctttggcagagaagttagtgttaatttccatatataatcggataatcgacgaacaattgaatagaaattctcgagaatattcggaagttcttaccttttagtttcaccgaccatttctgtagtcataactcgtttaccaaaaagtatatcgtaactcaacacttttgctagtcagcatattgaaaaaggcacaatttattatttaacacaaaaagtcacatatcattataactataaactatcaaagtgaaataagctctacatgtggataacgggtacgtggttgctgaacatttcttggaataaacactattttttggttaatttgatgcatatatatagagaatcgaaattgaaggcgtgttccattctcgttgattgagagatcataaagtgagaagtgaagactaaaaagacttggggaattgctcacattcaccatattccaagacttggttagtggtgtggtcacatttcctagaaacctcgaaagctaacattaatgcaccgattacacatatcttagcattcttacggtatgttggtttaaatttaactaaaatgttcgatgtactgttttgatttacgtgcatacatcatacgtgctatgtagcccatatatgtatgatcatatcatatgcattgcatacctatacttacggacaacgcttcctttttcgtatatatctccacaaatcttcataaatttaatgtattttatcctcattaagaaaaacagagtagctagtagtttatactataatggaaatatatatattataaaaagatttgattcaccaaaaaaaaaaattcagttacaactagtttattagtggacaataaaattttagcgacggagagaatattgaattttgcttgtgctttctcagaatcatatatataaaagttggccaacactttccatatgagtgacacatcatcacacaagaaaatgacatgtgtcattctacattagttaaattaaaaaaactagcaaaaataattgagaaaaaatcaaaagtcttttgttgtgttaaattctccattaatctcactattaaatgaattttctaaaaataatcaataaataaaaaatcataataatgtaccaagcattactttcattcttttctacttattttattaattttgttttatcaatagtcattaacccataatggctaaaattttgcttgtgttgtagtttagatgtttgctacctaacctcatattaatttagtaattttagttggatatttttttattattacgttttgtgaatttgatttatcatatgacattttttatgtacatttcacgtaatagtcatccaagacattagacatacaaaaacaacaacaacatgagactctatatgaatatattggaataaagaatcgttcgttacaattaagttaagcaagtttcaaaactcataagtaatataactacatacattgtataagtatatcatatattgttgtagtatgtgataatgatagtgaaatattagaataataaatatagaaatatttatattgtagtagaattgatatttcgagttatagatgaatctaatcataaaaaataataattatattaaatagatgaatttatcaaaatgaacatcaaaatcaacaaaaagccataatcatatttttctgacaattttaaaaacaaaaacccatgcatagcatgggtgatcatctagtaaaaataataaagaagagaaatatccatggcgaatacaattgggaagcagagtttgtgtatatcacatcacatggaaacatgggaattggaattataaactactttatgctaagccgaaatttttcttttagataattttcatttgactttgtgatctctcattgaccattagcaaatagcaactcatatttgcttcccataaatgaagaccataagtggactaaataaaacaaactgacataacataatcaacaaatgcgacactatccgccaaattttggtcaaaatcttttggtgggtatatatgtaatgccaatcatttctaacatctgaaaattatttgatatgacaaaaagaatgatatttttattttagtttactaaataacaactctttttgtccaataagtgtaattattgccagagaatcccgcaaagcaaaataataagtcattaaacatatattacgagaagagaggacaaattattgcaaaagaggaatttctgattttttttgtttttgctaaattatatataaatacgttattttttactttattaaccagattcgatcgcagtcagctacttaatcatgtgacttaattagtttttctacaaatataactcattaataacccaaaattccatgttacaattttaaacttagcataaaagcctacctaatttcatgccgtcctatattttgtttatgactttctcataatagttgaaaatatgttggtaacatgaaaatattctaacatttatttcttttcaactgttttatgtgaattactgtgtgcttgaccaacgaatgtatagtttatgttattgatatatcataaaacgagaaaagcatacaaagttgataattagggatcggtgactgtgactccatgctcctcgtatcagttatcacatttaaaaaccaaactatatttgtttttacttttcactcatacatgttaggaattcccgtaaatgagaaaagattcacagcagtaaatatatataaaggatatgattaactctcatttatttttcgagtttgcatgcattctaagaaacttaacatatacttatatcaaaaactccccaactttaacctatccactagcggatcaatctagctaggccaagtacatttttcacattcttagttaggtatcacactattccaataaagaagacgctaagagaaaaacaatggattacatatttgttaacgagaagttcttcataaaacacataataactttttgaagtagtgaaagaaccgaaatatttttattatttaagacatcatcaatgattacacatgatagaaatctcaaaaacaatggatttcatgtgaaaaagaatcttcagaaagatatctataatgagttttcttggaatttttttggcacaacatggatgactcaaatatagctatgtataagaaagagagaaaaaaagaagaagatagagatgcaactaactccataactgtaataactgaaagggtatggaaatataataaatgattcgagtcaaatggttccctcaaaaaaattgtgatagtgaaagatgggaagtccatgtgatcacatgtttttctgatttaatttataccatcagcctcaggccctcaggtgtcttctggacctttggtttactggtcaaccccttcaatatgatccgtattttctgatgattttttttttgtcgtaattttctgattttattcatatttccggatactattctggtttttattggaataatataataaaatttcattttttagtttccaaattaagtgaaaaaatagacgttaccaaaaaaattttaataagttttttatttatttagaacatctatctattatgtgaaatttgaatccggatggtaacataatagtgaaactataaaaaaccacgaaaactaaagttttaattaaaaacattgtttttttcggttttcccaaacagtttttagtccgaatcaattcatccaggtttaacaacttaatttctgataagatctgtattttagaatattaatgttctgattgaaaaaggactactaatatgtatcaatggccaatgggaatagtttggtttgatttataagcgtcatgtatcgtgtgtcacacataataagcggcatgtggtagctaacaaatcaatgtgattaaatcattattaacagaataaatcacaatatgatcgataaatacttttcttagcaatggcttatgggctattttatgttgtcacgagattcctttttaattcaaatttgaattactaatatatattattcgttaatgaatcttttcctatattcatatttgaaagaagtgtataatagagatctgctaaatattagtcaactcgatgagttgtattaaagaagaaggagattcatgttattgtcattcttattttgcactaaataaagccgtagcgccgactaattatggagggaatgatttttaacgaaaaatgttgtatgtgctcatcatgaaaaagaatatcatttctcccgtttcttacaatttatgatattttcaaagtaaattactggtaggcttactaatttttaataattgtcaacccaccagagagaggcttagaaaatagaagtgtattagagtgagtttttctttatgctattattgtttatttgtggtaatactatttatatatatacaacatggatgttagtagctaattatagcaaagagaaggtgttattacaactttgattgtcatagaattgaatgcttagaaaaacgggtaaaattatgccgtctcccaagattcttgtagatgtacattgcattttgcctcaaaaatttctcatttctctttttacctcttattttaatgacctattttaattataatatggctcaattattactgttatgatttgctgtttttgcttcagcagtattcattagtttttaaaaatggttcatacgtggttgtccattgtcactgtttctttatttaagttttacccaaggagttgacaaaaaaaaagaaaaaaaaaatctatgttcatgtatcaatctcatgttatatgcgtaaattctgaccaaagacaaaaccggtttgtaaccgggctttttcgtaataagcactcatttatctgaaccattctgactatttccgaccgaatgacgtggcaatcagaataagcactcatttatttggcggtctcataatattgtatttatatatcaaaatttgtatcacacagtcaaatactgccttttagggtttcttatcccacaagtaaattagcatgaagagatcaaaagaagagaacgaggaggtgtacaaaaagaaagctatggagatttctacaaaaaacccgaagaggaatggaatatacatgttataccaaggccgaaacacaatttctcattccttgagaaagaggaagttagggttatcagcgagttccgaagctgactttacattcgcaaagtccttttcttgcatgcagctcgagatttcatcggtgtcaaaagggatgctgttgtgttcacacaaatggcaaattatttaggagcgtatgctcaagatatccgaacaaattttaaatgattttagtcagtacctggaatcgtcgtccagcaagaaggaacggctattttcatcttcatttgtcaatagaagttttaagttggaaatcacctgcattgtgaagaccaagatagacactttaatacagagtgtctttttttttggttaatcagagctcagagctatgtacctctggtgatacgttatgatctccatcgtctttgtccttgcagagagtacatattctatataattgctcagtactaagaacctgacagacggagaaagattggaagaattaggttaatggctccttctagagatagcagaaggctacaaaggatttaagttctaagctaaagtcctccatgcattcctcactttgcacatgtttgattctgaaacctgtcatttgtaatgtctaattttccttctactctttagtggaattgttacatcagagaagcagagacttaccgagcaaaggttaatagtaagatcatcgtatgtaattgttgacttcggttctgtaacctgaaagaaaaacccataaacattcaggaacgagaaagaagagggagagtggtatactgtcaagaaaagaagacaaaccaggagcactacggcttgtcttgtgtgtttcagttcatcccaagaggatcctacgaactgcattcaagagtagcaagtgaaatcactccctaaatatgtttggttactacaactttttaaggcaagtttttacctcttcagtcgcttggctgcaccatgactctagttcatctaaccctgccttcacttttatgcccatgttgactgtgcagtattcccgttcgaggagaagactgcatggttcagataatagctctagtttaatacgttgactgcctggaaagttgatttatccaagaggtagttggatgaagggatataaacaataacctgttgaaaagttgaacattgatgtattggaaagtttggctgaacatcttctgaacgagaaacagaggaacctgaaagagaacgtttttagtaggcaaatgaagcagtaatgaagcttacatataaaaatattcttacgtagtttttcttccatgtgatgagaatgtaatttaaaaactcaataatgctttgccaagagcttgctggtgaattctcttcagacgacttcactgcttgcccctctttagatggtgaattatcatcagatagcttttgcggtgacttatctcccgatgactccttcggtgaattctcttcagatgacttctttggggaattctcttcagatgacttagccgggagattctcttcagatgactttgacggtgaattcacaacagaggaatcgcatgatgattccttcagactctgaatcattagaagagaatcatttaaaatgaaacaaacctatcttcgaagctgatggattctcaaacgaggtcgggtgaccaaaggtatacctgaatgcaggaagaaagcagtgacgatacttctctcttaacattctctcggattattccatacattgtttcaacataggccgtaagctgctgtttaaaaagtaaagcaggatatctagcatctacttgctgcaccacatcagttgaaagattcggggaagaggttgaacgaaaaccctaaaaaaatcacatttgtagtaaccctcgatacataagtttggagtgctatggaagattctggaataacataagattttagagctagaaaaatcaagctacatggagctacaccaagacaagaatttgtttccatttcctcgttacctgtgtcattcttccaaaaaatgaagttggctgtggaggttttgttggacttgagccagttgagctctgttgtctcaggcttctttgaagcaagaataagagtgttgatgtgtttgttagccaataagccaaatgattgtcgtcctcctgattctgaatataaataaggcagaggatttgttaagttctatctaactcaaagtcggagcaatcacaggaaagttatgaatcatttgaggcatgcaacattttgttttgggtcatcttatttgaaccatggatatccttgtcaagtaagtcgtaatttctcaggttacctctattgcagaaccaaacacaggaacaattcgatcaaagatacttgttttttctgcttcgaatattttccagcgcataagacatttatatattgtaagagctgcaacaggctttccatgactgaaaccgatgtttttggatacacatttgagaagaacatcaacaaattcctgcagcatagaaatatgacaacaaactaaccggtgaaaagaagtacgaaactataaattagggctaatatattcgttaggcacatacatggggttgtcgttcaattcgagatcgtctaaaagattctgtcccaaaccttcttgacggtataggagcaagtggttcctgtaagaatgcaaaaaaaactgtcaaagaaactctatctagaaagacttgcgatgggcaagatgcaagtctatcactgaacagaatatctacttcattacttacctgatgtccattctccaaaggctgcaagaggtagagggaagaagtcaaacattttcttcaaaatattatacatgtaagtatgagagattgtaaatttaccggagcgcctgtaaatgacacctggggagacattctccgggaagcagaattaaccagcgcttgctgccggcgaatttgttctgctgtttccatgtcagaaaccttttcctcaagcctaaagagaaaaaataatcaagtaattcatatgtactaactaatgtgagtacaaatgtatttcagagaaaagataaaaagattgacactttggagaagaaaaaatgcaaatcgtcaaaacctttgcattgatgtcttcaaatcaattagccctgtctctgcgtctaaagcttgtttcagcctctcttcgcaaagtctacttgcttcctcgtatttcttttcagtttcatctattttcttttccaaggaacttaccaaatcctgttgaaaagttatcaaattaaggtagagatggagacaaaatccaaacaattacagagaaaggctctatatctacggaaaactaacattcaggtctttgttttcatcagcgagttttttgaccctctcattatcaattgaagcatcctctgtcaaactctcttctttcaaaatgtactttccttcctcctgttcatctgtagaattgttcccgctttcattgatttttttctctaacgaacctacgagtgcctaagaagtagtttcattcatcagatcaatgggactaataaactgaaaacacttagttgagcatgtttgatccatttgggtttctttggtcgtgctatacatctgtagaaagattaccttgagccgctcattctcagcttcaagattgctcacgatctcataatcaaatgaaacgtcctccttcaacttctctgtgatatttgggcttgtttcgtcatgttttctgtctaattcatcgattttctcctccatggaacttaccaatgcctaagaatatgttatgctcgatcagatatatattatcaggaggaaaaatcgaaatttgtatgaaactcaagttgtgtatcaacatcatacaacatcggtatctaaaaatcttaccttcagcttttgattttcagtttcaagtttgatgatggcagactgatcaataacaggaacttcatcttttatccgctcttcacttatcttacttatttcttcatattttctctcagattcatcaattttgttttgcaacgaactcaccgactccttttatggaaagaggataagacaaataacgacgatgatacatataaaatcataaacatagtcttcaacacagacaccgacaagaggagtaaaaagttcggacatagaattttatgactaaccttaagctgttcattctcagcagcgagatcgttagtcatctcaagtcccttagagagttcttcaatctcaagttgcatgtcttgcaaagcggactgcaagtctgagatctccttacttttggtttcttgagtgtccctgagctgaagtttaatatctgttaacacggactgtaagtctgagatctccttacttttggtttcttgagtgtccctgagctgaagtttaatatctgttaacacggactgtaatgcttcgatttcttgagatttggcttcctcgatctccatctgcaccagtacactgatcagatgcctcatacagaaccaacaaagtgatccagtttacaacgaaaaatatttgcgtcacaggtattgtgttgtccagcatgatatcattgatgaaataatgtgtaccctcatctgtttctcaagctccaaatttgaagtgagttcttccacttgattttccagcttagtcttagcatcttgaagtgctcctgtttctttagcagcctgaaaaaatgaagaaatataagaagcttatatactatatagtgaattgcttacaaaaaattgactacatcacttgacactagctttttacattctccacagaagaccttatacgaaaacaagttttagtacaaaaatattgagacatgagttttcaacttcaacgatctgtatttctcatgaaaggtcagtttttgtaaagaacagatttagtataagtaactaagaacttgatatgttagtaaacgaggattaccattttaagatttcgcaattctcggcgtgcaactttcactctccagccacattgagtagtaattgctgctttcttcgttctcacataacgctgatgacacaaacatcttctgatttgactctgcgtagccagtaagtttcatgtcatcaatactcaaacaagtagatctatgtgataggtaaaaaataggcaaaatgagaaacaatttcatcaatatgcgagcttaaacttacttgaataatgattgtcgctcttctcttctttcttaactgaagttcaattcgagcagcttttgctcgcatccctgtctgaattgaacaagcagacgagcacagggttttataggcattctggcaaatataagtccgtgcctgcttctgaatcctcagagaagccgcttctcttcgcatggtctcaaaccaaacacgtgcaacttgtcctaaatttagtttggggagggaataagacagacagcctgataaacaaacattgaatccaacaaacgcatataacatgtattacctctacacaaggcttgaatttctgttgaagcggcctgcaacaacaaaaacttcttgcgagattgataagtaaggacatttctctgtataatccgtgctgaatgaccaagaacttcggctcggtgagcatccatttctgccatttgacctgccctaagaaacacctttgtcttcccaatctatggtgcaggaaaattgttagtaaagattgtcttatatagaatgatatattagcagaaaagaaagctagaatatatcttgcacagtgttaaccaattaacatattcaaagatggaacttccagtgccctttatttgtgttttagtaattgcaaaacaagcaacacactagaaagcgttaggtaagattataaaactgcacctgaaaacctttgaggtccacttttgctagtagctttttgcaggcgtcaacttcgtcatagctattaacataaatcaagaaccaatttttttttaagtgaagctaataccttaagtcctactaaactaaactaagagaacatgataaactgtaagactagttacaggaattaagtgttggttaagctacctgctctttgtagtctctggggctaaaattctgaaacgggtcaaaaattcattgaaaggctttctagtaggatatccagcgcaactaatcctaatggcttccatgactccctgaaatcagatacaggaagttccacaacgttataagaaagctgaatagtttaatacagttgcaaaacataaagcataaggttctctaaaacatttaaagcttaccccacacctaagttgatgcaaaatattaatgttctcaaatatgtctggcttaagaaggttatttggtttaacacatcgtatgtagtgtggctccgtggtgctcaaactctccagcaaagattgcagttgttgctgtattttagtacgaggtgagaaccaaagtagagattataagcagaatcaggtgtaacttaacattagttcagagttcagaccttaaactgagaacctattgatgagaactttgatgtcttggatgattcctctggcaatggtggaaacaacgatgagacaaaagaacagtctgaagagctcaggagagcttgatgttctccaacaacataatctttgttcttgtccaaaaacagttctgtctgataagtgacctggaattaaacaataatacagtcattggaccaacgtaactgacatcaagacaagcattttcaggttatgaggatcactaacatcaccagcatagtgacaaattgtaaagtctgtttgagccaattttggcttgccaaagcgcttgtggtttttaaaagtctggtacagcttttgagcgaatgtatcatgtgttgatcttggaaacatgctgcagaagcaaatagaaaccttatcatttttttctgaaaacaaaagaaagaagcaacgaacaaacatgaccttctaacattaccaagcctcgtctagaagggcaatgataccaccaggtttctgacatgacaaaactacacatcagatactcaaactctatatagtaacactaggtgtgatgaacataagttccaagattgcacattgtgtgctactaaccttttcaataagatcaaggacatcctgattatcaatgaactctatgtaactccagtcaatctcttctttagtatattcttcttgctccatcttgaacacatgctgtagagataaagaagatctgtatgaatattgagtcagccgagaaatatagcaatctagtgtcagtgtccaacctggttgaaatgttgttgcagcttctcgtttgtcaaatttatacaaaattgttcaaaactgcaaattatccgtgaaaatgagaagactatgaatcaacaaaagaattataatcaaacaggcaaaccacagaactgcaaggcactgtcaataaccagaataactatcttgtttccatatcacaagaaagatcttagctaagtaactaacatataagaaactagataagaaaccatcagctcaatgttaaaagaagctaaatcagagagcataaatgtaggaagcaatgtaagaattcaattatcagttccagatatttaacatgtcagtgaaaacaaaagcataccggttaagcacctgtttgtcttgaaactctcgaatccataaatatccagaactcctataatgtgttttgaatttgggtcttggccgatggaattattgatcttggtcacgagcctgtaagcaagaaagttatataacctttttacagagaaaccccaagaatataataaaatccttaagaaaaaatcatctaccaatcaaacaatttagaatagacaatcttggctagtgcatctcttcctagagctgcactatcaggatcaagcgactttgtaatgctttcatcacgagtcaccatgacccttttgcacaaggaatcttctaaagctttcccatcacacctgcaacagagagaaagtcgaggctccaattatggctgaccataaaactgtttatttgagaaaaaacagagtagtgaagcatttacatgaaaagttctgctgccacttttagatggaaccgtgatttttcgtccttaggttctgaagcttctgattcttcaccctttgcaaactcgatgttccctagatgaaggattgcagccactactcggaagattccatcctacagtagtagaattgtaagaagagttgttccaatgactcaacatgtaaaataactagaaagtacctgctcttcagaattgatcccaacaacgtccatagctttccttgtagctaggtattccttggaatcatcaagcccatccaacgcataacaattagactgatttagatagcgaaatgtgcttggttttcccaacttgtacctctcagtttcctgaaacctcatgaaaaaactatttagtcaacgtgaatctcatgtaaagcatgtacataagatttcgagctaacaccgccttagaagagaccagggcttacctgttctggtgcagcgcaaagcatgtaaaagcaatgatagtttctttcagggtctgagacttgacaaacccgcgacctctctagcaaatatgtcctaatagcagctcccgagattcttcccctctgatcaaactgaatctccacaaatttaccaaaacgactgcaaaatggaatttgcgtaagtatcttaaattgggttcaagaaaatacacaaaatggtcaaatcatcaaacgtgagactcctctcctccaccttgaattattgtttctaacggtttttgcattgccaaaagcttctaaaactggatttgactgcaaaacaggaaagtcaatcagcgaaaagtatgacaagatattactggaggaaactaaccaagtctatcttttgcaagaatgaagccatgtattttaaaaaattcattacctccaaaacttgctgctccacagatcttccttcactctcagctcttcctcccatgtaggcaagatactgcatgagcatcttcgtgctctctgtcttgccagcaccgctttccccactcaccaagatcgcctggctcactccctcgttaatcattttcctgaaaggttatgtttttggtgatcataatgccgaaaaacagttgtaagtgaaacaataatataagctaatttaaacggcaaaagagttacctgtacgcagaatctgcaacggcgaaaggatgtggactcaactcaccaaatgctgtgcccttgtactgtttcattgtctcacttccataaaggtggggcaatctcttaaagggattcacagctatcaatatatttcctgtgtacgtctggatccatcatgaaaaaaattagattgcataaactgtggagacatcttaagatcacgtgatggttaatgtaaacaacaaaattacttgaaagcaagaaatacttgacaactagtaatcgaattgaagcttacatatatttcatttgcattataacggcacttaagattgagcaggacccctggttcatgcaaatatgcaagctttgtcatgtcgtctactccaagttcagggaactcggggtccttggggtagacattatttaactttgccacaacctaagaaacaaatgcatcagaaacgagagctttttttctcaatgctcatgtcataaacaaatctcagataatgcatgaccattaaggaactagttccatggtcacagaactcagaagatcaaaagctaaacgttttccacaataacaaatgtctccatatcaagaaatcatatactccttcggcagattatctaacaagttttatactttcttaccgtctttccagagcagttaactgtgatttcttcactgttaacttcttctacttccccatctatccaggcatcatctggatcctccacccagacatgagaccctaccgttactttggctgaagcagcctgcacataaaccacatcataactacacaatcaaacaggtaactgaaaatcgaagacaacaacaaagagagatgaattttctcaaaaaaatcttttttttctttctttctcatccaaaacaaaatcaatagagagagtaaagttgttcacagctttgttcaatcatatacaaaccaatcaaaaaaggaatttttttgttttttaattcaacgacatatggttccatttttacacatttagaaactcaataacaatttgatacaccatacgaaaattcatgtatcacagtatgataaatttacataaattaaccaaaaaacgtttgttcacagaaaaattaaaattgaaatcacacaacagagagaaatcaaaacgaatcagattttgttagaagaaaccacaatgcgattaaagaagagaaagctcgtaccattgttatgatggaatttggtcagatttttctaaaacgatcccggctcgacaatacccaacaacgggagaaacatcaacacaaacttttgaaaatccaatcacaacggatccatgataaaatcaagaaccaaaatttcactttcccagcttcaaaactttctgatcgacgtcaacaacatagaaacataaacgaggctacatgcgcaaaatttcgtgacgattgcagaggatcttaaacccttgagtttttttccctttgaaaaaaaatcccagaacacataggtctgtttcatccagattttctcgcagaaacctgaattttttttttcttggattttcttgtcccctggtttatttccccccaaaacggacgttggaacttggaaagcgaacgaagaagaatcatgaaactttgtaattccgatgttaccccttttcattaaaccgatccggtttatctatctcgctttcaacggatctaatagaaaagagagaagcgtctttctcgttaatgggccaattcttttcttaatgggctacacgttttatcatctctatttcaacggatctactactacatagagaagaagcttctttttgttattaatgggccaattttttttattaatgggctaattgtaacagtatcatttctgaaaacccctcccttaatacgcctccgtcttcgttggttctcgtagcaccgtctccaatggcgggtttcagttctctaattcctagaacgcttctgaaacgcgccgttagtagcgcaacaagaaatctaacggcgccgttagcttctatttcagcagcaagaaatctcttcattggaggaggatgtgacgaaaattatggttagtattgctcatgataaattcgtttgtatacttaaaagtttaatgcggaagaagatagcactctaatgtttggttactgacttggaatctctaagtttcgaatttggagctgatttctgtaaaaatggtcatttaattaagtagacaatttctgtaaaactttgaaaggtctctctttttcttctgataagttgattaaattgcatacaaatgtgaaatgctagattgtgtaacctggttgaggtcttcatatagtcggagtctcttatgatttgaaacttattgtaggtgagccaggagtgttttctcattccaatggaataaggtaaaagctcagattggatcaattagcttcatttctttctgctctccaagtctcgcttttgtactgccaaaaacaagctgcatcttgagtcttggtgtattgatttgaatctgatactttaccattcttctacagaaagtacaacaccgttggtaatgctggcgcactaactggtccatttcatcatcttcttggggtaagttttcagttgtgaaatgtttttcatcttaaacttcaaaaaccccaataaataaaaggtgcacacgtatatttcagattccttttattcattttgtgatacatgttatttctcaggtcaaccagacaaacaagcccgcctttttaagggtccaatctatgagctatcagtttgtcgctgattctcattcatctcctaaacgtattgtgaagaatgaggtacaatagattacactgaagatcggctttgtgttttgctgtccaagtcttagtgtgagctcaatttatgtttctcttgcagacagatcttatacatcttcacctagatataagttatagcacataactaaagtgtgtattctcattcactggcctgtcgatctcagtagttcatagcacataactaaagtgtgtgttctcattcactggcctgtcgatctcagtagttcatatagtcaaacacatcactgatatatctgatgatcaaattactttctgttttccatgtatttttggttagtaaattcctgagaattgtgcctttcatcaattatatttcttgcgttatttttcaccaacgagagatccttaggatgcatatttttcatcttgttgtaggatgaggaagatttttctgattcatcaaagaagggaaacgctgaaaaccctaggaaacatcaaattggggagaacatacccaagaaggataaaataaagtttcttgtgaacactgtaagcagaatttttttgtacactaagctatttctttttgcctttctaatggtttgtcgattatgagaattttcatattcttgtttaaccttagttttttactcttatggttcttattttgctctcatctgtgaatgcagcttcttgatattgaagataataaagaggctgtttatggagctctggatgcttgggttgcttgggagcgcaatttccccattgcttccctcaaaatagtaatagctagtcttgaaaaggaacatcaatggcatcgaatggtccaggtatctatcacctgagtgttctatctcttttctgggactcatgaaccatgaataatcaaatatccaagaacatatgtctattgctatagtaactgaaaaagtagaatagaatcttggggaggtgtttatttcttttcccctgtttaatcgtttgtaggtgataaagtggatcctaagtaagggacaagggaacacgatggggacgtacggacagttgatacgggcgttagatatggatcgtagagcagaagaggctcatgttatctggcgaaagaaagttgggaacgatctgcattctgtgccttggcaattatgcttacaaatgatgcgcatatatttccggaacaacatgttacaggaacttgttaaggttctttttcccccttgtcttcactgaccgaaaactaaataagaaaacattgcacattgatacttaactgaactagtaagttactttatttcgtggtgacctcaaacttgtgtttattttgttatgtgggttatgaagctattcaaggatctggagagttatgaccgtaagcctccggacaagcacattgtgcagaccgtggctgatgcttatgagcttttgggaatgcttgatgagaaagaacgggtagtgacgaagtatagccatcttttacttggtacaccatccgatgataaaccaagtagatcttcgaggaagaagaagaaaccaggtaggtgactgcgatttagccattgatatcttcaaccatctttaaagccgtttgatattgaactcatgtgctatagattcttgcgcaaaacaggataagttttaaactgtctaacttgtgatttcagaactgaggattccagaagcaacgacagaaggcgcagttgatgcagcaaaagctgaaatccaagaagagcgaaaagaaaatctggataatcaccaagaatcagaagctgccactgaaaaacaattcgaacatggagcgtaagttgtagtatttaatcgataaagtatcactgcaagagaaacatggactgtaaggatgtatttaatcgatggattgttgacaatgctcacatcccttgggatttgtcgcaatggatggatatagagtttagggtttgagtgcggcactagtattactgagaaataagataacaaaatcacatctacatctgaagttttcgacacactcaacatccaacggtctgaaccaactaccaaccaaaccaataacatcgtctaaaacctacaaactgattgaataaaaagataagctagggaaggtatcatagtggttcggtacggtttgaattggttagatgagattggacccctaccgaaaatagagtcttcggttacatttggtttaataacaagttcatttgaaagttaagaaaataactagtattcgaatttagagattgcgggagattgtatgttcattcgaaatacagtacagagatgcttcgattccagatctgcgtccggtctctaatggccattcgattctcgaccaaagagggaatctttcgggatgggttgatttgtgggaagtgggaaccaaacggaatgggaagacggaagaggaaaggtttaggagatatcaatcagacctccaaggccaaagtcaccttccgatttaggtaaagctttgaaataaagagataaattactctttttcaccggacacgaatgagatatcgtaatttggtaaacttgatagaagatgatcagtgacgttatttctcaccaacactataattccattttaagaaactttttctcattttagttacagttttccagtttgaaatctctcacacctttacgactagactacaaaccatatctcttacccatcaactcttaaaaatcaggcattgctttatcactcagtaattagtatttgacgtttagagtgtactcgattagatagatagctttgcgtccaattctctactttctatttaccttgtttcgtatcgaaattgataacgtaattgactataagaaactcttttgccaatcacttgctgttgtgtttttatgttcctgaaaacagttcagtaactggttttcttataaatgtcacgaagagcttacattttcttataaattacataaatgaattctgccaattttctctttcagacttttcttaaatttgagctcttcgtgcagctaactgttgcctattgattgattaactactttttggttagtttgggaagaaaatggcgggtgacgatttggtgtttgctgttaatggagagaaatttgaagtcttgtcagttaatccttctacgactttgctcgagttcttgcgttccaatacttgctttaagagtgtcaagctcagctgtggcgaaggtacacacacacactgtgatatttttcgatgaatgtcaatatcttttgtggttttattttgtttatatacacttctctgtttgaatctctaattcgtatcaacaactattttgcttatgaatgaagatccttcaatttcgaggacctggatgattaactcttttgtctccaccagaacgtaaaagtcatgatttattatttgaatctgtgaacgatcatacaaatagttaaaatctatgtttatttactccttccttttcagaaatcaatcttgttgtgttttggttttgtgccactcatatttacctgaattagtataccacttgtctgacaagtgtttaccaaactgaaatgaggcttggaacttggtttctttttccttgtttcatgtgtctttgaacttgatatttttgtcttcttttgttgcctgtccggcattttcagtgtgtgtttctctcactgactcagctatatttttcaattttcacagggggttgtggtgcttgcatcgtaattctatcaaaatacgatcctgtgttagaccaagtcgaggagtattctataaactcttgcctgacccttctttgcagcttaaatgggtgctccataactacatccgatggactcggaaacactgaaaaagggttccacccaattcacaagagatttgcggggttccatgcctctcaatgtggtttctgtaccccagggatgtgcatctctctctactccgctctttcaaaagcccataactcacaatcttctccagactacctgactgctcttgcagcagagaagtccattgctggaaatctttgtcgctgcaccgggtatcgtcccattgctgatgcttgtaagagttttgcttccgatgtcgatatagaggatttgggcttcaactctttttggaggaaaggagaaagcagagaagagatgttaaagaaattgcctccttacaaccctgagaaagatcttatcacttttccggatttcttgaaggaaaagattaagtgtcaacacaatgttttggatcagacgaggtatcattggagcactcctggtagcgtcgcagagcttcaggaaatattggcaacaaccaaccctggcaaagatagaggtttgataaaattagttgttggcaacacgggaacaggttactacaaagaagagaaacaatatggtagatatattgatattagccacattccagagatgtcaatgatcaagaaagatgacagagaaattgaaattggagcagttgttaccatatctaaagttattgatgctttgatggaggaaaatacatctgcttatgttttcaagaaaatcggtgtccatatggagaaggtggctaaccattttatcagaaactcagggagtatcggtggtaatctagtgatggcacagagcaaaagttttccttctgacataaccacacttttgctcgctgcagatgcatctgtgcatatgataaatgctgggagacacgagaagcttaggatgggagagtatcttgtgtcgcctccaatattagacactaaaactgttcttttaaaggttcatattcctaggtggattgcttcttccactactggtttgcttttcgaaacctatcgggctgcacttcgccctattggaagtgcattgccttatatcaacgctgctttcttagcagtagtctctcacgatgcatcatcaagcggcatcattgtggataaatgccggttggcatttggttcttatggtgggtatcattccatcagggcgagggaagttgaggatttcttgacgggtaaaatactcagccacagtgttttatatgaagctgtgaggttacttaaagggatcatagttcccagcatagatacctcatattctgagtataagaaaagcttggccgttgggtttctctttgattttctctatcctctgatcgagagtggcagttgggattccgaaggaaagcatatcgatgggcacatcgatccaacaatatgtctacctttgctgtcatctgcgcagcaggtgtttgaaagtaaagaatatcaccctgttggtgaagccattatcaaatttggagctgaaatgcaggcttctggttagtactatatttttcgttggatcgtttttaaatacctttatattttcaatgctgtgaaaaggctcaagcagcaatgcttttagttctttagtcatatgcttatttagctaagtaatatcagaccttacaggagcgtttatctttccaggtgaagctgtttacgttgatgatattccatccttaccccattgtctacatggagcattcatttatagcacaaagccattggcttggataaagagcgttggtttctcaggaaatgtgacaccaattggagttttggcagttattactttcaaagatatacctgaagtggggcaaaacattggttacataacgatgtttggcacagggcttctatttgcagatgaagttactatatctgccggacaaataattgctcttgtggtaagtccaatttctaatacattcccaatccatccaccaccgaaataattcctgcatctctatcaactttctcgtctttcttctaactcttagtccattttttatgacctatcaggttgcagacacacaaaagcatgcagatatggcagcacaccttgcagtagttgagtacgattcaaggaatataggaacaccagtattatctgtggaggatgcagtcaaaaggtccagcctttttgaggttcctcccgagtatcagcccgaacctgttggcgatatttcaaaaggaatggctgaagctgatcgcaagatacgctcagtagaggtattaaaattctctttctctctcttaatctttgatatattaaaaaaaaataaaaaaaaatacattcttacactatgtttgctgttgattttggttatgcagttgagacttgggtcacagtacttcttctatatggagacacaaacagcacttgccttgccagatgaagacaactgtttagtggtttacagttcaactcaagcacccgagttcacacaaacagtaattgctacatgtcttggaatcccggagcataacgttcgagtcatcaccagaagagttggaggtggctttggtggaaaagctataaagtctatgcctgtaagtaatagtttcttctctgaataaaagtcctttgtgatttgatactaatgctgctgaagatgatttcaggttgcgacagcatgtgcgcttgctgcaaaaaaaatgcagcgtcctgtaaggatatacgtcaaccgtaagactgatatgataatggctggaggaaggcatcccctgaaaataacttacagtgtaggattcagatctgacggtaaactcacagcactagacctaaatttgtttatagatgcagggtcagatgtggatgtaagtctagtgatgccacagaatataatgaactccctgaggaaatatgactggggtgcattgtcatttgacatcaaagtgtgtaagacaaaccttccgagcagaacgtctttgagggcacccggtgaagtacaaggttcatacattgctgaatccattattgagaacgtagcatcttccctgaagatggacgtggatgttgtgagaaggataaatcttcatacgtacgaaagcctccgcaagttttataagcaagctgctggtgagcctgatgaatatactttgcctttattgtgggacaaattggaggtatctgcagatttcaggcgaagggctgaatctgtgaaagagtttaaccgatgtaacatatggcgcaaaagggggatttctcgagtaccaatcatccatctagttatacataggccaactccaggaaaagtaagcattttgaatgatggttcagttgcggttgaggttgcagggattgaggtgggacaagggttatggacaaaggtacaacagatggttgcttatggtcttggtatgataaaatgcgagggaagtgatgatctgcttgaaagaatacggcttcttcagactgacacgctcagtatgtctcaaagcagttacactgcgggtagcacaacatcagagaactgttgtgaagcagtgaggctttgctgcggtatcttggtggagaggctgagacctaccatgaatcagattctggagaatgctcgatccgtgacatgggacatgctcattcaacaggtataactaaactggataattctccttatattgatccagatttcaaggaaatatctccatatgtgaaactgcaggcgaatgctcaatctgtggacctatcagctcgaaccttttataagccagagtcctcttctgcagaatatctcaactatggagttggagcgagtgaggtgaatctcatagccaatattttaaaccattccctgagataaaatcagtaaaacttgaatatatatatatatgtaaaaatatgcaggtggaggttgaccttgtgacaggaagaacagaaattataagatcagatattatctatgactgtggaaaaagccttaatcctgctgttgatttaggacaggtaattcgcttgattttggtccggattctggatgtgcacttgatgttctataacaggttggttaattggcgtttatgtttgttttctttgagaagattgaaggagcgtttgttcaaggaatcggatttttcatgtatgaggagtacacgacaaatgaaaacgggcttgtgaatgaagaaggtacatgggactacaaaatacctacaatagacacaattcccaaacaattcaacgttcagattctcaacagtggtcatcacaagaaccgcgttctctcctctaaaggtttagctaagaatcaatgagattcatcgctctctctctctcttttttttatcttgtttaatcttactttttgttgagctgaaatggtcttctgatacagcttcaggtgagcctccgttgcttgtggcggcttcagtgcactgtgcaacaagatcagccattagagaagctcgaaaacagtacctatcatggaattgcattgatgatgatcatagagaaagatgtgatcttggttttgagttaccggttccagcgactatgccggtggtgaagcagctttgtggccttgaaagcatagagaagtacttagaatggaaaacatatccttaaaataacagagtcactcagagatgatggaaaaatcaaaataatatttttcttatgatataaatatattatgcaaatttatgtactatatgcatcaaaaggcttgtaccacaaacaaagaaaacccctaaatcaaggaatcgaaagtgcgaatagtcttaaccggaatcgaagcaacgttaaagtttgcgttttaatcttaccttttttttaatcatctacattccgcagtaatcaattttttgaacctacattctgcagtaatcaattttttgaatctctaattaactacaacaaacgcaagtcacctcaattcagatcaagggcagtaaaaaataaatatatgattcttgtaacggtcactttttattattgatataaacaatttcctttttttatattggtatgagtaatttccttctcttggaacaatttaacctaacattttttttttccgttggcaacctttctctctatatatcaaaagtcctcttttttcgaaaacaaaaatccaccttcttcttcttcttcttttttctttttagtctctgtttcttcttgatcaagttctattcctctcttacaaagagaactcaccgatcacgagaacgtcaaaaggtcgatgatcatccgcgccaatgtcatcggatccgtttgatcacacgattaaagatttcaccaccgttcttattttccgtctctgtttttgcgtttcacgatctttaccaaatcatggaccgacagtcggaggtggtgacgcaaaccatggatgatgcagcatatgcgtcgttatgacgagattcaggtttgttgcttctagcctaagtcctattttgatctcttggaaccttagatttataattttagcgcaacttgctgctgcataaagaaagtctctttaggttgtaggtcaatcaataattagttttctaaacgcaatttcataagaggaactagggtttgctcttgtagtcagttttacgaaattgacctaatttgcggttttcttgtctgttatcactttgtttcatttaggacaaattgacctttagttttcttcttgttattgtaggttcgtattcttgattcgccaaatcagtgggtgcatccgcaaaactgtttgtttggattcgtgatagacaacatattttgctatagcttggtaacgactttctatactctgtttcttattctttcttacaaaaaataataattgatttagttgtaaaatgtttttttttatttgatgattggattttttcaaaagctcttttttaatatatttattattattttaaaggttttataaatactaaattaatataacgttgtgaaatctaaccggattttggatcccgccatttaaccgtggtcattagcgattccacaaatccaacatgtttttcacatcttcatatgtatttagcatttgtatttttttttctttaaaggttttcaactctttttttatttttttaaagattttataaatactaaattaatatgactttgtgagatctaaccggattttggatcccgccatttaaccgtggtcattagcgattccacaaatccaacatgtttttcacatcttcatatgtatttagcatttgtatattttttttctttaaaggttttcaactcttttttttatttttttaaaggttttataaatactaaattaatatgacgttgtgaaatctaaccggattttggatctcgccatttaaccgtggtcattagcgattccacaaatccaacatgtttttcacatcttcatgtgtatttagcatttatgtttttattttattttctttaaaggttttcaactccttttttattttatttttattttttaaaggatttataaatactaaattaatatgacgttgtaaaatctaaccggattttggatcctgccatttaaccgtggtcattagcgattccacaaatccaacatgttttcacatcttcatgtgtatttagcatttatgtttttattttttttctttaaaggttttcaactcctcttttatttttttatttttgtaaaggttttataaatattaaattaatatgacgttgtgaaatctaaccggattttggatcccgccatttaaccgtggtcattagcgattgcacaaatccaacatatttttcacatgtatttagcatttgtgtttttttttctttaaaggttttcaactccttatttatttttttaaaggttttataaatactaaattaatatgacgttgtgaaatctaaccggattttggatcccgccatttaactgtggtcattagcaattccacaaatccaacatctttttcacatcttcatgtatatttaacatttatttttttaatttttttttcttaaaagattttcaactcttttttcgttttttaaaagttttataaatattaaattaatatgacgttatgaattctaaccgaattttggatcctgccatttaaccgtggtcattaaggattttataaatccaacatgtttttcacaaatcttcatgtgtatttagtattttttttttaaaaagtttttaactgtttctttttttcttttcttattttgattttttaaaaagtttttctatttcagggtggataaaattagcagaaacaaacaaatggaatagaatcaaatcaaaaatcaaacaaaaaccgaaaaccgaaaaaagaagagtaaattataaacataattaattaccattccccaaaaaccattcccaaaaaaactagctaccatattttcatgaaagttaaatacagaccaatcccaataataaaaaatctctcgaaagtgaagttttgcgcaaagaagtcggctcagatattatttgaagttttgaactatggtagatacttatttataaatcaattacatataaaattaccaaaagctaataaatcgtaagccacataattcacgtaagattcctgtccgtctctgaaagtgtggtcgttactcgttaccgacgaaccgttgattctatggaaacaagaaagtccagaaaaaaacaaaattgcatacacgtgaatcaacaatttatgggtcgacctgaaatatatttagaaaaataatttactaattctttttttgatagagaatttataacaaactttagtgacaagtcataatcaaaatcagatgactcatcattttccaattttcctaggacagtggatttttcatatggaccccttaaaaaataaatatattaataaatatctaaaagcttttgtaaccgttgattaattacttaaaaactcattagaagcttgattattagtggaagacagacaacctttgtacttaaataccttttatgagttttgtctgcctctaatttactctttgctacacgcttctagatccctcttccttcgtcaaaatctcatttttcttttttcttgttgatattgagaaatgacttaatcctatttcgtctccttcctcaattcaacgatgcttagggtttgccccaaaattatataaactcgtcgatacatacaaagcttgtgactagaattcgtttcttcaagagtaaagcttcctcctttcttctcctctgttttcatctctctgaaacaatggaaagaattatgataaatccattgttatcaattcaaaactccccaaccaagttcttgaaaccaccactttcgtccattcacaggcaacaacaacaacaagagaggcagagcaataacaatacccttttcatgggggaagccagaccaagaagagcgaccacattcgcatgtctctcgataaggagaaggagaaacaacaatggtgtgtctgaatttgaagaaacggcgaggtttgaacaagtgggtggtaaaggaatctcggttttgtgcgggttaggttattgggtacaaggatcaagatgtttcccatggcttgcacttaacttccatatggttcatagcctcgcactccaaccatcgacgcttcagcttgtgcaatactcttgcagtcttcccatggtggctaaacctctctacggtgtgctctcagatgttctttacattggaagtggtcgtagagttccttacatcgccattggaggttagtttttccaaagtctctctttgtgccagctccaatgccttgaacatgagatttttagaaccaaatttaggaaatgaagaagcttgctgattgtggcgattctgtgtcagtgtttctgcaggttttagcatggggttcaatggggatatttcaaggagctagagaagttcttccttctcttgtggcatgtgtcctgcttagtaaccttggagcatccatcactgaggttgcaaaagacgctcttgttgcggaatacggtctgagataccgaataaacggtctccagtcttatgcgctcatggcttcagcagctggtggagtccttggaaacttacttggaggatatctcttactcacaacacctcctaagatctcctttcttgtattctctgctttgttgtctctgcagctcgttgtttctttatcttccaaagaagaatctttcggcttaccacggatagcagagacaagctcggttttggagagcgtcaagaaacagatatcgaatcttaaggaagcaattcaggcagatgaaatctcccagcctctgatttgggcagtagtatccattgcaatggtccctcttctctcaggatcagtcttctgttaccaaactcaagttctgaatcttgatccttcggttattggaatgtcgaaagtgattggacagttgatgcttctttgtctaaccgtggtctatgatcgatacttgaagacacttcccatgagaccactgatccatatcatccaactcttgtacggtttatcgattctcctcgattacatcttggtgaagcaaataaatctcggatttggaatctccaacgaggtttatgtgctgtgtttttccagcctagcagaaatcctagcacagtttaagatccttccatttgcagtcagattagcaagtatgtgtccacaggggtgtgaaggatcagtcacatcttttcttgcttcaactctgtgtctatcacaaatagttagtgcattcttaggcgtcggattggctaatctgatcggtataacatcaagtaactattcaaacttgtcttcagggattctcatacagtctctagcagctctggcacctttgtgcttcatgcaccttgtgccaatgtcagaacctgtgattgagaaagaaggcaagagaggtattagtaagagaagcaggagaaacagacgagtcgggagagtagtcgataaagaaagtgttacttaccgacgggaaagagagtcagaagaagcacaaaggtagtgtaaagtatagttacatcacaaattagaatagttgtgtatagcgaaggatgtatactttgtctatatactgagattttcctttttctctctttcttgcgatatcatcctatttggatatgttcgaaaacgaatcatgttccgatacttttttcttggaaaagctaggctcctacattgggatacatacatatgaagaaacaatgcttcaatttgcatgtgttaaccaaccatcctataaactcttcatcgaaatcataaggttcaacgaatctacgtttctcctcctaggcatgctatcaaacactttctgggcttcagaaaactttccacaaccacaataacatgttggaaagaaaaccaaaaattcaatattttttttactaagaatcaacatttgatgctgacgcaaaccctatatctggcgaaacggaacagatgcattacgcaattcctgggatcattagagaataaaaaaccacgtcttcacgtgcgcgatgatcaatgatctcattagagacaccaattctcttgtgctatgaacagaacactctgtttttcagttggagtatttaaattacaagtaaaaccccaacttttattgtgctttacattttagccccaaagttcggttacgttaatattggacatcaaccaaaccgaatgcaacctggacccaaattggagtactcatcggattcactcacatccgatcgcttcatttggattttgtattgactcggatccaaattttgtagatttgattttgttcaaaagcaaattgcaaagagcgacaaataagaacacaaagaaacacatctccatttaactaattaacaaaagaacacacaagattcgttcgtttgtcagatggataggaattacattattacataacttgaaaaaacataaactataataagtacttcttaaccaaacgtcaaaacacaattaaaagacacagattttcatcagactgccatggtagatccaacaccagccttgtgctctcccacagtgtgtggtacatgaccatgaccatgagcttggcctgtagcatagtcttggtctctgtatccaggaccatatttgctgctgagtgaaccggcatggatcaacatgaggtagagaagctgcgtgaacgtcaaaatgataatgaaggcttcaatcatcttcagtctccatcctctccatcctcctatgtttatttgtttgcatgccaacctttcatcaaaattaagtttattataccatttaccaaacactgacacttccatgcatctatataaagaagttcacaaaatatccaaaaccaagttttaaagaaaaatagtcgtcaaaaattagcacttcatgagatttaataggacatcataaataaagtaattaccccatggcaagagctgtgatagcccatgcaacgatggaagaagctccagcagcggctaaactatcattcctccaaaacctaatatgatttgctccggccaacttcgacgctactcctaccacagccgccaatatcgaaaacgtcaagaagaacggtgttgctccattgcctccaaaacctattcaaacattactaatattcttagtaattccactagatcagctacatgaccatataaatagctagagagaaagagaaaaataaatttacttgggtggttagtttggccgttgatgtatttattgagacaccaacttgcaaaaccaagcacaatcaggtacataacaagattcaagaacagcaatggtgctgctatgtttcttcccactgtcgtcgccatcaattgcttcttttaccttctcctaaagatctagttttactcttttgctactcgaaacctttcttctctttgcaacaacacgtaaactaacttgctcggtgatgatctatatggaagggctatgtgagacatagttatatacaccgagcttatgtgttcgttggcaaggagcacgtgccatgcgaagaggacctttgtgtttagctacttacaggtggtgggacacgtgtcttgacgttgttttaaagtgttggatatagccagtgttgtcattgagctcgaatctccaaaccgctttctttatattatctccttatgttttatcataataaatgttccaaagctaccatatattggggtcagcaattaattacttatgataatccacctggaatcaatgaaaatagccatgtattggtagaatatcatttattcatattgcttaaatatgaaatattagcttaaaattttcataattttgccaagtttcttttcatttggtaaaaagttatctgaggaaggttggggataatgaaagaggacaagtgattaaccaccgagtatctagaacttctttttttctcttttatcttaataacgaaggcgttgttaatatccggaattgtttgcaacgaaatttagttgtatgaaaaaacgaaaaaaaaaatcagttgcatactattgcttcatgggcctatattgggttggcaccaaaaaggaaaaccgcatctcacaaacatgtcggtcgtaaccgcatggctgttttcacatatgtttctaagaagtaagaacaaaccgataatttacatgtttttttgttttgtaaaatatgaatcaaatttatgtaataaagatgactgatacaggccacaatggtgatgaccataaacttgagctgcactgggcaccagactatatgattaaggtatatttgatgaattgaccaaaacacaagtgtgtttaaaaatcttactgagtaacatacatatcctttcttttcttttcctgtgttttgacaggtttccagcatctctgtctgtctttacactagtaagtataattttttctatgagacttataatgttcaataattttatgatatttagagaattagtgacgtttatgatgatgttttggtggacgaagaaactcctccggttttctcaagatcccgttgtcttgctcgttccattttccgctttcgccattcttccaatgctgagcggataacaaaaacatttgttacatacctaaaccttcatgtatagttttgtttctgatctgaattccatagcataaacaagacgatttcgctattatgtgtacctttcaagctcgatgcatcgtttagcgcacggaaatccttcagtcgtttagagagatcaacggctgtagtctgcttcacatctttctgctgctcggtttcttgtcccgcagatgcctcttgttcgatttctcggacctatcattcatttcaagaacataaggccaaatcactctctcgaaagcatagatacttgtaaatatctaatgctacaaaaagcataatgtgcttactcttctgatgagctctaaaggttgcatcttgagcctaagttcttcggcttccttgatataccgaagctgagctgcatttatcaaagaggtaatggttatgtatgatgaaagaagaaactttttcaagtacccaaaaagaagacaaagctctgcagtaatgtagaaaaaaacatcaacaatctctcaaagttcttcatctcattaaaccaaaaaaaaaaaaaaaaaaaaaaaaaaaaaaaaaaaaaagttcttcatctctacaaggcttagaatgtgaatatgtaacaactttgatatcaacagttccatggaaagagcttaactttcaagtgccttatgcaattgaattatctgttcaatacgcaaaaatctaaactttttcgaaatcgaatcatatcagtgtagaagccctaaatctacaaagatcgaattgaagtgaccacaggatccagaaatctaaaaacgagtcaacaagctttttgttatgagcagatccgagaaagacccatcagaagatgatccctaaagcaccaaactttgctcaaattccgatgaaatccagagaaattacgcaaaatcaggatatacccacaaggaattcagaaaagttacagacctgaaatgagtcggcgagaagaagaagaagaagatggagaagaggaggaagtgaaaaagccctgaaggaggaagaggaagatgagaacgttgatgacagtgagagcaattgttgcgttcttgaacgaaaacctcatgcgccattgatgatccattatcttattccaaagcaaaccccaaaaatctaaaccgtggtctttagaatttcaccaaacttgaattttatcaaggatcatgaatcttccttcttcctttctctacaagactttaatttactggtcttttgactttactacttatcctttaatctttggttggacttgctaagcactgtatctccttttctaggtaacaagttaaatattacctaaacaatccataaccttattatattttgatttggtgacgtgaatccaaacatttgttattttctttgtcttcaactatcagattaagaataaaatctttacttttcaaagtttatcaatttaaagtagtttgcagttttaaaagataactcttaacgtattttgtgtgaatttaagaacaattaaggacaaaacttttgatggtcaaaacttttcttgtcatcaatcatcaatatatgattttgatggtcttagaaacatcttctcttcgaccaaaaaaaataaacatcttctctgttttttttaatgacacactcttctctgtttctgcaaaacgttttgactcgagtcaatggaaacttcaaaaagacagaaaacaacaaaccatattaaggaacaaatattcattctttggaatcataaacataactcttatcacattaattagataacttcaactatttacaatctgagagaacaaataaacaagagctttctctcacagaacatagataattggtacacagccaaagaagaaacaaactggaaaactacgaattgaatgacctaagcaaaaccatatccgaaaaccggattcaaatcatatctaagcttctgcatgcttttatccatattctccaaaatactttcttcaaaaagtatcgagtaaattgcaaacctcaaacaatacataaacaatgccagctttggaagggaagctaaacagggttgtttctttgtctatccttctgctcttgacgtcttggagctgcattaaaaatgattcaatcagtctttttcattagtcaagacgagaaatcaagaaaccagaagatgatctttaaaacttacctagtccactagcttctgaggttcccatgatccgaagccttttcaccgagttgataaacattctaaacaaaaagagagaaaagagactaatcaggttttgaactactgcaatactgcttaatatccgaatcttacctccatggaacatctccaacaagcatccaatccccttccttatcttcataagtgagtacaaagtctgatgatccatctaaaagccttaaaggtttaaccttttctcgacaagtagtacctgatagataaaacagaaactatcagtagattcatagaaaacatcgggtttatagtgtacgcatttgaaaacagtacagacctgtcattccaaagaacatttcctcaagcgtctgagccaagttttcgtaagacgaatgagctctcatatccacttttctgcctataccaactccatccatattcaccttaacaaaccctaagccctgaactttcggattcaccttcattgacacatctttgagctcatcattcttcacaactttcttctccccgtctccttcttccgctcttgctgccttcatagcttggttattaaccaaactgttcatcctgtgtaacccaattggtggccatcctaccacttgactgccacaacaaaccaagaaatttccactcaatggctctcgaaattcagatgtaatcatctaaacagacattaaaatgaacaaatcttagcatttgcatgactccatagagaaatctatagcacaggacaagcacaagctcatcaatggagatagatacctaactcttattcagggtaaactaaaacaaaagcacctacacaattctgtcctgagatggcataacactcacatcacaagatttgagctttcttaataagaaaaaggacgaaccttgaacgaggaggagaagctccttggtgagaggaagattcagcagagcgtttagacccaacggaaggaaaatccttagcagtaagaatcctcccacgctctttccacgcgccaccaccgaggctgagccctaatcccaattccagctcactctccgccggaagattactcttccccacctccaattctgacacaccacgcatgtcaataacaaaaccctagactccaatgataccagcagagaaagtgtctttcaaataacccacacaaaaaagaagcttgatgacacagagagaatggagacaacaagaagagaaagagtgtatttagggtttgagagagacgagagaaagagatgatgaaaacagagtaaaagagagagagagagaggaggattttggtggtggagagagtgatgagaattgggacccatatgtcttgtaatggccataccaattttttctaaccaaaagtcttctcctttgttataaaatattgtttgttttctctcaaaacttgtcttccgacataatcaaacctgttgtgctctcgttgggatatcgttgttgtgtttggttcaagcagcaagagaaaatagagagtcccaagaaacttgtttacagttgtatgtgtgtgtgcaaggttttgctttgtgttgctgttgcatcataatatagttcttttttgttttcttttccgcttgtggtttttttcttttcttaaccaaaaattgtattgctttagcctttaggatgaagagtctctgttttaaataccatttttctttaatttgggctaatcaaaaaatctaaattaacttttatatttcatatactatgtattggttacattgctcctagattttagacctaattttagtctctctttaacaggttggccatcattctttatactagcaaactcgtttatggtcatatgccatttgcatattgaccatttgattatctttcttttctaataactaagataatatatattttcaactttttccttagaccatgattgttgtcgaacaagattataaaagaaagtgagggaaaaaaaatggtgggaaaagatgcattattataaaatcgtggtgatgagatattcatcattatgtttgatgatcctttgaaaacttttgcaggcgcaattggtttgtggaaattacacttttgatcaaaatcattatcaaggagtacatagatttcatgctctaattgatggatttgatagaaaataaactaaataaccggttatatcatgtatgaatcaaataagtatacataatacatgaaagtatagttagaaatgcagaatttgtatatttattttagttttttttagattaatgtttatatcattttgtttctttttaattttagtcaccattgtctacaataccaacatttgttcactcactcttagatttcatttttatattttttttattccactcactctcttacattcattcacagttttctaattttgttgtgtgagctcactttctattaaacactatattataagaagaacattttttaattttttaaaaataaggaagaagaagaggaatacacaaaaataaatgatttattaacacaacattaataaattaatttttgtttactatttgattaattcatcagctcagatccttaaaaaatatagttttccaaaaaaaataaaagttaatataagaccaataaaataaagatcacacaaagctcagatcgtcagcggaatatgtgcgttgcacacgtccggctccacctttcttagtagatccttctgagaccatcggcccaccaccaccaccgcatacgaaactgcattccacaccacaaatcttactaaaacacgagaaaagtccattacctccatctgtgtgacggcggttatgctttttcgtcgtcggagttttccgtcttgaactcattcctcccccggcagttgcagctggaacgctcgcgccatcgtaatcagtgctacttatatggcttgatcctatgtcgtacaacggtggaagctctgttcgccatctctcgagttttgatcgcaatccttcgatgctagattcatcgatgctccattcgctgagtattgaactttccgtttcgtgcgatctatctttcgccaatttgtcagccacttcagatggcgatggtcctaactccgattcagttaagattcgtcttccagctaaattcctcactggtgtaccaaaatcgtgatgagttctcatcggtgtagccatgtagtttgatcggatcggggttgatccgacgatgtttgatctcattggagtcgaaccaaccatgttagaccgcataggagttcgcattggagtcgatccaaccatgttgggatgcatcggtgacattgcgatgatgttggatctcataggagttgatccaactccgttagatctcatcggagtagatgcgataatgtttgatctcaatggtgttccgtgcttcgataagtacggggaagctcggccacgatcgtaatctttcactgatctttgtttctcgatccttgtcttcttcctcggtgtcttacctgtttgttgatacgaactatacggcataacatcatgtctctcccttctcgacactaccacatggtggttctccattggcgacggatttatgagatctgattcaatcgaattgtatcgttgccttggaactctaaggtttttactaggaggtgtatactcactcgattttttctcatcagaatctgtcgtggtgggaagagtttcagattcactgctcactattgcactcgctggttgtctattagctaaacgactccgttcagccctgctaagaagatccgaaacaaccatagaacttgtatcgctcttcgtacgacggagctcaggccttgagattacggattggtactgtcgagaagatggagattgtggattctttgagctccctttgttgctatttaaatgcaaatgttgtagatgatgatcttcttctccgagcaaatctctatatcccacagcagatgaatccatatgcgtataaagcggcatactccgcatagaaccatcaattaatccaacaccaatgttcaaaatcccctgaggtcgacctgaagtacgacgaacttgaagcgcaacaaatctcattcctggaggtggggtacgacgatattcattgttgctggttctgtatcctggacggcgattaggaggaatgaggttgctaatgaggacacgaactgttcctacatgaacatctctgaaccaatgcaaggcgtatatttcgataaccactgctgaagtatcagcgtagagaaattcttcgttgactctgaatacgaatttgtcgttccaagttgggtttgttccgccattatagtcgacacgggtggtaagtttacgttcggaatgaacccaagcaaccgcataagtctttgtcttgcgtgcgacgggagccaagtcctgagctgatattatgttaagttctagcaactgaaacgatgggaacatcatcgacattgtggatcaatagagtgattttacattaaaatctttttgttggattcgaggggacggagaattgcgagagggagaatgagatctctctcgcaattctcaattcaaaattctcaaaattctgagaagtgaatgatgaatgaagaagaaggtagattgtttgattggtggtggcaatttccgaaaggagggagaaaggtaataataaccattttgctaaatttggttttgtgtatgtgagaaagacaacgagtttattaggaggcgtgtgttgttcttcagctgaagattgctattttaggagacgttcgtgaggatcaagttagctttggtgaagaactctttccaatttcaacttacgtatgtgtccttttgattactgaattgttgtctggttttgcagaaataagaataacaaacaaggtgaataatttttaataccattaacatttagactttttgagtgtaaggattaagcaagtaacacgtgttagctcagtcttagaatagttcatgatccttcataataacaatatcttttatttttcttctcaaaatatataacttctaacacgataaagcctttcgtaattggtgttctgaaattctatgtgctggaatggaatttcaaaaccaaccccatagtccaaaatgaacgaaaccaaactgattattttgtggccatgttacacatccttgtcacatttattatgggcttcttttcatttgaatggaccaatgatttgacaagttgtcctctttttgtattattgacttgccccggtctagactcaaaaaacctcagttcatgtggaccttattgtccgcccaaaagaaaggtcaaaactcatgtggatatcccttctttctttatttaatcacgagtcacaaaactttttgttccttccaaatcgaacccaaactaattttttgaatatgtaagtacacaaatacttaaaccgaaattgaaatgttgatatacgttagaaaaattgtatgcttagtataaaaccgagactaattgatgatttcttgaacaaaagaacagattagtttttgcttcggagtgatgggtcaaatagacaaaacataaagttaaggaataatttgtaaacaatatgatactaaaagatcctttcctgagttttgccgtttctcaggaaatctaacagaaccccacttatcttgtttctctaactgggtcggtcacctaagaacctcaaaatcatcttcgtttggtcgttgtcttggggtcctccgaatcaagaacccacaaataacaatcgaggaatctgtgaacgacgacccaattgaacctaaagttgaagactttggacggatttagaaagaaagacccaaaaagatgctgaagagcgaggcatctctctcgatttactgcgactctggagatgggttcaaatccgaagatccggtgactggaatcgaggagaatttggagagaacggttacgattggtgatgctattgacggcggcgagttcagttttgcgaaacacaaggaagaagatagtggtgaaggtgagagaggtgtttttgaagaggttattaagaagcttgggattggtgtgagagatgaactaggttttgagattgaaagaccaccaagccctcctatgcatttagctgcagggttaggaattgataagtttgatttgtatggtagtgagatcaaattcgatttgccgggttacgatgataagaattgtggtgattactacaaaggaatgctcgaggagtatccattgcatcctttgcttctcaaaaactatgccaagttcttggaggtattgaattttgactcaaatcttagtgttgtgtaatggctctgttttgaagtagtttctattaatgtctaagtttcgtttgttaatgtgaaaacagtataaaggagatcttagtggagcagaagagtattatcataagtgtactgtagttgagcctagtgatggagtagctttagcaaactatggtagattagtaatgaagcttcaccaagatgaagctaaagccatgagctactttgaacgtgcagttcaagcatctcctgatgataggtctgttggaacattttttggaaataccaccattggttatcagttcctgtgataataatatgttttttcttttcagcattgttcttgcagcatatgctagtttcctctgggagataaacgcggatgatgatgatgaggatgatgatgaggatgatgatgagtcttctggacaaggaaaagacgaatttgaggtgggttttgtgtcgtagctctatagattatttggtttaaactctgcggatcaatgaatgactctaattgttacctgttattgttcgatctgacattgaaatttttaggcatcttagctcatagtagacatttactagcatataaattcaagtttgtattctgcctggtgttgttgttcattggcttttcaattcaagtctctaatgttggcgtttatttttgtccccgaaaaaggctgatgcagcgggaaaaggcaaatcaagcttgtccaagacagaagatggagaaacgctatgcagatacgcgaaggcgttctggagtattaataatgaccatgagaaggccttgttctactttgagaaggccgttgaagcctctccaaatgataggtataattagaaatatgtaatagctcttacacaatcttctttttgttttcgcactttaaaactgaaatgtgatcattatcaccttctgtgtttggccagcattattcttggagagtacgctcggttcttatgggaaatagatgaatgaccatcaagaagagaagaagatgtctatagctgaggtaaaaaatataagattcaatagctctcttcttcatgaaacaaaggtcttgttgtattagctttaaagcttcatgcatgtccgttatgtgttgtatattcagaaatgccagaatctcgtttttgttttttacgtttcttgcataataatccttaattttccaactatgtaatataaatgcttattgattcactcggacccaagttatctcacagagttataagtatgaatttgcacttatatgcttaatgatatagactatactactaaccaatttccttcttatttattgacactagacagtatataatataaaggataatagtccgatatagtcagagcattagtaaattggcaacatttatattagtggaaaattacctaagggtcagttggaatagttagtgtaattgattgagaaaaacaaaattcttttttgttcacattttttcatccaccacaaattcctaccttccaataatctgaactaatacaaagaagatataatataataacaattttcatgaaattttaaagtttggacttggaaattaatagcctcaaagagagaaaaattaaacttgtgcctatctcatgagggattggactccttttgttctcttcctctccatctttcaatagtctgccaaaaaaagatcccaaaaagatatcattgttatgacaattccaaataatcttccctttaatatattctacatcacatgtgcatgtgttttgtataatctatgcatgtaccttacatgtatgtaatcaaatactagatgcttatgtatgtaaactatatagtgaagaaaatggtaccgtcatgtttcttcctcatcaagtttttggcaaaaagcaagcaaatgacaagaaagccaacaccagctgctcctcctactattattgccaccgtcttccctgttgctcctgtccacattttcattcatttctttttggcatcaatattattaatttcaattgtacggcgttcataaataaagataaaatacatctattttactcaatttttctgaggatacttaaagtactgttgaagaaaattatgagtggtagaccatatctctgaagagtacttttcaatgaataagactttcattaataattcatttgttcttcttatgggtgaaacaatatttaatgaaagcataatgaataaagtgttgttattaaatgaccaacctatatggaatattgagaattccaaggaataattgtgttaccaattaaaataaaaagtacgcaaattttttttccgttaagactgaaaacggaagaacaaagtcccactatgaaatcttcaaattaaagtgacgctaagtttaaatcggaaactttccaaattcagaaaagattgatgctttttttttggtaaataaccccacatggacccagaaat

SEQ ID NO: 11 - DNA, 89713 bp, Arabidopsis thaliana
gaattccatttttatacagagtccaaaattcatactttataaaaaccctttccacatacattaccttaatctagtaggagacggaaacttgaagtcataggaaactaattaaaggggagagtcaaaagaaaaataacaaaaagccgaatccattttacttttttttgtttaatatgttgttgacgtgtaataaaaagtatttggaacggtcaaaccagtagaagagaaaagcgtcaaaatcacggaaaagaacataggtggtcatcagagcagaggatcactacctcgtaagctaacgtggcgtaatactgacgtctaaagatcacagctcttacgctgctccagtgaccagcgaatcgtaacctccgattctgtccctttttctaccggtgggtcccaaccactttacaaactgcgaagcataagatttcttgtgccagaagaattacattgttctgactattttacccttttacccctatctggatgatattttatttttatttagtaaaatcatatattttcattacaagaaaattgtatagtcagtaggtaattcagtattattctctggaaaaccgatggttaaaacttgaaaaagagccaagctgccaaggtctagctaggttcacaatgaaccgtcacattgaagatatcagaccagaccaagcaggggtaatattgtcatctcaggtacatcaaatttattatcttgtacacgaggagtattcatttttattttttaaaaacacggttaattaattttcttccttttcacacagagacatcggaggagaaaaaaaagggcaaaaacaaaaaacaaagatccgaaatttttcctctggaaatatctcagtgagtgtctgtgtaaaacaaaaaaaacaaggaagaaaatttactacatttctgtattatttagcattaaatggatctgttccaacgataattctctgtctgtgataaaagaaaaattgaattttttcttctatctatctacctctgttcttcctcgtcatttcttacccagaaaaatagaggataacaaaaatctgtttctttcgatgatcatcgtgacactttctctgtgatttttcctttcttctgttgttgttgatcatcgtgatcatcgtctttccttacatgcgaacccccatgtcagacactcagcatgtacagagctctttggtgtcgattcgatcttccgacaaaatcgaaggttaactttcttctaatctcgagagatccatttgatccggtctggtttttccgtaatgtgtttgaaagatcatactgagttttctagtttgatcatcgtttataactctcattgtgatttcagcaaatttttgtagcatttcggaattttgatctcttgatgagttttatttacgttttctgtttgctttttttatctagtgatcaagttttgagatttatgttgttgttgttatgatgatcttgtagatgcctttaggaagatgaaagtaaatgagaccggcgtggaggaactgaatccgtatccagatcgtcccggtgaaagagattgccaattctatttaagaactggtctctgtggctatggaagcagttgccgttacaatcatcctactcatcttccacaggtcagaaactaaacttcatttattttggctgagtcttacttaagttgcaattttggcctcatgggtttactgcttttaaacatcttaataggatgttgcttattacaaggaggagctccctgagagaattggacagccggattgtgaggtgcagtttcttgtatctctcactatctcaaatcttggttgttgtttggatgagtacattgtaaacagttaaaaagaaaacgagatttttgttcagaataaagctaaagtaagagaactgattctagtttgtaacttcacataagagaggtagcaagaatatacattgaaactgcagaagatattcctcatctggtttagtctttcctccaaatgttttccacaaacaactttttcttctacatgcaattttcgctgcagtattttctgaagacaggagcttgtaagtacggcccaacttgtaaatatcatcatccaaaggacaggaacggtgcacaacctgtaatgttcaatgttatcggtttacctatgcgtctggtaatttccatcgttgtagctaaattctttttctttagtcgaatgtggaagacttatttgaatttcttctccagggtgagaagccatgtccatattacctgcgaacgggaacttgcagattcggagttgcttgcaaattccaccatcctcaacctgataatggacattctactgcatatggaatgtctagctttcctgctgcagatttacgatatgctagtggtttaacaatgatgtctacatatggaactttgcctcgtccgcaagttccccagtcctatgtgccaatcctggtttcaccctctcaaggctttttacctcctcaaggctgggccccttacatggttagtctgaattgaagctgccaataacgtaaacctgttctttactgttgatatcacattttatgttgcaggctgcatctaactccatgtacaatgtgaagaatcaaccttattactccggtagtagtgcatccatggccatggctgtggcattgaaccgtggtttgtcagaaagttctgaccaaccagaatgtcggttttttatgaacaccgggacatgtaaatacggagacgattgcaaatacagccatcccggagtaaggatttcacaaccaccaccaagtcttataaacccttttgttcttccagcgagacctgtaagtctcttactaaactgaaagaagagctttggttacaaacaaatgtggtcttacaggtcactagtaaaacttttacaaagattttgaacatctaatgagctactgttttgatttttgctgtctagggacaaccagcttgtggtaacttcaggtcttatggattctgcaagtttggaccaaactgcaaattcgaccaccctatgctgccatatccgggcctgaccatggctacttctctgcctactccttttgcttcacctgttacaacccatcagaggatctcaccaacaccaaaccgctctgattcaaagtctctttctaatggtaaacctgatgtgaagaaagaaagctcagagactgagaaaccagacaatggagaagtgcaggatttgtctgaggatgcgtcatcaccatgatcatgattcttaaaaaccccaatgatctctctctgcccttttttgtggaagaggaggggaggtgaaaagtgtttctcttttctttttttttttggcttggagatggccatggctgaaaacaatataggatgaaaccagtgatgttgtcacaggtttctcttctgtttttgactctgttaataaattttaatcagacttatcagaggaaaaatagagtttgtgttgtgacactcactaagagctctttatgaatgacaactcgaacgtaaaattacatcttttgcttttgtcaagtgtttacatcagtaatatccccaatttcaagcttatttttttttttcaattttaaaactaaaaaggttccaaattttttttatcgatgagtcatatttcatttgaacattccaaaagtaaagaaaagagttgaaaactttcctcagcctattacaattgcctttagctgttaatgagttttagagattcgattagttttaaccaacagttcctgaataattggattttactctcttgttgagtttaattattccaatatttcttcatggtgctgttttgctattgctggtgataaacagttgatctaccgacgatttgcattcgacggtggtttcttcaccagaaatcgatatctccgatggcgaaggatgacgatgggaatcttttttggctcatcttacacgtgtattattacgtgtctttggatgatctttcttgatgcaatcttcttctgtaaacggtgtattattgggctcttcttgagcttgcttttgttcgcaatctgtttatgtgtgttgggctgtaattggccttgtagcaaacggtttattgaataaagtccactattgagaaaaaaaaaaaaaaaaactgaaaagggttgtttttaggcattttttgtcggagaaaaatctgggaagaagcttcgtcctttgcgtgacagggaatctctccgttggggttttgtggctgcctacgatttctgcaagcaaaaccacagaactcaatctaattaattagccgagtcgactcaatccgagtttctacagccgcacgagggaatcatgaatcggctgagaggccgaggtacaccgattctgggttccgcactcgtgcctcagctgaagaaaaaagccctaaattcattggtcgccgtccaggattcatatctatccaccaaggtgatcgaagaatttcaattcataccggtttctgaagaattgggattagtaaatgttttttgcatcaggatttttgttaaaatgtcaatctataatctgcttataatgggtttcgtttaatctcttaggacttgttcgagaggcacagggtcgtgtttacagttggaacttctatagcatctgttgctacggcttggattggtatgttacaattccatattttttgcttactttatcttcaattagagaatctttacctcttaccacgtattttgatgtttaagtttctgaattggattgctttgaaaggcgagcaatggctattagtgaagtgattcagattttgggtgttgattggcttcaattcatgagtgtttcattgggatagctttagctctcaggcttgatctctaggggtgaaatccattctgtgataaatttgaggcctttttccggatcagactatagattacggtttagttgatttgatctgccataagtttccaagtgtttggagatcatcttggtcagaattctgtgatgatgttcaataactaatctgtccaaaacttccaataactgaagtttagtactttgagatctctacatgatattctaggtcttttgttattctgctgggacataaaacaagttagaaactgaatttcttgtgtgatactagtgaccgttggaagaggtatctcattggtcttttgtttatgtttgtactgagtcaaatgagttttatgaccgtgttctaccgaatggatgaatgattgtgcaggttactcattacgacattacaatgaaactagaattaatcagaggctggagtccattgagaatgcggttagtgtgtccctcatttgccaaagtttattgcacatagtattgcatatttgctttaaatttagctgctttgcatagttggattcatatagctgctcttcttgcaaatgacttggtgcttcctcttatgatgtctagttattgatcctctatcatgaacttacagcgtagttgtctgaatttagtcctctttccgttaataatatagatttttttgctaatacttacgtggttgactattttacactttaaaatattcagtgttttgtttttgtaccttaatgatccttagttgctctattgtctcagtctgtcacttgaaatgtttgtttttttggtcatgccagatgaaaaacacccaagagttagaacgaggagaactgaagaagctcgttgatccagtcggttccaggttcactacaacaattgccacagcgggaaccactttgatcctcgggtttgtttccggaaagactgttataggttgacaagttagatactgtgtgtcgggtttctcattaatagtttccgtctgtttttcttcaggtatgggttgggttggcgaggcgggatatggtatgcaaataggaagtttagaagggagcaaatgagattggccgggcagttaaaaccgagagaatggaagttactagggaggataaaacctcgagcttggccaacaacaaagtttctcagacgaccattcccaagacagaacaaaacaacagaaaatgctttgaaggcaccagaatgtggaggttgaaaaattgaagaacaatctaaagaagtagctgatcggaacataaaagtgcacatgggttttgtcttgaagccaaaggctcttctgtctttttattcctttatgaggaaattgagataacctaattcgaaaatcaaatagatttgtgttataaattgactctagtagtgtggactatgaaatgtgattcagctaatctttatatcgagatcaaaatttaaggattcctctgttttcgcacataaaaaagaaaaagaaaaaggattcctctgtttatgaacaagataaccaaaaaacatggccaagtagatgagaggagagtgtgctgacgtgtgacaatatcattggtgcgtacacgtaagtccacgtagacaatgtttttagttcgtgtcctaaagagtcacttttttgtgttttggtggagaagaaagagagggaagaaactatggaaagaaaaatgtacaaatcaacggtgttcccaatttgctgtctgttgtttgccttgttcgatcgcggtaatgctctctatggatcttcgtcgcctgtgcttcaactcactccttctaatttcaagtctaaggtatgtccgtgaccgtgatttatatgatcttctctttattcgtttagcagtgtatagcttcggcttaagtgttatatataattttaattacgtatgtagtgatacgtaatgtgttaatttcgtttaatgttctccttggaaatggttggcaggttcttaattcaaatggagtcgttttggtagagttctttgcgccatggtgcggtcattgtcaatctctaacaccaacttgggagaaagttgccagtactttgaaaggtattgctactgtggcagccattgatgctgacgctcacaagtctgtctctcaggtttgtgttattttgagttatcttttgttctttttgtcaatgtgattgtgattgatgaaaagtttctgcatccttgtgatgataaagaagaatgttgtctccctctactaggattatggtgtgaggggtttcccaaccattaaagtattcgttcccgggaagcctccaattgattaccaaggagcaagggatgccaaatccatttctcaatttgctatcaagcaggtttgtccatatcctctcactaattcttgattacatttttgttattgggaccttatcattttttggcttcacagataaaggcactgttaaaggatcgtttggatggtaaaacaagtggcacaaaaaatggaggaggatccagtgagaagaagaaatctgagcctagtgcctctgtcgaactaaactctagcaactttgatgagttggtcactgaaagcaaagaactttggattgtggagttttttgcaccttggtaagtagtgcatattagtaaactcttgaaatgttcaagcctttaatcttcttcttcccgatatttgaaactggaaaccattttttgctatttatcctcccaaggtgtggacactgcaaaaagctagctcctgagtggaaaaaggctgctaacaatttgaaggggaaggtcaaactaggtcatgtcaattgtgatgctgagcaggtaatcactagatttacgactttagcattagtgattcctataacttttagctatttgctctaaagcatgtattgagatcagctattacattttctgcctcttatgatcaaatcaaatgcttcttttcatattggtcttgatgagacctgacaaggtcttgtatattgcagtcgataaagagcagattcaaagtgcaaggattccccactatcttggtctttggttcagacaaaagtagcccagtaccttatgagggtgctagatctgcatcagctatcgaatcttttgctctggaacagctagaatccaatgctggtcctgctgaagtaactgaactaactgggccggtactgttctgttccctaacattgttttctacttgtatccaacgcaagccattgaccctatttgttctgtcctgattggataggatgtcatggaagataagtgtggttctgctgctatttgttttgtttctttcttacctgacattttggactcaaaagctgaaggaaggaacaagtatctagagatgttattatcagttgcagacaagtttaagaaagacccttacgggtgagcttagaacacatctcttccctctttgttactatcatcatattccagctgcgagttactctgtttttgcagaaactagacaaatactcgaattttgattgtgtgttgcagctttgtgtgggtggctgctgggaagcaacctgatttggagaagcgtgttggtgttggaggatatggttatccagcaatggtagccttaaacgcaaagaaaggagcttatgctccacttaaaagcggttttgaggttaaacacctcaagtaagtgcaccttttgtctttctctctgtcctatatgacgaaaccaatggtccatgcatcttattagctcaacgggtatttttcttatttgtgttatcagagatttcgttaaggaggctgcgaaaggaggaaaagggaatttgcctatagacggaactatggagatagtgaagacagaagcttgggatggtaaagatggagaggtggttgatgcagatgaattctcacttgaagacctcatgggaaatgatgatgaagcctccactgagtccaaggacgacttgtgaacttctcttttacctcattgataagggttttggtttcttgaaagacttaaagtgtcccactcaaggacaatgatatcatttcaaagagttagaacagagtatacacttttagattccatatacagaatttggtgaatttttcgacttttatatgaagttgaacaagctggctaacagtctaaccacttgaccaactaattcgtcgacatattatttaccatagcctattttcataccacagtaattacaaagactattttatttcagacagaaatatcattcacagattagtcaacattaagtacaaaagtattatacaaagctttgttcgttttggtcgctgagtctggtccaaatgccaaaccagtagcgacacttacaaccaccaattgtaaactacaacgagttaggtttccaagtcgtagatcgtggtagcttcaaagccattgaggctgttgggacgaatccaagtaggcgacatcgctgcaaactgtgatttcagattctgagcagatgatttccgcattctgaagtgtgaatccgtgcattatgggcaacgggaatcccttttctaggtggtcatttgcatatggcacaaacactgtttgtataacagtccacactattggctagaagatcggaacaagataaagaaacacgtgtgaatgctaagaatgaaagaaacaaacatgcgagtgctttaaacacttgacatgatggttttacctgaagaagatgcagatggagatttccaatgttgctccatttcaaagacatggagaaatcttctaaacttacgctgcctccaaggttattgcccatgactctgagagcaccagatccccggatcatctgcagccaaggaaacagtgaatcatctattggtaaaccgacatcactgcaaatttgcttatagtaagtaactaaaacaaaagatatggagcattgtcattggaggactcaccaaggagatgcaagctacaggtattacttggtttgcatctagaacattgattactaggtctgcattaacattagctccaacgtattgctctgatatctttacaagcggaggtgaggacaaactgatgttcagattcatatcctggttcgggtatttcttgtatagttgtggaatgatgaacctccacctagcagtgtttaaaagagactgctctggtattttatccacaacccattgcacaaagtctgcctgaatatggcaagagtgaacatcctcatattagaaacaacggtggaaaacagtaatattgatgtatcggaaacatatagaacagttttatcaagagcattctttctagttggaacctaaggaattaggaaattaggaacttacattatagtacaaagctgcagcagagttaaaaacagcttcgtcaactgaaattccgagcattttagaatttccagggcagataactaaagatacagactttttgaagaaggattttaagacttgatttgtttctcctttggtgaacaagccatcaatctcaaaagtgatagatgaatttctcaatataggatcactggtgaaagtgacattaaggtcagcattatcatccactgggatttcctttggaaggctttgtaggaatgaatcaaggtctgatactccttccgtgagtttcttggcaatggtactttccacacttgacccaatttggtctttaaatgcattaaccatcctgaattgcagagaagagaatgaagtttaaaatgaaaaacaaaccaacacctgtcttgcaataagagggagtggatctatcatcaataagcaaattatttcgtacccctgataaaaccatgatgctcctccttccaactcaatggtaatgtcttccacatggcatccacattccgaaagagaaagttttaagcctccttcatcacttttcaagcctagagagagcccgatttccatgccttgaaccttaccgagaaggcgagaatcagcactcatcaaattccctttgtaaaacagatataaaaatgagcagatcacagcaacaactaaaaccaacacatggaaatggtaaacagagagcaacagtcacctctgattcccatatgcaactatgttctaagacatataacaatcacgaaacataaggatacaaaacagaacagaaatttgtgattcgcaagaaaaatcttgtctttccattgattcacaagattgagatgatcaaaactaagaattagtaaaattgatcataattacctgaacagatgcaataccctgatcagatatttcaataggaggaagccaagtactgtaagaataatgccaattcatactcaaattacaagtcgtccctgaagcgacgatgacaacacctgtctcaccaagcttaacataagatgacgcaacgtcaagctcgtatatcgtgagattcgagacaacaacatcgattcctccaaggaacgggattttcatagatttctcaattctgggaatctggagaggtataatcgacgcgatagctttgttaactagaagatttttgacgaaatcgagtccgttttgagatacgagaaccgatgtgaatgaatcggtgctctgcgtttgtgaaggcaagaagaagaaacttggtaatagaagaaagagaaagcatcgtccaacatccatggcggatattcaaagctttttttgttttggtctctctatcttcttcgatgaagaaaacaggttaatacagtgaagttgcgtaatggtttggattattgagaaatgtctaaaataaccttagtcattcgatttgcattgccttctggggtaatctgattcaaaaggaagtgtttggggtgaatacataaattgttaaaatattaatgtttctggtcaatcaaagctaaagctgaggtctatagggcaataaaagtataaatacatatgtaattgtatatactgtacatattaacgtttgatatgtatataagctcaagtggtgttaaatattctaatatgtgtctaaggacaatagttcgattaaaattggaagcttcgggggtaagaacataagttttgaaaagtatttatctttgtggtaaatcaaagctaaaattgaggtctaaagggcaaaagggtgtcataattggtctctcgcggtggcttggcgacacggaacagagaattaatcgagaatctttttcagcttgtaaccggaattcatggcgatgcaagccggtgttcagacctctaaggtccttatcctactcggcgcaggtctctttctcactttgatgcttgttttattatctttgcttgttgtaatcaaattcgattcgtattgctttgactctctaatctagggaattgttttatgaagagttagggtttgaatttatcttggcaaattgattgatcactttgctaaaatggtccagaacttctaatcttcaatcgttagtgtagttttgatggtaatacagcttggatgtagcaagaatgatttagttattctagcttggatgttccatttaatgacctttaatgacacttggttctgttttcatcatgtccaaggtgtatctggttcgatcgtattgagacatgggaggttgtctgacctaatagcccaacttcaagacttactcaatggtgctcaaggagttgaaagcactccttttaagtatgacggtgcactccttgctgctcaggtatttcattttcttttgctctgtaagcttatttttctcatcgatccaacataaacaatcggaatagaaaataattcatcactctttatcactaggccaatactggactcccctcttagtgacataatttttgttgtctcttgataaccagattcgacagcttgcaaacgagatcaaagaactaactatgaccaatccagttaccatctttaatggagattcaaactccagtggtatgtacaagtcttagtttctcataaaatatttatgtactacttttgataatgtaggaaatgtttcaaatatgtttattttttatgagaaacagagaatgatataatctttgcttttgctcttgtaggctatgcatcttacctggttccagcggctgccgttggagctatggggtactgctacatgtggtggaaggtgtttatctctttaaaatctgtctatttttctctatgtttcatgtgtcttttgttatagttttgtaacatgtggtttaccggtaaactatatatcattgacttctaaggtttacccacattgcagggctggtcgttttcagatgcaatgtttgtgacaaagaaaaatatggctgatgcggttgcctctgtttcgaaacaactagacgatttgtcagacacattagcggtgaacaaataatttttttgagaccttcctctgttatatattctatttcattatgattttttgacctagtgcatttgtttacgcagtcaacaaggaaacatctttctcagaagctagcgaccttggattggaaggtggaagagcagaatgagacatctaaaatgatcttaagtgatgtaaggaacccgttttatttctcactttcttgtattgatgccttattttttccttagacttaagattaggatacttatacattcgtctgagagagatctcctcttgtacatttaacatcttagaagaatttaaaacacatttaggaattccaaaagattgtagagtatttatttattaacgtcctatctctttggccctgaactgtttttcttcacatgtacagtagagtcctttgtttctttcaaattacagcttgattctcatatctgcgatttactccatctatgcctttctttgatattcattttaatgctaatgctcacatggaatcttgcttcaattcaggttactgagatgagatcaagcatttcgcaaattgggtttgattttaagcaacttaatgaaatgatttctggaatagtaagtctcatcattgccctctaatatgcatcattgccctctaatatgcatattttaaaggggctaatatatctttactctcttatatgaaatttttacaggaagggaagattgaaagtcttgaaagcaaacaagtaatttgtctacaaccattagatactacaaaccacttcacgctatcaattttcttaaaactaattgatctcaaacagatattttttttgttaaaattttaggatgtgaccctctctggactatggcatctatgtcaagttgcaggcgttaaagacagcacaagtactaaagtatttcaggtgagtgttaacttacaaattaagtgaaacgttttcttacttatttttcacgtagttataggccttaatgaaaaaaatcttgtttctggctttgtggtttaggatgttggtgagagattacctattgatggaaaaccatccactaatacttctctctctgtaagaatgctactatacctttttccatcatataaatgtgcatttccattctgttgacgcaaaaaagttgcttatagtgaaaaaattcaacgagatggttgatcttgaatttgcatatattcaaggcaatctctcatcaagcttattcgaataaaaattggaacctgaaaatacttgtggtagtagctgttatttgatgatttcatgtcatgatgtttctttggctttctaaaactataaaactatggaaactccagggtctgcggtttctgacggaaggcaaagaggatgcaaatgtaatacacaagccggttatggcgaaagaaattatggtgatgggggaaaaaacaaaagtcactgcagcgggaagaagcagagttcatagagcgtttccaggtggaatatcttgggtacgggatgtttcaggactatcctaatattattttggttgatatacaaagaaattgcttgtattcgtcccaaattctgatactgggactggcaattattttttcatgtaaaaagaagaaaaatctacatatgttattgcatccaccaacaatttggtttgcccctaattatatttggtcttgatgtttgtaaagaaagagtgtgattaaggctttcacgtatgttgatgtcttcattgatttggacttttgtgctcctttttccttttgtgtttggatcaattttgtttgtgtagaaaatagaaagaactaccacagaagacagaactactgtcttgaaacatttgtttcgtcctttctcgtaggattaattgtctttagttggcagagaaataaaatatttcgctcttattgggccttggcccaaaatagatatagagacagcccaaatttaatttaacccgaaatagtccaaccgggtgaatttgacagcaattaaaaaacccggcccggcttcttatattaacaagaggcttggcatcggttaatcggagcttctttcctctcaagtgaagtgtctggatcttcgtcgctcaacgcaaatccctctccggttcatgtaaatttccaacttatttttgtgctcgaattttggttaacgggacaaatttcacacttttacggagtatggaagcagcctttgtcttctgggctgttgaattgcgattcattgtgtatgcccaacaatggtttaattgggaggttccaatgattttttgtgcttttttcttacttaatataaccactgttgatgtttcttctgtgtccttgtatcgccacagtggataagcagcctggggaagatgagcattgtacctaaggaaacggttgaggtaatagctcaaagtattgggattaccaacttgttacctgaagctgctcttatgcttgctcctgatgttgagtatcgtgtccgagagatcatgcaggttaccttctttttctaatcatgtctttgtgttcttgaggtgagttttctggtatcagcatattgatctttctgtaccttctctttggatgtcctttcaggaagctatcaaatgcatgcgtcactcaaagagaacgactttaacagcttcggatgtagatggtgctctcaacttaaggaacgttgaggtacaaactcgatgacctatttcttacttcccattatctagagttttggttgtgtaagcttcctggtttttgtagttgagtgacaaagatatatggtttctagttttgaggtttggctttactggtgcatatgaataacaccatctgttacacattgctttcacatatttcactattgtagtcaactgaatcaaaggcatctttttgagagtgattatatctattgcagccgatatatggatttgcctcaggagggccatttcgttttagaaaagctattggacatcgcgatttgttctacactgatgacagagaagtggatttcaaagatgtaagatgttggaaaagctggcatgttttttttgtttcagttaaattcttcattttgggttccttatgttttcaagaaatgtcatgattctaggtgatcgaagccccgctgccaaaagctccccttgatactgaaattgtttgtcactggctggctattgaaggagtgcaaccagctataccagaaaatgctcctttagaaggtttgtctctcaatcttatgccctgggctagagttgtaaagtcattatatgaatttttcaacatgaaacaaatattagtatgtacaatgacgtttcagaggtgtataaacctctttctacagttaccccgtgttaagtggtgagcttactgatgttactgaaagatcaaaatacatattttcagatccatctgtattattgttttgcggatccgcatgagcaagaaatccttgttctttcctatcttgactatatttttcacttgtttgtgttgtctctagtcattagagcacctgcagaaaccaaaatccatgaacaaaaagacggacctcttattgacgttaggctaccagtgaagcatgtactatctagggaacttcaggtatatggtgcagtctaaatatcatagggtaatatccttacatacataggacttatctgttgttctctcttcacagttatacttccaaaagattgctgaacttgcaatgagcaagtcaaatcctcctctgtataaagaagcattagtgagcttggcctcagactcaggacttcatcctctagttccatattttacaaatttcattgctgatgaggtaacattatgcaccaccgaggaactagtgtgaaccaataagacccacgttaagtttttgcagttttaattttctccacttgtgcaggtttcaaatggcttaaatgacttccgactcctgtttaatctaatgcacattgttagaagtcttctacagaatcctcacatacacatagaaccttatgtaagttttctctggattatcttttgccactatctaaaaaattgtagaatcatgtagctccattttctttaggcttctgatttgggtttcttcaagttctatattagacatattctatataatgggtatcaaatggttagtggtagtgtttgtccgaggtctgcaagctcgagtgcttaagtactctcagtctgcttgaaataacaacaagttttgcctttgatctgtattgagattatgtaaaccagccttgggataatgagttggttgtttgagcaatgtttcataaccatgaagctgagtgaactttttcttttggtgccagctgcaccagttgatgccatctgttgtaacatgccttgtatcaagaaagcttggaaatagatttgctgacaaccactgggaactcagagattttgcggcaaatctggtttcactgatatgtaaaaggttcattatttccctttcatgtcatgaactctgtgtttgttttggttgattgtggggatctatacatgatttcttactggagctaataatgaaattctataaggaaatatcatgagatgattatccatagatgttctgctaagtttatcttgtttgatctctttactattgatatctacttcttttttgctcgagctgaaaaacaaatggttagatctatattaacaacaattagtaataacttgctatagtcttcttcattatttaaaagggtacattgtctcgcacttttattttacatatctcacctttatattcttttagcatctgaaatcctgtgattttaataaaatcttgcaggtatggaaccgtttatataactcttcagtctcgtcttaccagaactttagtcaatgcactgctggacccaaagaaggctttgactcagcactatggtgcgattcaaggattagcagctttggggcacactgttgtaagtcattccttgacctttcagaaagtttgtgcatgctatttcagatatcaccgagaaataatgttacccagcttgtccttcaatctagggacttttcagaatctgagatacaatttgatttgcccataccatttttccgggtttgcttattcattttattgggaaattaggacttttatcgtcttaaacggctactccagtgaatcagatacccctgctaccaaaaactttagcacagctatcctgcattgttatctgttgtcatctgaatgtcatatattgtgtaggtacgccttcttattctatcaaatctcgaaccatatctaagtcttctcgaacctgaattgaatgctgagaagcaaaaaaatcagatgaagatctacgaagcttggcgtgtatatggagccttgctggttagtaaacacatccttgtaaaatttcatctttgtagaattctcagtggacaatccttagatggacttgccccctttttcttttcagcgtgctgcaggcttgtgtatacatggccggcttaaaatcttcccacctttaccatctccgtcaccaagttttctccataagggaaagggaaagggaaagataatcagtactgatccccacaagcggaagctgagtgtagattcttcagaaaaccaatcaccgcagaaaagattgataaccatggatgggccagatggtgtacattcacaagatcaatctggctcagctccaatgcaagtagataatccagtggaaaatgacaatccgccacaaaactctgttcagccatcctcatcagaacaagcctctgatgctaacgaatctgaaagcagaaatggaaaggtgaaagaaagcggcaggagtcgggctattaccatgaaagcaatccttgatcagatatggaaagatgatcttgattccggacggctattggtgaaactgcacgaactctatggtgataggattcttccctttatcccttctacagagatgtcagtattcctctaaccaataagaggtgagctattctattccccaacttcctgatatttacctcatcgatataaaactcatggttccagtcgtgaatgcaataaatatgtgaaatcaaaagaataatgatactcaatacattaatgctaatgaaatagatgtttgatgattttcaagcagagaaggaggcttggagagattaaagcgccgtctggttggcatacataaactcatttagatccgtgccattgttctcaggtcaactctttagttcttctttttaagcttgagggatttcaaagtccttaggagcctgcagagtgggttgagttgaattgaaccggttgcaatgtatatattaagagaattttaatgattccgtagtggacttatttgtttactctcaaatgtaatccatgaaataatttctcttcaaatctgtatgatctagattgcaatttttgatattgttgtttacatgtatgctctcttgcttatttactctttacatataatatccgttcatagattatatctattgttgatccttctggtccgttgctagaaaacttttgggcaaactacaaggtttggtctgtattacattgactataaagaagatctgaaagacaacaagattaatttatgaggatctataggaggataagactgaacaaaagtttcggagacattcttaagttaactatcttgtatgtaaacaatcaagtttgctacaaaccacagaacagcctagtaatctggtttactacaaaagaaatacctgttgatcaaagcccagaccgaaaacttatgaccatcagtgctgtggcttattgcattccagtaaaagctttggctattaccaagtatagctaatgtgctcgaacaagagagcttcaggcatgaacataatcctcaaaaatgtttcacagagagtaattcctttttgccagaacaagactatgaccatcattcgacgatttccccttcttctaaatctagtccatcagcgatgaaatcagtatctaaattttggagattgcaattatcatccgaatccaacccctttgcaaattcacattcaaagttgaaatagtcacctgggttcatctccgcaaaaagatctgagtatgtgtctattaacccttgctcaaattcaagctccatgttaccggcatcttcttgttctgtggtatcaacctgaggatttgagttgttggtaccaacgccctctgccttgcttttctctgagactcgcagacacgggttatagttcatttgtttcataagaccaagaacctctggctcaaaggagtcaatgtcgtcttcttctatttcttcttctcggaaggttataccatttgtgcatccatgaccatcgtataacgaatcattaggattaggtgtcgtgttaaagtctttgataactttaaattcatagctctgtgaaggtagatatacatggatcaccgggtactctaatataacaactttggcaagctgtttcctcaaaggagctttgatgtccagctccttgaaaggagcctttgcaccctgtgagcaaggaaaaaaaggttaatattttgttagacatggcaaaatatacaaagacgggaataatagtgtgagaataaaagcaaacctttgggtattggcgtataaaaagtttgagagaatcaagatccacatcacaaaaaggcttgagcttgtgaatccaggggccaggcttgagatgattctttatcactgagcataggtttctatcttcaccaactctgggatggattttttcagtatcaatagagacagatgaaagaacaaaaccacatgtctcaataaacaaatatgattttcagccctagagagtaatactaacccatggtcaacaagaatgacatctgtagagtgaaaccgccactctattgtccacgagatacacttgctcctaaagcaaaaatccatcaacagcaaaagaagactagtcagaaagtaaggcaatagccgcacttcagttaaagcatctttctttacagagcagatcaaagatcaagtatattttgctagaaattgtatgcaatcataaaagctcagacttggaataaaaagagattacctattatcgtatctggactgattattttccctctttaacattccactagggagataccatagcttagttctgcggctataagcagcactttgaaggctcttaagaagatagggtaacttataagaataatgatttttgcataattgacttctccttctcagagcagactcggctactctttttgtttcctcaagcatattgtagtctaacatgcaagcacaaaaaaagaagagatatttccatcaatcaaacatagaagaatcaaatacaaacaaacactttaaaggtgaaaacttttgaaaatcacgaaacgaaaaaacagattcacataaaacccagattagaattataccagagaggaggagattgtcgtcgaacttggagaggggaacgacgtcggtgaacttcctttttccggtacaacctgttcgctgcttgtgggctttcacacagggaagggcacacgatcgaattgaacatccgggacatttgtacttccatggattttgtttgcactcttcgcagaccgaatctttcatattttgtccggaatcaacaacatacgttaaggttttggaggagggcgagctcaaggtttatgaaactagagttgtgtcaaaattagggtttaaaaaaggaaatttggatttacattttagtccacctaattatatttctttcccaaaatacacccccaaaaatgttcgattatatttttggtttcatagccaatccatgttcaaaagtttgtaactttgacggctgcgttcatgaaacgttgattacaaacataattgtcattcaagaagagtcattgtaacaacaaaacaaggacctaattaacaaaaaaaaaaaaaaagaggagtcataacgatccaatgttgtttcttcttagtcgtacggaatctggatataggcagcatcacagacaaacgggatgtctgcgtacatacccgcaagtgcacaccgtatgctttcaaggacggtaaacagataagcaaacgcaacagcagtccagaaatgcatcccaaacttaccccaatagactccaagaggcatccacttgctaacggtccctataacctggagtgcgatttcaagcagcatacccatcactacatggaacctgaagaagtgaggccattcttttcttcgcactatccctagataagctacaaaaaagtaagccatgaggaaccagcttggtaatcttcctatggcgcctagaaatgggtaggttaagaattcaaaatcttctaggaatgggtggagatggtaagcggtttctgcatacatccaagtttcatgcagtggcattaggtaaggcaggcaagccaaagttctccaccaccattgtggcttcttggtcatcgggggaaatcggaagctagaaggtacatcttttgacgctcgtggagtcaaaagagtttttctgcggacaggtaacacaggtaatgtaccagatagactaccttgttctccattcagaagcagagaagacgaggctgagagatatgacagaggcacacctaaaacaatcaaagtatacaagattgaattaggaaacaaaagcagcacctttgaaataccaaagtcacttatcctagtttcagcccatggacaggtcttttaatattcacatcatataaactcattggagcaatttacagatataagcagggatatatgataataagtgtttgaaaccatatgagtagaagaaattcacatgcctcttgacactctcggaagctcattgaaaggtgaaggtggtgatccccacgagttctttacgacaggcaatgaacttcgagcaagataatgttgagtctgtcctgctgcagctctatatgatgatgacttgaatgcccgagagctcattagaacatgtgcacttggcgtgctgtatccagttatcatccttaccaactaaaatgcctataccaaaacaaacgaaacatgggaaatcgaatttgaacagacgactgtagaaacaaaatctcatccgataaatttcaattcccataaacatatttcggtaccctaaaccagagattgctcaagaccagctagaacattgcaaacctacccaagcgcttcgactaattagaacccataaatcaaacaaaatcgattcttttcataaatccatgagataatttagagagaagaagaagttacgaaccttcacaaacaaggaatggtataatcgaagctggaggtaaaagaagaagagtagggtttatggagcattcatctgtacttcatcatctgaatcctatccttcttcactcccccaataaagaaaaatggcgattactctctctttctctcccgtgtttaaattgacactaataccctcaggcccagatcggcccaaaacctgaaaacctccctatgagtaagagggttcgcgcattattaaaccgtgaccaaatttgaaacttttttttttctttttactgtttccccaaaaattcttttgaaaatcgaatcgacaaattccttccgccgtcggaatgtcaattcccgatcccaactcctccgcatctctaacggtgtctccgtctctatccaccgcatcggaaactccggtaacaccagtaaacactgttagaccaccgccgtctcagccacctcctgctccgccgccactaccgccgccgacttacagacccatagctccgcttcgccaccctaatccgttccaacaacaatctgcttatagtaataacctctacgcacattcgattccggtcagacgccaaattcaagatccgtcagctgttctttacccgtttgctctaccgggtcgagggttttcagcccgacctgttcgaggattcgtcgcagatccttccgtgacggctggtaatctgagtgggtaccctcctcgcccgagttttacttacgatcctggaccatatgagcagcgtcaaatggaatccttgttgcagcagtttataagggagagaaatcctcagattcgtccattaccacgccttggattgggttctcctgttgggttgggtcccattagagcaagtcctcaatttctgcaaccgcgggtgaggtttcttagatgaagtcctcaatttctgcttgtcatgtttcatttgttaatgcttagattctagctaagtagtggaaagattagtggggaaaatgctcgagatgatccaaagtttcttgattggagtcttagtagaactgaatctgactgtaccgtgacttaagaatcatcttggttaatattggatccatttttgtcagagtgattctcattcgaactaatgcatgtagttctagaattttgatcgactagtctagttatacaacaatgtgagttgttggacgtgtctttcatggttttcttataaaccatgtgatagttagtaattggatctagttatctttctattttggttctttgtcctgctatgtgcctgctttactctggtcttgaaaattctcttttgtggaatgaggaagacttgaaaatgcttttatatcttagcaaatgttaagctgttcttctcttaatagttggtttgcacctacttacttttgattattgctcttgctccagtcacattttctcattttcgtaaattttggtacttaggttgccccgcccccaacttcaattctagacactagcaggaatagaaaggccaggtgaacatcaaatttctctactttgatattacctttcttttggtttcactgaaaatattattttaaaaaaaacttgttcaagagacttagttgccttgctgtttcttcttccttgttattagaagcaaggatggggctcttgccgttgttagagggagaaaggtaagcctactatcatatgtactgcttgtttgagaatttggaaaagacatctgttaagtttagattgtaatactattcaactgtttacaggtccgaatcactgaggggtcttcttctctttattcacttggtcgatcgtggttgaaaaatggtgctcacgttggaattcaggttcgcactttatatgctgctgttagagtaggatgttagtgtcattgacgactccgcttgataaaagattcatcggttgtattttcaagatattggtttgtggggttttgattcagaaaacctctcagaatgccaaatttactcgaatttggaaactaaattacttttgatcactcacctatttgcatccgtgctagttagaggattctttcttgatatagttatatttttagaagccaatcttagttaaatgatcttcaattgcatactcaaagcttgttatctgctttgcaatggaaatgtgcatctgcaatctcttgagcgtaaccatatatctgggactaatctaactttcagtttctctgttgacagccgcaaaggagtggtataatgaaacctttgccaaaaccgttacctgtggatttaacaacagagacaagtgtaccagatgatccagatgaagaatcagcggatgaagacaaagaggtttgtgttaagtcttcaagaaccattgattctatctgagcagaacagaagacattagtctgattctttcctgctgttgctaatttcagctcttgaatatttactacatgacgtttgattccactcttttctttgatgatctcaggacgaggaagctgtaaagcaattatctgagaaggatcttttgaaaagacacatcgagcgagctaagaaagtccgtgcacagtaagctccccactattctctctttttgctccttaggtcgtgtagtatttgaaagataaagctccccacaagattcatggattagttttcataatcatcaaagcaaatctagcagaatattttggtaacttgaaaaagcggatttctttctctttcagattacgagaagaacggtcgaggaggatcaggaggtacaaagaaagaataactcttattctggcacaatccgaagaccgatgatgcttgaagaacgactaaaaaagggtaaagttttgttaggaattagcttcatatgactgttgttgatttagcatactagtaccacgtaacaacatacgtgtagtaatagtataggtgtgttcttcttcgtcttctatagattagtaggactactcaatgaatagtgtttcattcttcctaaaactaaagaggaagataaaattgtttccttaaagtcagcttttactaatttgacaataaaaatttcttctcttacacatgtgtcaatcagcgaagtggtaataaataaactttactgtcattcgactaattgtaactttataaacaagatttgagaaaaattgagattttgtagtaaataggtggaagtctctaattggattagaggcttttcgagagagaatcgcatagggaagcggacagagaagataacaaacgctcatatttaaactctctttccgttacatttgccacgtaattacaacaaacacgtgtcatcgccgctaagaactaatttttgtcattgctccacacatgcaactactaaactaccgatgatctctctcgctcacgtttaatccgccatttctgtaaaatcctcttcccttttctgaagtaaactttttcccgcaatcaactcttgctttctatttttctcgattgtttacacttttcattttcagctctctgtttctttctttcacactaaccccaattctagtttcttactctccaagaaacaaagagcaccgatctcagttttctcgagaaacagaggacaaactcagaatggcggggaacgagtggataaatgggtatttggaggcgattcttgacagccaagctcaggggattgaagaaacgcagcagaaaccacaagcttctgtgaatctgagagaaggtgatggacaatatttcaatccgactaaatacttcgttgaggaagttgtgactggtgtcgatgaaaccgatcttcaccggacttggctcaaagttgtagccactcgcaattctcgtgaacgtaactctcggttggagaatatgtgttggagaatctggcatctcactcgcaagaagaagcaggtccttcatatttactaatttttggtcgatcaatttgctacagtgaaatgtattcgaattttgattttgtttatggaatctacagttggaatgggaggattctcagcgaatagcgaataggagattggaaagagaacagggaagaagagatgcgacagaggatttgtctgaagatttatcagaaggagagaaaggtgatggtcttggagaaattgttcaaccggagacacctcgaagacaattgcaacgcaatttatccaatctcgaaatctggtctgatgataagaaggagaatcgtctttacgttgtcctcatcaggtattttctctcttgcttccattgattcttctgtatgttaggtcaacataaagagtgagtgtatttttttcagtttgcatgggttggttcgtggagaaaacatggagcttggtagcgattccgatactggtggacaggtacattgtgttccaagtatttaataagcttgaatccggtatctagggttgttttaacttgttttatttgtgaatttttaggtgaaatatgttgtggagctagctcgagctttagcgagaatgcctggtgtgtaccgagttgatctgtttactcgccagatatgctcatcagaagttgattggagctatgcagagccaacggagatgctaaccactgctgaagattgtgatggcgatgaaaccggggaaagcagcggagcatatatcattaggataccgtttggtccacgggataagtacttaaacaaagagattctctggccgtttgtccaagagtttgttgatggagctttagctcacattctaaacatgtcaaaagttttgggagagcagattgggaaggggaagcctgtgtggccatatgtgattcatggacattacgcggatgcaggggatagtgccgctctgctttctggtgcgttgaacgttcctatggtcctgacgggtcattctctaggaagaaacaagcttgagcagcttttgaaacaagggaggcaatcaaaggaggatataaattccacatataagatcaagaggaggatcgaggccgaggagctatctctggatgctgcagagcttgttataacaagcacgaggcaggagattgatgaacagtggggactttatgatgggttcgatgtaaaactcgagaaagtcttgagagctcgtgctagacgcggtgttaattgccacggaaggttcatgccaagaatggcggtaagtacacagataactagccaggttggaaaagttataattatgaagtaagattgagtgagttagtgagtctgttgtccaggttattcctccggggatggatttcacaaacgttgaggttcaagaagatacacctgagggtgatggagatttagcttccttagtaggaggaaccgagggatcttctcctaaagcggttccaactatctggtctgaagtgagttttcctaggcagcttcattaacttctttcgaggtttgtattttagattgtgtttgatgtttcgttgcgtatatttggcaggttatgaggttttttacaaatcctcacaaacctatgatcttggcattatctagaccagacccaaagaagaacataaccactcttctgaaagcctttggcgaatgtcggcctctacgggagctagctaatctcgtaactgttaaatagctgtatttattccagagcatgaaaccaagaatcctctgtttctgaaattctttttcctgtgtgtttgcagactttgattatgggaaatcgagatgatatagatgagttgtcatctggaaacgctagcgttcttacaaccgtcttgaaactcatcgacaaatatgatctttacgggtctgtcgcatatccaaagcatcataaacagtctgatgttcctgatatataccgacttgctgcaaatacaaagggtgttttcataaatccagctttggttgagccttttggccttacactcattgaggtaaagtatgcatatgtgatatatatatatatagtccttcttactcgtttccaatcctgtttaacctaaatagtatccagaaatctattcacaaaccaaactagacaagaaattaatcaatctggtttaaccaaaattaaaaatgcaggctgcagctcacggacttccgatggtagcaacaaagaatggaggaccagttgatattcatagggttagcaacgtgtcctgaaactgaaaatcatttaaattggtaatgcttatttctttctcatggtatttaacttcaggcattgcacaacggtttgcttgtggatccacacgatcaagaagcgatagcgaatgcgttgttgaagctggtatctgagaagaatttatggcatgagtgcaggattaacggttggaagaacattcacctcttctcatggcctgagcattgccggacttaccttacacgtatagccgcgtgccgtatgagacatccgcagtggcagacagatgcggacgaagtggctgctcaagacgatgaattttcactcaacgactctcttaaagacgttcaagacatgtctctgagactctctatggatggagataaaccatcgttgaacgggtctcttgaaccgaattctgctgatccggttaaacaaatcatgagccggatgaggacacctgaaatcaagagtaaaccagaattacaggggaagaaacaaagtgataacttgggtagcaagtatccggttttgaggcgacgggaacggttggtggttttagcggttgattgctatgacaatgagggagctccggatgagaaagcaatggttccgatgattcagaatatcatcaaagccgtgcgatcggatccacagatggctaaaaactctggttttgcgatttccacttctatgccgcttgatgaattaactcgcttcttgaagtctgccaagattcaggtgagtgagttcgacacattaatatgcagcagcgggagcgaagtgtattatccaggaggggaagagggaaagcttcttccggatcctgactattcctcgcatatcgattaccgatggggcatggaagggcttaagaacacggtgtggaaactgatgaacactactgctgttggtggtgaggcaagaaacaagggctctccaagtcttattcaagaggatcaggcatctagcaattcccattgcgttgcatatatgatcaaagatcgttccaaggtaaagtttgattttcaacaactgtaccaatcattaatgcagactgcagagtatctaatcagggtttctacaggtgatgagagtagatgacttacgtcagaagttacgactaagaggccttcgttgccatccaatgtattgtcggaattcaacgagaatgcagatcgttcctcttcttgcttctcgatctcaagctctcaggtacgttaactaaaccacattttgctacggaaatgctacaaaacaaaattatatttttgaacatgtttgtttccttattatcgcgatttaattgttgcggtgaaggtacttgttcgtgcggtggaggctaaatgtggcgaacatgtacgtggtggttggagatcgtggcgatacggactatgaggaattgatatccggcacacacaagactgttatcgtcaaggggctcgtcacattgggttctgatgctcttctccggtcaacagacctccgagacgacatcgttccatcagagagtccttttatcggttttctcaaggttgattcaccggttaaggagataaccgacatttttaagcagctctcgaaagccactgcttgattccactaatatccaattctcccggttcaaccatgtagattaatttgtttatttattttctacttgttttgggacttttaagttttggtattttggccgatcgaacattaggatttaacaggcttctatacataaaataaaattttcaaatagtgaagtcgaggctattatattttttttgtaaaaattatgcaacttgtgttcccatccgagaatggttggggaaaaaaagaagataagcctaattcaaaaaacaaattgtaaaatttgaaaaatcttaactgtaaaatggcgcctataatatgggaaatatggatcacataaaataattagattttaatgttcgttcttttaaatgcaggtttaataatcaaccggtcggtttgattgcaagacccgacgccggtttgttgctggtgtgactcgcgcggctgcgacggtgattcgaagcagctataattaattaccttaattaacgaaaattcagaaatctacatctcgccagtgagaaagactccaaggagagagagctcatacagagtattagaaattctcaaatcactagagaagatctcgtcttcttcctgattttaaacgcgatgcgaaggtatcgcttctctcgcaattttctgggaaatttttagtttctcggaaaaaatctggtgtctgagattgcaattttcgtttcagtagagatgattcggttggatcggtgttgattttgagtgacgttgcaggttaggtcaccaccgacttcatgggaagacgggaggagttggaacaaaggggatggtggcgaaactgtctatcggagtcattgttctactgatctgtacgctctcgctgcttttctcggctaacatcggtagcaatcgcgaaccgacccgtccatctaaggttagatcacttttgctatgtatttggagtagtgatttctagctgaagaatatcagatcttctgttagattggcgatgaattgcgagaagtgaactgaaaattgaagtatccgttttgattttccaggaaccaaatgttttgcaggagcttaagatctgaatttaacctcatgttttatagatgataatcttagtgagtctttattgatctaaccgttgatggattctatatgatatttttgagcagataaacgtggaagagctctgggagagtgctaaatctggtggttggagaccgtcttctgcaccacgatctgactggcctcgtatgttcatctcgtgttttgagctgtaaagatttaactcgatgctaatctaaaagtcttagggcattccaagcttgaaataatgatatgaatcttcttctgattcctttttgcagctcctacgaaggagacaaatggttatctccgtgttcgatgtaatggtggtttgaatcagcaacgtagtgcggtaggtgttctgtttttgtaatcaacgtgtccctttacaccccagtactgttgttagcttgttttggtcacttcacaaaatgtatctctaaatctagtggatttgaggtagcttaaaccctccactatggatctggttgttatatctttgatttgacaaatgttgatatgtggatatcgcagatatgtaatgcagtacttgctgcgcggatcatgaatgctacacttgtgttgcccgaattagatgcaaactcgttttggcatgatgacaggtacgttgattcctttacatctgctgcaaagagaagttacagtcccttaattcattgcattagttatagaaaatataagcttttctgtgcaatactgagttagttattaatagttacaaatgtcaaggtaatgcaatccgtatgactttccaagtatcatcagacatttattctaagcggatttcttctcctaatgttaaggatatgtgctgaggagatcaaatgccattacatgaattcttgaagtatcatgtctttatcctctaatatatggttgttttattccagtggttttcaaggtatctatgacgttgaacattttattgagacactgaagtatgatgttaagattgtgggaaagatccccgatgttcacaaaaatgggaaaaccaagaagataaaagcttttcaggtacaagcataaagagatgtctggttttcacataagcttaagtctgaaaatataggttaaatatctctgttccttgttatttccttgaatcagattcgtcctcctcgagatgctcctattgagtggtacctgacaactgctctaaaggcaatgagggaacatagtgctatctatcttacccctttttcacatcgtttagcggaggaaattgacaatcctgaatatcaaaggttaaggtgcagagtgaactaccatgctttgagattcaagccacacatcatgaagttgagtgaatctattgttgataaactccggtcacagggccacttcatgtcgatccatcttcgttttgaaatggatatgttggcatttgcggggtatgctcttttgcaacaatttctttcttcaaccatcagctatagggtcatttctatttaattaatctatatatcaaagctggttttctagaatcttgttcttgttgaagtgacagcgaagaaattggttgtctttatatcttctatacatcagcacacatgggaacagtggttcattgtctattttccgcaggtgctttgacatatttaaccctgaggaacagaagatacttaggaagtaccgtaaagaaaattttgcagataaaaggcttatttacaacgaaagacgggctatcgggaagtgtccactgacccctgaggaggtacttgcttaactttttatcagcatcattttcatgttgagcatatccacagaaagaaaactgaaagctcagagagcgatagagagatcataattgcaactactaatggtactgtttaggctttagaaatgcaatatgacattttgattgatccttgtggtgcaggtaggtcttatattacgagcaatgagattcgacaactcaacaaggatatacctagcagccggtgaactttttggcggggaacagttcatgaaaccgtttcgaacattattcccacggcttgataaccatagctcggtagacccctctgaggagctgtcagcaacctcacagggattaataggatcagctgtggattacatggtttgtcttctctccgacatttttatgccaacatatgatggaccgagcaatttcgccaacaatctcttaggtcatcgcctttactatggtttccgtaccacaatcagaccagacagaaaagcattagctccaattttcatagctagagagaaggggaaaagggctggcttcgaagaggcagtgagacgagtaatgctgaaaacaaacttcggagggcctcacaagcgtgtatctcctgaatcgttttatacaaattcatggcctgaatgtttctgtcagatgaatccgaagaagtctagtgataaatgcccgccaaataatgttatagagattcttgacagccggttagagagtatcagagatccagattcaacttctcagacgaattccacggtcactggattagaacggtaaggatcttaactggtaagcctttggaacgttttatacctaaaagtgtttcaaacaaagaagagcagaagaagagagatgtgtctccaccattgttcatacaattcaggtagctcaacgtctctgtgtcaaacaattttctttatgaagcatagatttgaatcttgtttcaaaatttgtaacaaaatctaagagaagtgatgagattccactaatagttgttttattgagtatcatgtttttcactactgaaatgtcaaataagttgggaaaagaaagacaacgagaaagcctccatacccaaacccattacattacaaactaccgactcatgtagtatttggaaagagtgtttaaaagctgacacagcaaaccgcagtaagtaaaaaagaaacattttggagcctatcttcagtgtctgtagcgatggaatattgattataacttattaaatcatctaaaaaaaattcagagctctaaactttttctttcatttctctgcaaaattccgacatccatgagctgaagatatctgttgcttactacttagtgttgtgtgttgggacactaagatagaacttagtgttcttgaagtcatcaagtaaggggttatatccgtcctttgttctcgtctttgaaggtaaaccaaactcatccatgaacgctgatgtatcaagctacaagcaaatgagaacaagaaaagactgttgatgaaaagcatcagaaatatcctctcttgttaaaatgtttaaagagaatcttgatttacagtgagagttcgccttttccttccttttttcgatggtgtcccgtctttttccatcttcctccaaccggaacaataatggtccattcgttctagaagccagaaatcggttgggaaaaatatatcagcatcaccctgcaagatcatccaacatacatatgaattgtgaagttttcaatgaggttagaagttcaagaaaactactcgattcgcaattgagaataaaccaaataagtagtcaaagaaggaaatttgcagatatctcgcacctttgcgtccagataactactgtaatctgagctacatccatctttctgcaaatacaaataagagattataattatacttcacgtatgtatttcttcgggtgaaactgtattcaagttttcttgagacaagtttgctattaagcaatgcagaaagacactgtctctgtaccaaaaccaagttttttgttgttttaaacattgaggtatgacgttaaggaactttggccatacctctatggctcagtgattaaacagtcaacataatactgagaaatgtttcaatgcatagttagacggaaaaaagaacagacctttgttgaaaccaatggggctctttcaccaggaactttcacatcaggcaagaagctaaagtccgaagcaattagggacatctttggcagctttgcatgtaaaacctctagcagtttctgaaattacaaaaattagaacagagtaacacaacatctgttgtaatatgtggacaccatttttttcttaccaaacaacctgttggaagccaactacgtctaggtttgggaaatagtttagaccaaatttcttttggttttgaaaccggatcatcttcatgttcaacaatttcaatgcaccgcttaatcagtggatcttctaaaggcttgtatagctcagagagtgcttcgctacagtttataagagatcgggatcaataaaggcagaaataaacttcatttgagccaaatattctctgtacctctctggtttattttcaaccaagacttccatccatggggaaagttgacttttggaatagacaagatcatgtgggagattatctagcacctgcaatggtataagttaatacaaatattacacgtatgattccctcttcaattcaaaataccaacctatcaaatagaaccacatcaacataattacatacctcaagcattatcacccagcacggttgttgctccacattctctgtttgaaaatttactttataagcacagatagataacttcatagtcactaaactgggattgttcgataatatgtggttggctaatttataaacatcttgattaataagtagtctctagaaaatttgggtattatcgctaattctaagtcaatgacaatctagtagcataacctcatttcactaacgatttctccgactagcttaatcttctaagaatattatattattttttttggcaaacaactcactaatttaatattttcaaccaaataccgaattctagcatagcaacaggaaattgaaaaccagaatctgccttgtgctgaacaaaaagaaccttactccatccagctaggtcagatgcatcacgacactcaactcggaactttgatagatgacttccaacttgtgcaacagtttccttctgaatcttagcaagtgagggactgatttctatagaactgatatatattaaaaataccatgcagttaatataattgcagcatgtttcataacagtttattattcttaagttccagccaaagatgattttgtatgaatacatgctagcttaaattgacaagagaggaaaactggcatacgtacgtgtagctcatgttcttgtagattctctccggagcattcaacattatatagtccaatacacccttggcacatgtgcccgatccaccaccaatttcgtatatctaagcacatgtttcaagtgttattgattaacggaagaaccagtgcaaatgtcgactttaactcacaaaccaggatgaaaatttcccttttccagatattaaaactttcctaaagacatatgatcttaaacagaaattcatggcattactttctccaccttcaatcgtgatatataaactttcctaaagacatatgatcttaaacagaaattcaaacgattctaaactacacaaccattttcaaaagaaacaaaacttataaaggttctataggtaaaccgtggtttctctatttcaagttttaaagcatgaacagaacaagctaaaggcctaggctatcactaactagtttccttgcagtctgataggtaaagataggtcaggactaactagattcaaaacttttcatataactacagaaatcagagacataatatcaggttttgttttgtcttgaaattaaataaaatacagatgtggacgatcagataagcaaacctttaatggaactgagagatttgtggtacgcagtatagcttctgcaatcccatgagcataccaaggctacaagagatgattggcatgataaaataggataaatacaacaagtgaaggctaatcaaagaaaacaccaaagaatctatccacaaacatttcaccttgaaaagctccactggagtaaaccaagaaatgtcactctgcttgtatactttttccaagagtttcatgtatgctttcctccctaggacaaggaaaactatcgacttactagacataaaagagataatataaccataagaaacaacagataactagccaaacaaagatcatgatgcatctcatgtagagtaagaactgatattgctatagtttcagggcagttatagaggcgtggctaaaattcaagaattaaacacttaagcaagtgaaagttgaactttgcgcctaccttcaagctggttgaacttaatgcttctctccaaaaccccgacagattttgaccgttgagagaagtagccttgtattggatcatataatgcagtgtgtatgaaatctcgaacctgtttcagattaaccaaccatttagtctcacattctagaaatcgccaaatgagaatgaaatctgataaacatcaagactcggatctggagagaactatgagactgtaaacacaaaacggagacagaaattcttaacaaggattcaaaacagctaactcagagcagaaaaatttctttgaaatacgaaaagttttgccttttgcattgcttaaggttgatcgatttgtcattaatattacttatcaagtaggtaaatctgaaccatcgaaaaactctgagagattgagaagaaactcacgagaactggttcatcccctatgagcttctgagtagagaagaaagctcgaagcgatccaagacatggcagctcgaattgatcaacatttcgtggaatcttccgacaagggatatatcgaacgaaagccatttctatggattctctctctatctctacgatggctcgatcgacattcgagaatcgagatacagaaggaactcaccggttcaggaggtttcatagaggtttagggtttagatccggtttaattcgaccgttctatattcataatccttggttctcttcttattataccaagttcggtttgtttaaaatttaagcttttttaaaaaagatttatcattttgtactgttagaactttattattgataaattaaaaactttacttaaatcacataaactattattatttactaaaataattcaaattttgttacaactccaaaacccaaaaaaaataaaagtttttttttttgaaaaatataaaaactaaaacttaaggatcaaatttaatcaaatattatttttgaaaaatcgaaaaatttagtttaaaataagaaaatcaaaagtgcaataacattttttaaaccaaataaaaccatcttatgtaagcatagatgtgtataagattgccatggcagaggtgttgtgttcctcgaagcatctctgacagtatacatcctcacgtgccttgtctacatgattttgcatcatatccatttgtgaaccctaataacgttcgcattaatccccacttggctaatgctagacctcaacttcaggtaaaatccaattatgcatggtgttcaaaaatagtaacctatttgagattcatcatcaacatgtggttcagctctgtttgctttacgtacttgttttttatattacaagaaactaaaatttcggaatggaatttttatgtctggtatagaaatctgaaatgggtctatcaaagttcgaacacatcatccatgtttcttgattttcccataggtggtggatttggtgaatagatttgactcagagctatagaaactaatctatttatcaaaatgccgtgtttagatacgcactattggaatttcactggtctcataggcgcatttctgaatctctccatagcttatttgcttctatgtacatctctttgtatacatctcctgttgagatttctagggtttctaggtttacctcttccaaaatttcacaatggacgtttcggtgtatcaaacactatgaggaaatgcctccatgaagaccttctggtggatcgtgcatcagacagaatctcagccgtagatcgatcgataaaaagcaaaatcccttttggttcgattactagtgacgatgattcgaaccggtttgttgagttaaagctggtgagaaagaacagtggtgatataagcaatgctagagttaaagatgaaacagaggatttgtcaagagacgaaccaaatgtgattaacaataaggaacttggtagatttgatcttatgaccgttcagggcatgaaaggcaaacgttttgttacaagaagatcaagaaacggtcttaaaaaccataggagatcaggtcgtgtaaactgtgcaagtctcagatctatttcttcatcagaagcctttgatgagaccgcaaaaaccaatttgatgcagccttatgatgagacatgttccaatgatgaccaaaaaggttttctttcttaccttaacttgtcttctttatggattgagattttgcttctacattcgaataatcaatgttaggccttgctcttcttggatgtattgcagattgtggtaaggcaggagaggggactaatctatctcattggccggaatttgagaaaaccgtatcagttaatcaacaggtaaactccaattcatcagcagaacaatcttttgtgagaaatgtagagaaaagatctgttagggatttagaagaattattgaaagaagagagagcggctcgagcaacggtttgtgtcgagcttgacaaagagagaagcgctgcagcatcagcagcggatgaagcgatggcgatgatacataggctgcaagatgagaaggcggcaattgaaatggaagcgaggcagttccagagactggttgaagagagatcgacttttgatgctgaagagatggtcatactcaaagacattttgatacggcgtgagagagaaaaacatttcttggagaaagaagttgaagcttatagacaactactcgaagaaacagaggaattggaatgttctttaataaaagagaagaatgttccagaaccggaacacaaacaaaacaaagactgtcaagagagaagagctttgctcgttcaggaacttgatggaacggttctcgatatgccttatagagaagaaggaaacagagataaaaacagagatctgtataaatcagattcagaagtcgcgtactcacgtgtgcgtgatgtttatatggtgaaggacgaaacagagaacattagtaagaagaagaatctagaagaatcctctgttggcaaacctaaagaatcgttggatgaaaacagtatcattgtctcggggattgctcgaaagctacctcccttatgtcgtccacgcaagaagtcgctgagctcttcgggttcaaggagaaaatcgatgtctgcggttgattatgagaggttaaagattgaaaatgaagtggaattgttaagagaaagattaaaggctgttcaagaggaaagagaggagcttacgagacgagcatctttgcctcctttaccatcaaaggtttaaaacaagtttccaaaactctatgctgaaaaaaatcatattacgtaaatagctttcactgacactttttttatattgccgtgttcttcaggttagggctacgtcagagaagcgaagttggacaagatcttgttccatggatcttcactcttcttgaaggctgaagccttttaaattttatgtacttagacacatacatgtttgtatgtatagtatacaggattcgattatcagttacgtgtttacagattttgagccatctctatggagaaatcttggatcgcaagtcaccctttgggaatgtatttttctatcgtcgatcatacatacttgctttttgttcgtttgtatcgacaataattattcgacatagtgattcaaatatatattactgcaataaaagttgaagataacttatttacatgtcctcttatcaaatctaagatacattgaaaaagtcatgcaacaacatccatatataacgattggaagatatttttgtgttgttgatgaaaatagattatatataatgttcattttagtgtaatatcactttgtctaacaataatttaacctctctttttttttaaacgaagcttttcaactgactgatataaaatataaccgttattgtagtatatcagttgttcaatggattaaattttgttctaaatgtatgtaagcggtgataatgtatgtaaaaatgtattttacagattgttgagaattgaaatcttcttctaggatttgaatgattgaatcattcttatgtatatgatgatattctccaatactaattagtttataagatacagataaaaaataatgtggagaaaatcataaaatatcatgtcgtttcgctttattgttaagtatataaccttttatttccgatttggtgttttcttatttttaacctctataaacgatatggttgaatttgctaaactagtaaaaaatatcacgaaatatgtgccaagtcaaacttttaatgtctaaaataagtattcgttgtatcataaactaattgatatcatcatatattaaattccctctttttgaaattatactgttacacatgttcttggtaaaagatatccagcgtataatattgtttctttccatatattgaaaaatgaaaatcacatgaacgtgtattttcagtatatagtgaaaaaaaggaaagaaaatgccactcgtatcctaatccactccctcactcctttttttttctcatttacattttaaagattatatacacatatatatatatttataataaatacttttatttttacaactttctgttgatattacgaattgtttatttttataattactataaatcttacaacttttaatttttatgtaaatttatttatttatttttaacttaggtttttagattttctgatccactcatagaaaaagttaaaagtcccttcgaggacatccgataaaaagaaaaagctaaaaacgaatataataaaataaataaaaaactatcatcatattttatataaaaatacaaaaacataaaatatttttaaaaatatgaaaatatataatattataaagtattgtataagttttcttgtatgtttcttaatttattcgataaaaccgttaattcaatttatagtttttagttgtccggtccactcgtaaataacggttacaaccgaatacgacaaaataaatataaaattattgtataaaaatagaaaaaaatttgtttcaatcacattaaactatatttatcaaaaaaataatagaatacataaatcaatttcaaaatatttataatctgtggtcaatcttcaagatctatatttgtattaaaatagaaaattgttttcttcctttaaattgatataatttttctctctttcttatcttcctcatatttttgcattatttcttatatagctcaattctctctcaccctttgaaaaaaatatattaaaatttgacctattttatagccaccccatctgttatttataatctttcatctgggatcctcatttacacaattcattcattcatacacatacgcatcattcatcaacgtacgcgtccctcccattatattctcttatatgcactctttcatcaccatcaaagagaaaccaaagctttcatttttatgaatattcaagggtgaatagttagcaaaggtgacaactttctttcattttcttttaatcttctcatattatttcatcatcacttctttttcgtcgtctgggcttttgctgcttcttgtttgttgcttcgcgggaaaccccaaaaatggtttctctgttgtatcgtctatcgagaatctattcgttgtttggtaacagagaattaatggcttctttgaagaaagttgttgttgggccttgaatttctcaatagatgcctgtaatgtatttgttaatatgcctcctcgaggggttttcttggtttatgttccttcgaatctcaggctaatatacgttgccggcgcaaaaattccctcttttttgtcagagcgatagcgagagagagagattggttgaaaaagatgtgtctttgttatgattccttaaagtatggttgcttttgtagcacaagtccttttacatttaatggcaatctgtcgtattcagttttttgttctgcatagaagaaacagagggaagagaagaattcatggaggggcttttatagctttttccttgaagcctttcttggactttgcaatctcttattttcttgtttaagtttttcgtcatttgattctttgtggataatatttataaattgaactcctgtgtatgtatctttgagtttctttgatggaagacggttaattacactctgatctgatgtgtggagccttaaagtctctgacttttgtttcattaataagccggatagatagtaaatgctgaagaaggtttagtggttgttaaagagcgtaaatgatcttaaagtgcttacctttttgttttcttttttgtcttttggctgtgttaggaatggcatcaagctcttgtctcaagcaagggtcagtgccaatgaacaatgtttgtgttacccctgaagcaacgtatgaggctgtggttgcagaccctaggcttttcatgacttccttggaaaggctgcactctctcttgggtactaaattcatgtaagcttctttcttcccttatcatatcttacttagtagagtaagttcagttgttatctgctctgacagaaatttgtgttcagaaagtctctatctttgagatttaagctcttatgttgacgatgaatcatgctttgtttttcacctacaaaaattttaccagttacaatgcatgagattctctgtctatattatggattcctcttctgtgtgtatagtctgactaaaagtaatgttcttttttgtgtaacgcattgttccttttgcttcttgggggtaatgtattgtaacttttacatattggatatggatgcaatactttatagcttatagctttaaccattctacatattacattggtgattgtagggttccgatcataggaggaagagatttggacttgcacaagcttttcgttgaggtaacctcacgtggcggaatcaataaggtatgtgaatgccctctcaggctctcaatgataaattaattccattctatatgtattgtctgttttctatgtctcatatagttggttttgttctaaaatcttgaaatctacattgacatttttccttggatcattttccttctttgaattgcagatacttaatgaaaggagatggaaagaagtaactgctacatttgtctttcctccaactgcaacaaacgcatcatatgttctgcgcaaatactacttctcgctgctgaacaattatgagcaaatctatttcttcagatctaatggtcagattcctccaggtttgttcataaaaacctctttaactattttaccaaattttcaaatatttttcagtttcttctctgttttgtaacacacatatcttctgtagactctatgcagagtccatctgctagaccatgctttattcagggagccattagaccttcacaagaacttcaagctctaacctttaccccacagcccaagatcaatactgcagaattcctcggaggtctcaacttttttctctctttgcttctataaatgttccaactgagaaactgtgacttataaatctgagtaaaatcctttttcctttgatgttattgtttcaggatcacttgctggatcaaatgtggttggagtgatcgatggaaaattcgaaagtggttaccttgtaactgtaacaattggatcagagcagcttaaaggagttctgtatcagcttcttcctcagaacacagtttcttatcaaactccgcaacagagtcatggtgtcctcccgaacactctgaacatttctgccaatcctcagggggttgcaggaggagtaacaaaacgccgtaggagaagaaagaaatcagagatcaaaagacgtgatcctgatcatccaaaacccaacagaagtggttataacttctttttcgcagagcagcacgcgagacttaaaccgcttcatcctggtaaggatagggatatcagcaggatgattggtgagctatggaacaagctgaatgaagacgaaaaattggtatttcacacactgatctttgaattcttatcaaactctgttacgtatatcgagtttttgtctcatgatctgtttgattttcttttatttctagatttaccaagggaaggcaatggaggacaaagagcgatacagaactgaaatggaagattacagagagaaaaaaaagaatggacagctcataagcaacgctgttccgctgcaacagagacttccggagcaaaacgtagacatggctgaagctgaccttccaattgatgaagtcgaagaagatgacgaagaaggtgattcaagcggatcctcaggcgaaagcgagccacatgatgatcagagcatagaaactgatcctgaattggaagagccatctctgaatccctcaggtccaaacctaaaccctaatccgactgagatagtggtggctcctaaggagaaaaacggcgatgttgtgatggaaacatctccattgaagaaagccgatgagccaactgtggcggtgactgctgagcagaactgaagattcttctcttgtttcttactccccgttgccagtttcgtgttccataggtaaatgttagagagaggaaagggcttcagataccttgcttctggcccaagattatgtctttttggttttttttttggtttttttggatttttcttcggaaacaaggcaagtttatggttataacattttggcataagagaattttttactttcgttattaatgggatatcctgtaaattggtgattaaaatctgaaagggccttataaacttgggcttggaaagcaaatgggccgaagaagtaatccctgtaatatgattttgaaagcggaggagggagacttaaagactttgattgattgatttataaaaggaaccctaagtttccgaactttgtccgtcgccgtctgaaaactctgtagctctctcacttcagctttccaattaaagggaacaaagctttgatttttgccgcagtcagaagcattactttgcaagaacaagtgtgtaaacaaagatgaggagctcccaaaacggcggcgcaatgggtggacgagctgccggaaccggcggaggaggaccgtcggctccagttgacaaagaagttgactacgctcagtacttctgtacttactccttcctataccaccagaaggatatgctctccgaccgtgtccgtatggatgcttacttcaacgccgtcttccagaacaaacatcactttgagggcaaggtataataaagttcacatctttaagcttaacaagtgttggaagactttctatttgtttgtagtcgatgaaagattatctattgcgaagttgtacccattggtctctctgtctttcttgtggtattaatagtttgaattgttgtttctgtaatgtgatgaagactgttttagacgtgggcaccgggagtggaattcttgcaatttggtcagctcaagctggtgccaggaaggtttatgccgttgaagctactaagatggctgatcatgctcgtgcccttgtcaaagccaataaccttgaccatattgtagaagtcattgaaggatctgtcgaggatatttcattgcctgagaaaggtattattcactttcccttttcttctctttcactgcgattagaaaagagtagtaatcagggtttaacttagtggctattgattgagacattgcaatttggttgagttgaacatgtttcttttgataatttttactctactcgacattgcgctaatatctacatattcaatttaatgggcagttgatgtaattatctcggagtggatgggatacttccttctgcgggagtccatgtttgattctgtgattagtgctcgtgaccgatggttaaagccaacaggtgtcatgtaagtggattttctgttattttatttctattctttgttgtaacattaaaatttcatgatgcatgattgttacttatgagcctatggcacttgagagcttgatgctgtgtagctatactgttaatatcttgatagcataatcttttcctccagtgccagttatagaatttcttatcaaattccatgcataaattttgatatcatgtggcacatgttactaatattgaaaacaattgggtaaagatttggttgatgttggcactgtgtgtatctaagcattacaaataacctttgtatacaataggtaccctagtcatgctcgcatgtggcttgcacccatcaagtccaatatagcagatcggaagaggaatgatttcgatggggcaatggcagactggcataacttttcggatgagatcaaaagttactatggggttgatatgggagttttaacaaaaccttttgctgaagagcaagaaaagtattacatacaggtgatttcagaactctttttttctgcaatttaatttatctttagataagttcctcagctgacagttgaacaattaacaaattgacttacagaccttttgctctgacatttcatggaactcataaaattttgtcttttgtgcacagactgctatgtggaatgacttgaatccacaacaaatcataggcactcccacaattgtcaaggagatggattgtttgacagcatctgtcagtgaaatcgaggaagtcagatcaaatgtaacgtcagttatcaatatggagcatacaaggctatgtggttttggtggatggttcgatgttcagttctcggttagttcgtacagattactgtgttgcatcatgttgaagaaactcgtatacttactcgttgcttgtttgtttttgtaactaggggagaaaagaagaccccgcacagcaagaaatcgagttgaccacagctccaagtgagcagcactgcacgcactggggacaacaggtatattactccccaatctctggcctatgatggttaaggcttcgattgtttcaaacgctaatttccgcgtaatggtctgaaactggcaggttttcattatgtcgaatcctataaatgttgaggaaggtgataatctgaatcttggtttgttaatgagccggtccaaggaaaatcaccgactaatggagattgagcttaactgtgaaataaaagaagcatctggtaaccccaaagaatctttcaagaagacttacttcatagagtgattgattgattatagagaagctttccttggggcttgctggttcttgtatcccatgtatgaaccccaaatgtaatgttttattgcttcttgccttttttttctatgtaaacgagattgttataccaattttcaatagatttttatatgggtgatataatttattatttttggtatttgattaaacatccaaaaatttcttcggtattaattttgaagagattttttttctgtgaagattgtttaacttttttgaacatttttcagtggtttagaatatttgttaaagtctaaaaaaacatttttttggtttaattaatatcgaactaaatgtttaaagatttgttttggagtaattattaatatttacgaaccaaatatttggtcgatagagttgtgttgggagagcctatgtcactaacccctttgtctgcccctctttcggagcgattcttttctcattctttcgtcggactctctgtctccttttgacggcggcaccaacgacaaagcaagcaagcagtgataacatctatctatctctccgtctaaaccaattgattaggctagatcccaattcttcgagtatcgattcttcttcaatcctttttatgtgaatattctcctaaagcagcaacctcttgggttcttcttcttctgggtaaaattctctggattctgcttttgctttgatacgattgttttgagctacttgttttttttggttcctgattgcgttaagggtcaggaggcttagtagaactaagatatgaaatcttaatctgagttatttcgatgcatagactttggattctggatctttgagtactagtcattaaaaagtcggataatttctctgtagggtacttcttagaatactgatttgatttgattttatggttaattctcagttcgtgataattcttaagacttttttagtggtatgtcttagaatcatggaattgaaatgggcaggttcgatttttgaaggtggatattgattttgaatccatatatgcgttgatggatgtggattagtttcttgttgtctttatctgtgcattggtgatagttccaaagtttatctgttggtatacacttcgttgctttgctcagttgtatttgattatgtagatgcagtaacaactttagtaacccactctcctttttctggctttgaattttattatagtaactgatggggaagaaagcgaagaagaaggcccgagctccaacaaaggagattcagaccatggaaatttccaagaaggtctcagaagagccgcctagtcaagccggggaaattgctgagggtgacgttaaagcagttaaggagacacaagcttgtgtgcatttcgataaggctcttaatttggagaaggtgttggataagattaagtcatcccggcagattaagtgtgcagaatgcaatgaaggagtgtatggaaagagaggaactaaagcaaagggcagtaaagggaagaaggatttttcttcttctgatccaaaatctaataacaaagccatttggctatgtttggaatgtggctgttatgtttgtggaggtgttggtttaccaaatggacctcagagccatgttttgcgacacagcagagtgacacgtcaccgattggtgattcaatgggaaaatcctcagttaagatggtgtttcccgtgccagttgcttctccctgttgaaaaagaagataatggcgagaagaaagatgtactgtcagaggttgttaaattgattaaaggacgatctttgaacaatttagcttcatccgatatcgaagatcagtgctcaggaagtggcagtatcactagtgatatcaaactagaaggtgctgtgaccagtgatatagaagcaagagatggttatgttgtgcgaggtttagttaaccttgggaacacatgtttctttaattcgataatgcagaatcttctttctttggatcggttacgcgatcacttcttgaaagagaatgggtctggggtcggtgggcctcttgcgtcttccctgaggaaattattcactgaaacgaaaccagaggcaggcttgaagagtgtgataaatcctagagccttttttgggtctttctgttctaaggcaccccagttccggggatatgaccagcatgatagccacgagttgctacgctgtttgctagattcgttgagcaccgaagaatcggccttgagaaagaagcgtggtgtttctgataatgatgagaaatctactactctcatagaatctgtatttggaggcgaaacgtcgagcattgttagttgtatggagtgcgggcattcctcaaaagtctatgaaccatttttggatctctccttacccgtaccattcaagaaaagccctcctaaaaaaccacaacctgtttctcgagcaaaaaaagctaagcttccacctaagagagtcccaaagaatgtgtcaaaagtaagtaaggtttcaaaagttctcccaggtatggttctttcggaactgaactcttccggaaaatctatggctgtcacagctgattcggatacatcctgttccagtttagcaccccttgataatggtccggttttagaaactccttcagttctaacccttgacaataatcaggcctcagaaagtgcatcacaaagtgatactggtttcgatggctcctggttggattttatcggaccagaaacctctggagatgagacgaatttggatatgcaagaagatggtattgataatgtcattacagctgaggttaatcaaattgttcccagtccaaatattgtggcgaatagctcagtttcatcgggtgatcagactttggaaggtaatacagagaggctgatgcaagattatgaagaaattgcaaaggcggaagccaatttggatgaaaaagatgtacaagctatgcagtctgatgaatgcccagctacaagtggtatttctgctgaattcagtcaagctagttgcattggttgtgatcctggtataggggaaagttcttcctcggtgaatccttgggacgaggaagagcttcctttggtggttgcagattcgcaaattttgtacatgccatacaaagaaatatcctgtaatgataaatcagttgaaggtgagtgtgaagcttcatcttcatttgttactggtgatcatgaaccacaaaacagtgattttgttgattttggcggtttatttgatgagcctgagactactgagggacctgtttttggacctccttccaaggctgaagcctcgggagttggttttatggcgttcagcagcgagtctgatcctgaagaaatcgatgattcggatttaccggtgtctgtagagaggtgtttgggtcatttcacaaaacatgagatactgtcagatgacaatgcttggaactgcgagaactgttcaaagaacctgaaactccaacggttgagagaaaagcgaaaatccaatgaagatgaatcgagatcaagcaacaccagcaacggatgggtgaaagaaaatgaagatgaaggttttggagaaaccgaaattttggctgttaaacaagatccaaatgatactagttgtgtcaaggatcatagctctgatggaagaaaagctgcgaggattcactcagctgatgaaagtgaatccaaaggaactcaagatgaagacgaagattctgagaaggtgattacagtgaagagagatgcaactaaaaaagtacttataaacaaagccccacctgtcctaaccattcatctaaaacgattcagccaagatttgcgtggtaggctaagtaaattaaatggtcatgttgctttcaaagaggtcatcgatcttcgacaatatatggactcaaggtatcatcatctctcatcttcttttatataaccacattttgatctgtcttatatcttaatctccatgaaagcgattcttcaatcttttggttcattcaggtgtagcggagaagacccgcccgtttacagactggctggattggtggagcattcagggacgatgagaggaggtcattatgtggcgtatgttagaggaggtcagcgggttaaagagactgattcctcctccactgcgtggtataacgtaagcgatgcatatgttcgtcaggtttcattggaaaaggttctgcattctgaagcgtatatcttgttctatgaacggatcttctcacaagaatgagaaattattttgtttccattacgaaaggaaagaagaaaaccagttttgatcttcttccttacaatagcttttgctgggaaagtttttgacgatcacattagatcaaataccattaattttgttttttcttattatattttggagtcatgaaatttcattatatgtatcatcagaaacatttctgaaagtatttgagcctctccaatgagttacattcttttatacagaaaaagagttggttctagattcgcagaatttgaagcttcttgcaatggagagatatcgacagagtaccgggcgggtatttgtttttaaagcgggtcgaaacaatatggatcgtccgattcaaactggtgtgatcttaacggaagctccgtttaccaaaccgttacttacgtgcctaatctaaaccgattaaatcaatttatatcaatgtcagaaccggaaacaactgaaccggtactgaaaacgattgaaccgaccctatgtcttccttcctctctacccaagcaacgaacggacttccccattaaagggaaagaaagacaatcgagtctcgagtctgtgaaaccaagtctcgcgagtgggagattgtagccatggcaggagtatcgctcaagtgtggcgattgtgggacgctgctgaagtccgtggaggaggctcaggagcacgctgagctcacctctcactccaatttcgccgagtccactgaggccgtgctcaatctcgtttgtactacttgcaccaagccttgtcgctcaaaaatcgtacggatcttcgattttcatcgctctctttcgttttaattcttgatgagtttgagtagggtaggggttggtggtggttagaagttacaagcagatctccttggcttttctttctcaggaatcgagttttattcatgcaatttcgatgtttcattctttaaactgtttgactctgcgatctcgatttgatgcgacttttgaaacctttttctggctctgtggtttcgagttgataggttttgacttgagttttgaatgaaagcgagtctatttcatgtgttcgccgctgattggtgttaattagagcgtgaagttaaaagctttactccgcatagccctaatcttggtttttcagatctcaatccttttgggcttgctggctgcttcattcgtttttgtttgtttttctggttgaattgagttcatttctttgattgcttgtgtactttggtttctgcaatttggtaagagtttcatgactactttactgaggtgccttaagatcagtgaactgttttctactatgatcatagactagaattaaactatgctctagtattttgattatttctgattccttgtctcattcttatataatgtgaaggaaagcgatttgcacacgaaaagaacagggcatactgagtttgtagataagacattggagacaatcaaacccatcagcttggaagctcctaaggttgccatggagattgatgataatgctagtggtagtggagaggctgcagaaggtacattgccatgttaatgtatatgtattgcatgagtttctgaatgtgactttaacgctatttcttatggtcactctgcagagatggttgttccagacgttgacaataacattctcgaggaacttgaagcgatgggcttccctaaagctcgtgctacccgagcactccattactctggtataaatctaacttttggttgtgggctcctattataatctttggttcacgtagttttcatatctcctctaagaattatctgaagtgtaacatggtcatatgcataacagctccaaaatttatggccactgatcacaatagggaatcagggagtagcttattgattaattgttatgctttgtgaatagcgtgtaaagcttgattgtgggcaactgagctcttgttcacgtctctcctttttgaactccggattgatatataaaactgtcatctatctcattgtgtgcaattagatcttcttctccttttctcgttatctcttttttttttgttcagatgtcatctgaatctcgaaattcttttacacactttgaaattcattccttcaggtaatgccagtcttgaggctgcagttaattgggtggtggagcatgagaatgatcctgacgtagatgaaatgccaaaggtgggtgttttgtcaattattacttttcagcagaatgtctgttctggaccgttttgtttcttgataattgcattccaaatctcggtttttagttcttatctcaaagtggttttttgcttgatgcgacaatttggaggtcaaaattttctgtatatatcaccttcaacaatcttatatcttgttatatgacatgtatgtggtcttaaaattactccattgtttccttactgttatttctatgttattgactgtttgcctaggtgccttccaactccaatgttgggcctgccaaacctgctcttacgccagaagaagtgaagctaaaagcacaagaattaaggtcgatgagtattctgttttactgtccctatttgttttcttttatagcgtgcccaatggcatatcgacactacacttttatcatgcataacctagaccatgaaaatgtctacacttcaatttatattcgttgatccatgtctcagggaacgtgcacggaagaagaaagaagaggaagaaaaacggatggaacgtgaaagagagaaggttttctgtctctgatcctttttttaaatgtgttactgttatcttaaataacttaattatgtgcttgaaacatattgtgtcattgctgaaactgtaagcattactttgttatcatcttttaacacgttagtatttggttcaggagcgaattaggattggcaaggaactcttagaagcaaagcggatggaagaagtaaacgaaagaaaacggttagtcttttctggttataatgtcaggcttatcagctgtattcttatttttgtttttcttaatcgactacttattggttgtgtgtttcagtcttatgtttttgcgtaaagctgagaaagaagaagaaaaacgggctagggaaaagatccgtcaaaagcttgaagaagacaaggtatcttcaatgcagtagatttacgtacgttatgcattacatttatatttctcaacaaaaaaaccttgaagactcatacattttaacaggctgaaagaaggcgaaaactcggattgcctccggaagatcctgcaactgcagctgcaaaaccctcagtgccagttgtggaggagaagaaggtaaacaaaaaagtatcaaaagctagttatattttatcatctcttgttatatgctttttcttatagagacatcttttttttttggcaggttacattgccaattagaccggccacaaagactgaacaaatgagagaatgcttgaggtcccttaagcaagcccacaaggtaaatacatttaacatttgtcaacccacacattctaagcaacaatgagccgaacattaatcttttggaaatcggggaaaaagggttcaaggaggatcaagtaaagtttgagtataacagtaattttgcttgtttgttcaggaggatgatgctaaagtgaagagagcgttccagactctgctgacttacatgggaaatgtcgctaagaatccagatgaggaaaaattccggaaaattagactcaccaaccaaacatttcaggtaaacaatcgggcataaaaatacgcatctagatctacttgaaggatctacactgatgatgatgatgatgatgatgggtccagtttcttacttgtcatggtttttgggatgaaaatgtaaacaggaaagggttggttcgctaagagggggcatagagttcatggagctatgtggatttgagaaaattgaaggaggagagttcttgttcttacctagagacaagatcgattcagccatcataaactcagctggaacagaactcaactccgccatcaacaaccctttctttggagttctttaaatccatgcctcttcttatgaaactaaaaaaaaattcggatatctctatgaataatactggctagtgacattctttttgttttgcttaaataagtggaaaatttggagagcagaactaaaagcttccattactgtttaatccgtcttgttgtttgcattgtaacttttaaggtaaaaaaaatgacatttccatactgctttcgtctgaaccggttcgccaattaaccggtttgatatatttagagcaatacggtttaatccggttaagataagtagccactagccaaatatataagagtcttttgcaccgcgagatctgatgactgatgagcgttttgactgaggtacgatgaaatcgctttctgttatttttaaaccgaaatcttctcccgctaaaatctattttccggccgatcgtcaagcctcaccggacgagtctcacttcatatctctgattcacgcctgtaaagacaccgcaagtctccgccatgttcacgcccagatcctccgtcgcggcgtcctcagtagccgcgtcgctgctcagctcgtatcttgctcttcgcttctcaagtccccggattatagcctctcgattttcagaaattctgaagagaggaatccttttgttttaaatgctttgatccgtggtttgacggagaatgctcgtttcgagtcttcggttcgtcatttcattctcatgttaaggcttggtgtgaaacccgatcggctaacttttccgtttgtactcaagtctaattctaaattaggttttagatggttgggtagggctcttcatgccgcgactttgaagaatttcgttgactgtgactccttcgtcaggttatcattggttgatatgtacgccaaaaccggacaattaaaacatgccttccaagtgttcgaagaaagtcctgatagaatcaaaaaggagagtattttgatatggaatgttttgattaatgggtattgtcgagccaaggatatgcatatggctacaacactttttcgatccatgcctgagagaaattcaggatcttggagtactttgatcaagggttatgttgatagcggcgagttgaacagagcaaagcagctttttgaattaatgccagagaaaaatgtggtgtcttggacaacattaattaatgggttttctcaaactggcgactatgaaactgcgatttctacctatttcgagatgctagagaagggcttaaagcctaatgaatacacaattgctgctgtgctctctgcatgttcaaaatctggtgctcttggatcaggaataagaattcatggttatattttggacaatgggattaagttggatagagccatagggacagctctcgtagacatgtatgcaaaatgtggggaacttgactgtgcggctactgtgttcagtaatatgaaccataaggatattctttcttggactgctatgatacaaggttgggcggttcatggacgctttcatcaggctatccaatgttttagacaaatgatgtattccggtaaaagattttgtccagtctaagaatttagcttattctcatttttttttaattattattcatcgagtttagttctttaagttgtggtgtgcatgcaggagagaagccagatgaggttgtgtttctcgcggttctaactgcatgcttgaactcaagcgaagttgacctgggacttaatttctttgatagcatgaggcttgactatgcaattgaacccacgctgaaacattatgtgttagtcgttgatctgctaggtagagcagggaagttgaacgaagcacatgagcttgtagaaaatatgccgataaatcctgatcttacaacatgggctgcactctatcgtgcttgcaaagcgcacaagggttatagaagggctgaaagtgtgtcacaaaatcttttggagcttgatccagagctttgtggtagttacattttcttagacaaaacacatgcgtctaaagggaacattcaagatgtagagaaaagaagattatcattgcagaagagaatcaaagaaagatcattgggatggagttatatcgaattggacggtcaactgaacaaattttcagctggtgattattctcataagctaacacaggagattggtttgaagcttgatgagatcatatcgcttgccattcagaaaggatacaatccaggagctgattggtcaattcatgacattgaagaagaagagaaggaaaatgttacgggaatccatagtgagaaactggctcttacacttgggtttctaagaactgctcctgggaccacgataaggatcattaagaaccttagaatctgcggagattgtcattctttaatgaaatatgttagtaagatcagccaaagagatattctactgagagatgcaagacagtttcatcatttcaaagatggaagatgttcatgtggtgattattggtgatatagttgatcccttcaggttagtcaacaacaatgactcaaaccaaaaaggaaaaatgcgatgttctgtaacatcccagcctgagctgcttgaagtttttgtttattcatggcgctttccggtacaaatcttgtcatgttcttgtacacaagagtagggattaggacaagctcatgatttctgagaccaggccacacaccacagctatatcaggccgaagtgattcgggttaccccacaggcctagaagtgaaagagaaggggctcaagtgggttacttgtgtttttgagatggaaaattccaattcttttttatagaaaatatgagaagtttcgtttcataagctaagattttcgtaagataagattatgattaagcaaggagatgttagtatctgtaggtgtcatgtgtattattgaagacaacaacgaaacacatggcaattgtttgcgaagcacaggtatcacatgagaacaaataccagtcgccaaggtaaattgggtccatcactgttgctgattaatcaatcttgtgtttgtatatcactttatatatatggtaatacgataaaataaatcatagttattgttgctttctgttatacgattttaactcaaattattttgttgatatccaaaaattacctcaactctttagatatatgataatactaatgtacataatccatatatttattgtagtttccaaatatatccctaatcataaaaaaaatcttacaaatgactatggatttaagtatttccaaacaaaacaaacaggggaaaattgaataaagaaaaagaaagggataaatgtgtaaatagtcgacaatattgaggctatatttaatattaatttcttcgattcttctctctctttctctctctgtgagaagaagcaaaatcacgaacttccattaatcaccgactcgcagaacctttctctcattaaatcttgtggaaacctcggaaattgaatctgcgtgagtttcaatcgcttgatcgatccatcaaaccctagagatggtgaggaaaaaggtaccggaatggcttaatagcaccatgtggtctactcctcctccgccatcttcttacgacgatggtctcctccgtcattcccccgtcactaagatgaaggaagaggcagaatcgatttccgttgctcccaggcttaattctgctcctccgccttcttccaacacttcggttccatcgccgtcgcatagaccgaggaacggtaacagtatctctggcggtagtggcgaatatggacattccgttggtccttccgccgaagacttttcccgccaggctcatgtctcagcggaggtcaatgcaaccttccttttttgcttcatcaatgcaaatattcaaattcttccaccagcgttttgtggtctaattgctcagtttctgaatgttattgtttacttcttctttattggttttttctatagttgtcgaagaaggtgatcaatatgaaggaattgaggagtctagctttacaaagtttgccggattctcccgggatccgttctactgtctggaaggtatgcatttcaagaatcatgattttggtttgttttcactttgaagaatctatatcgtagtaatgcaacaatgcatagaactgtgtctgagagtctgataaaccttacttggtcattgaaatatgattctctttgcagcttttgcttggttacttgccacctgaacgttcactctggtcaactgagttgaaacaaaagagatcccaatacaagcactacaaggatgagcttctgacgagtcctgtaagtgatcctggtcttttgtttcttgccttggagttattgttagtctgttagttttgcatgctatgtctgtctaagttgatttcaagtaaccggattatcacataaaagttatcaagtgtgtattatcctagctgtttttgtgaactttgtaagtcctttttctcatctagaaagtttctgtacacaattatcttttcttgaaatgtgtttgtacctctaaatgattctgtggtagttagtcagaaatcacatggaaaatggtgaggtcaaaggggttcgacaactatgacttgaagagtgaaagccgatgcatgcttgcccgatccagaattactgacgaggaccatcctttaagcctagggaaggcgagtatctggaatacatacttccaggtactatatcttacatcctgggcaggtctttcattgtcttaatcttttagagagacctcagtgcattacttaaggacaggattaaaggttatatagtatttaatttgtccactagttccatcatcactcttttgttaatgtaggatacggagaccatagaacaaatagacagagatgtcaagcgtacacatccagacataccctttttctccggtgaatcatcgtttgcgcgttctaatcaggtaacctttttgtgttctcatcagcaaattttcacctatttttgattaatcaaagctcagtgacatttcgatttacatgtctaggaatctatgaagaatatattacttgtatttgcgaagttaaaccaaggcatcagatatgttcaagggatgaacgaaattttagcacctatcttttatgtattccgtaacgaccctgatgaagatagttcagtaagtagactctttttgtttcggtgataccctttaaccaactttcaatgataacgtacacagttttaaggtaacagtgctagtctggaccctcaataatttcaagatatgcgttcctttgaagtaaaagctcaagactgttttactaaatgatgtgtcacagagttacaaataaaaaagaaccccgtaatctattagtatgaatctgacctctctgtctaattttcttagaagattggttcgtgtatgatcttttttcttcaaccttgtttttcttcttctcagcttcaatcaatttcatattaactcttttcaaaatatgcagtcccatgctgaagcagatgcattcttttgctttgttgaattgttgagtggatttcgagacttctactgtcaacaactcgacaatagtgtggtgggaatccgatctgcaattacgaggctctcacaacttgtgaggaagcatgatgaggaactgtggcgtcatctagagatcaccacgaaagtaagacattggttttttctttctctcatgtctttttgttgtgacaacaaccatatttgtcattctactactatagtcctaatgatctgctttgtgcggaagataaattccaatgatcccctcagcttactttgtattcttgttctcctatccataacataataacagtggattggatcctctgagattgagactgacattgtatagattctttgattacaggtaaatccacagttctatgcatttaggtggatcactctcctcctaacacaagagtttagtttctttgacagtcttcacatatgggatgcactcttaagcgaccctgaaggtccgctggtaagatcgtaatatcttctccttgatgcatacccgaaatcaaatcgatagatgcagaagtcacattagtttactgttccactcatttgcttgattaaagaagacccggtctgtatcgtattgttgcaggaaagcttactggggatatgttgtgcgatgctggtactggtgaggaggaggctaatcgctggggatttcacgtcgaatatgaagttacttcaacactatccaactacaaacatcagtcatctcttgtatgtagccaataaacttcgttccaaaatgttagtataaatccttttgttggttttttctagcttttgattaaaccaacttttagttgcccccattacaatatacaaagcgtttttgttttgtttttatattttactgtttaaatggcaagacatgtttgtttgttacgttatcgttttggagattttctcggaaatcatgaatgcaaacaaaatgtggttgttacttgtcctccgatttcagtcttagaagccatatgaggttcttggagaatcattctcctcctccaaaacgtacatatgccaaaactcagagccttgaccacttgcacttccaccctgtaatgatttacacaaaagagaagcttgatattaccatttcaggcaaaaaaaagtacaagaatatttatgaccaatacggtggtaccgaaatcatctccactacagctgctggagctcgaagctccgattttggttcagttcttatcatttcggtttactgttgactttggtctttagcaggttcaaatcgaattaaatttcggttaagttccacgcaattcaagggaattttgcagcttcaaaaataagagaaacggtcacaaaacgagcaaaaattcaaaattagaaaatacgcagctcacgagtatcgtgatattaacaacaacccaattacatcattacacgtgtcgttatatacagatgggtactttcgtttataaatacacatcaaacgccttactaaaaacctagaaatagaaaaatcagatctagattcagtttttttcatcaaaaaagagcgtcttcataaacgcccttcgtcttcttccctggaaatctagtttctttcttccacgaaaatgagagagtgcatttcgatccacattggtcaggctggtatccaggtcggaaatgcttgctgggagctgtactgtcttgaacatggcattcaggttcgtatctagatctgtgcttcttctatatttttcgtaattttataattcagatctgagataatttggccatgcattgaccttgttctccggatttctgatgaattcgtatatatttagtacgtaattgtttagatctgtgtttgattccgatgtcttacaatttttttatgtggtttatgtaagatccgtttctcattttagaaatatttttgacatacctgtttagatctgagtttgacatagatttcttgttggttgattcaagatctgttcgttgaacaaaaaaaatattctaggtttgtttagaagatgcaaatcgatctatttcccatatacttaagcttctatatgcttagtgcatactgtatgagtttgtattgatatgttttggatctggaatgttacagcctgatggccagatgccgagtgacaagactgttggtggaggtgacgatgctttcaacaccttcttcagtgaaaccggtgcaggtaagcacgtcccacgtgctgtctttgttgatcttgagccaactgtgatcgacgaggtcaggactggtacttaccgtcagcttttccaccctgaacaactcatcagcggtaaagaagatgcagctaacaatttcgcccgtggtcattacaccattgggaaagagattgttgacctgtgcttagaccgtatcagaaagcttgctgataactgtactggtctccaaggattcctcgtcttcaacgctgttggtggagggactggatctggtcttggatctctcctccttgagagactttctgttgactacgggaaaaagtccaagttgggtttcacagtttacccatctccacaggtctctacctccgttgttgagccttacaacagtgtcctctccactcactctctcttggaacacactgatgtctccatcctcctcgacaatgaagctatctatgacatctgcagacgctccctaagcattgagagaccaacctacaccaacctcaaccgcctcgtctctcaggtattgtagccagcctcaaccagtctttttgctgttacattttcttgggctcatctaatgttattttcctattttgttttcaggttatttcttccttgactgcttctctgaggtttgatggtgccttaaatgttgatgtcactgagttccaaaccaacttggtcccatacccaagaatccacttcatgctttcctcctatgccccagtcatctccgcagagaaagccttccatgagcaactctcagttgctgagatcacaaacagtgcttttgagccagcttccatgatggctaagtgtgacccacgtcacggaaagtacatggcttgctgtttgatgtaccgtggtgatgttgtccccaaggatgtaaacgcagctgttggcaccatcaagaccaagcgcactattcagtttgttgactggtgtcctactggattcaagtgtggtatcaactaccagccaccaacagttgttccaggaggtgatcttgctaaagtccagagagctgtttgcatgatctcaaactcgaccagtgttgctgaggtgttctcccgtattgatcacaagtttgatcttatgtacgccaaacgtgctttcgttcactggtatgtgggtgagggtatggaagaaggagaattctcagaggcacgtgaggatcttgcagcattggagaaggattatgaagaggtcggtgctgaaggtggtgacgatgaagatgatgaaggagaggaatactaagaagaatgtttctaaaaactttggatttgtgtgggtttctctataatctcgtcttgtgagaatgggctcaaaactcttgggagtctttaatcgtgtgtgttttaaaacctacttctctatcttttcgtagccatgttatctctctattatctatttcctttgtgtgttaaatcgtttctgcctttctggtaatatcttatcactactatcaaaactacaagggttatttgaaggcatggaaaaaattcatgagatgttatatattttgcattttgacctaagcatgatgatactttgggattcttgagaaatatgtggcagtgaggatatagcagataaatttatgtagtaagatactctctgatcaaagtatctaatcaaagtctatctgattaaattagcgtgttgaataagaaaatgtgtattagtctaaccttaattggatacagttgttgctgcggttggaacaactgtatatgggctttatattttataaggtctataaacataaaactaaaacaaaaatgggctcactaaagaaggccggacaaggttaatcagatagaaggccagttacgtttttattagtaaaaaaacgcccacacgcgcccagtttattaattttagcgaaaaacggcagttttcccagtcttatacgcgcttagtatgcgagtgggtaagatattttcatttgacagttcgcctaccacgcgcctcactcatgggctcacttttattctgcccattgggctacaaggagcgtaatataattgacccacataaattaaaaaaggcctactagcataaacaaactattttgacccaaaatcgacaacctgagatttttatttttccccgactgaacaatgtggttaaatttttgcaatgatttttatctaatttcccctagaaaaatcatacaagcattaacctttactttttttctttttttttggtatatagcattaatctttacttagggaaaaatgatagttgtttaccatttctgctcttagtaatatatagatttaaagaaactactaacacaagaacaagtcggaaccaatgcaataagtactagtctccaagttcaaaaaaggagaactgtttctctgtttaattaacagaaaacaaaatggcaactgatcaaattacaaaatcatggagaagcgtattcaaaggcctgcggaggttgtggctcgtcatctatggccatagcagaggtggtggctgcttgttgggcttgtcctgcagcttctgcacccactgcaggggatgctgttgaagtcggtgcatcggtcagagacagaacttcaggctcatgcggacgcaagtctctgagaaggacaaaccctgatggagctagcttcatcggtacatatcggctatcctccatcaatttgatgtatttctcctgtgaagggactacacgcgcaggattgactagaatctcaaacgttgcttctggctcaaccttcttctccaccgttgtagctgtgctatcaacctggcatagtaacatagagaaaatatacttgatcaaaagtcaaaagactgatgataaattgatcatgaccttgagattaatcataggaacagcatttcccaaagtaaaaaatgttaagagcaatttttcaactcaaacagatacgaagatgttgggaattagatttgcattttacctgcatagactctgcttccttctcatctgacgctgcattggcttttccagcttcattgccagagttttcagctttagctttctgctctgcttctttcttagccttagctttggctttggctgaggttgagagcacagcagttggtaatttggcagcggtgttggcagtagcaaccgtagttggttttggatactcaaacaacgatggttttgcgtgtgacatgaattcaaactttgggactttgagatcgtagttcaaaccgatgaaggcggtgggtgaaaacgccaagcttatgaagtaaatcaatgggtaccaataccaaaactggctgaagacagtaaggccaatgactgcagtgactttgtcatgttttgtcttagacagcagtcttatcgtcacattccttccaccagcatcaagaatacctgaagccaaaattgctcccatcttgctcattgtatcttcatgcttgtcaagtattatcttctcaagttgacgcctgcaaaagcacagacaaattttagtcttcaaaagagaactattctcactccctccaattgatgaagagatcggaacttcactaacctaaatgctccaacgcgagaatcgcttgcttcactaatttggaccatcaccatggccatggcaatcagagcaccttgacgaacaaagtctacaacatctgatgtaagtggctccaacaaagatatcgcctcactcagaccagtgcctgcacaagagatgccaactgcaagagctgcgccatagcggacatgtggattgtacgactcggaaagaagggatacaatacggggagtctacagtttaaatattgagccaccagttaatgactgtaagcgagcacaagagccctaaaggcactaaagaaatggaatatagtgtcaagaagttaatgagacaaaaagaatatggagttacctgctctggatcagagtataagacaaatccaagtgcaagaacagcagtcctcctaacatcgtcactgacatcagacacagcaaagtgaagaagttggcggatggctttgttgtttgcagttccactgtaagccaatgcgagtgcatacattccaccataacggatgataggatcctgatctctagtcatctgctcaatcaaagtatctgctccctcttctcttccatatactgtgagagctattcctagagccaatcccctaaacacaaaaccagatgttggttacttaaaacattgaaataaattaccatgcacccacacacatagccaaaaatatattccagactttagttaccttattatcttctcatgctgagtctcgtgagcataagcgagcatctcacttgccttatcagttgctgttccaaccaacaatagacccatgcttatgccggcagcttcaccagcaacagcactgtcagtgtaaagcacacttttgatatcatcatatatgtcttcatcagctgtcccaagagcagccaaaccaagacctaaacaagctccgtgttgaataacctgcaaccatatttttttaatgaaaatcattctaaacaaaagactatctttttggtgatataacggaagactatccagaagaaagatatagcaaatcacctcaacactagtgctgcgtagactatcacgaagaaattgcttgattccctcaccatggtttgcatgaataaggccgagagcatataaagcacccccttcggaataaggactcccgccaccacctgctccgccctgaggcaagtatggggccatcagtgacctgccctgttgcaagtgacccctatgaataacacctaatcctgctgtagcactaaacttggcccaattggtggccctgcttagccaatcctgacaattcaaacatgaatggaaaagaaaagaagattaaataatatgccacatagttgacgttgaaacaagttaaaaagtggtagagaaaataaattttaccaaattctccctgagaaaagtgtcaactgtcgttccagcatgcattatagcattagcataaattgtagcactgtgacatacactgttccgcatctcaacagattgtttgattgtcttcaggatcagcaggtccgatctacaaagaaacaatggccattgctgtaaattttactatgtggaagaaacgacttaagaatgaaatatccttcgagatatcaaaaaaggtaaataaactgcctcacttgttatggctgtaaagaaactggagtgtcagttgtattgatgtctctccagataaaatccccttagcctttgttaacctctcagcgtacacagcgtcaacaggatctgtttcatgcacaattgtctgagatggagtttcatccgccatctgaacatcccctgcagtgttctcattctgagcagtagaggtttcaacagcttgaattgcttctacaggacgggtcttgggcgctggaaggcgatctctaacactcatgaggaatgcctggtgctcattctgtacaagatcgaaagagatttggaaagccaataaagcatcatctttgttctctgaacgaagaagcttctccaatatgcttgcaacgccttgtggttcatccaagaacataaggcattggcaaatgctcaaataatcaggagaagccagcttctggtaaacattaacaagtaaccgaagaacctgcaagaacgaagtaaggatgttatcatttacaaattaacagcccctacaaaaatgttttgagttgacataaagaatgcaatgaattataaccattatatttgtaagaaaagaataaagaagatgagctcatagtatcattaacataatacatctattaaaatccagttttgtggccaccagactcacctcatgtctatattctctttgattaacaaaagagtgggaaacattgatgcagtaagataatgttccctgcacattctcactctttatgatcgcttcctccaacttatccaatctccggcattctatagcaatgcccatggcttgttgatactttccgtcagtgatacatctataaaacagaaaaccatgtaaggaaaaacgaaaaacttgtagacagacataaataaataaattctgcatcccatacttgtctagcattcgttcaacaatggccaccaatctcgggtcaatttccaccacctcacttgactcgactgcctttgatctgagaatagcatactcatctattgctttggctgataaggaaaacagaagcatccatgagtaaaacattcaacattaaacagttagtaactgtaagatcactatcttatcatgtctttgcgtaactttctagcagcacaatcttattaaaagaaagatggacgttcaagtcttattagttagaaaatatatcgtataaactattttcttaatcttccatttaatcaggttggaatgattttgaatttacgcctattaagaatgataaccgagctagtgtctactgtcacagaattggataaaaaaagtagaagagaagaaagtagcaaacttcaaaatccttacatagaagagtatgaatataatcagaatcctctgacacatcaaacaaggatccagctccaagggcataggacaaggaatcgttaagctcacccaagtaatagaaaacctgagataaaacaagattaacataaacgttagaaaacaagtcttataatacaataacataacttgattacaggaaattcaagctctgaacttctgtagcaatctaccagcttttaaggtatccgtttaactggcactcgtatctccactaacaatttatataaaaccagtcatcatgtaagttaaataaaaagataaactgtaccttggaggccaacaaggcagcaagctgtctttgatgctgatcaaactcttcatcttcgtataagctctctctacaaaaaaatcaaaaaaaggtctcagaatagcacaaaaacagtttaagatctcaagcaaaagtagagtctctacaactttcaaaagaacaaattttccgcatcatgacggtaagggagcgtccttagcccagataacaatggttctattcagaatcaacagaattaagtaaagcaattcaataaagtttgtcacttgtgaattaacgcattcaaatctaactcgacacaagagtggaaaaacttggaatgtaataccctaactaagaaatatcaagagtgctaaaactcatccaaatcccataagctttactcccagtaagcaaacagaatagcctcacgaagggaaacaattaaaaaaaagagaagagagaattgaatacatgattgggacactagtggagatctcgggccaaaattggtcaaccaatctgatgagatatgagagagcgtgaagtttcaaggaaggatggggttcgttgagcattgccagtaacccaccggcggaactaaccatggcggcggccattatcctaatcggaaaattagaaacctagaggtggagaagaagagttgatcagacggaggaacacaagaaccgaactactttgggcgagcacaatttctgagttcactttttcacaagtctaatcaaaatcgaaattctagacttatcgaatattaagatacttacccaacaagtcaagtaatttttaccaatacccctaaatgtttaataagattacactttcaccccaaatatatatgatggatccaaacaaaatcataaagtcggaatacaaaattgggtctaatgatgggccagactatatatcttatagtgttaatggaccaatctagcggcccataataaaaactttattggtttgtttggaagtatagcatatgagtttctagtttacatcattgattgatgacacctaaaaagctaaagctcacaaataaatgaaatcacattttagggtttatatagatagttcaatattccatagattgacatggcctgtcctccaacctataaagcgactacatcttttatcaagtcagaattattttctagtaaatattttctcttagaccatacgagttttcacttaatatgaaattatgaatagacatgcagaaacattttcatttttagttattgccctctgaaacctggacaaccttcaaattaaattttaatataattgatatgaatgtatgattaatataattcaaggaactgtatataataattggtgtcatatgttcttcaatttttcaactatatttgcatcatatttttctctttgtgttggatgagatcaatatggcagttgggcagacaatgaaacataaaacttgtccagtgaccggtgaaacatctttaactgtttttactcaacagcaattatatcctagttgttgtacaggttgaatccatgcacattgacgaaaagtgcttatgctatcacgatctctctctaagtctatatatatactgctcatgcaagaagcaatttcgtatcaaaacatcctcttccaatagcttctaatattttaactacaaacattttaagtttccactaacaatgggtctaatcgccggtaaagtgcgtgtgtttgttttggtgtttgctttggtcacagattttactatgggagaagcagagtttggtgatgagaagcccttgtttcctcaccctcaccctcatcctctcctccacaagaagggctttaaaaaagaattcggcgacttaggtggtggtggtggtatcagcggtggaggcggctttggagcaggtggcggttggattggaggcagtgttggaggctttggtggaggaataggcggtggatttggtggaggaggattcggaggtggagccggtaaaggagttgacggtggcttcggaaaaggagttgacggtggagccggtaaaggagttgacggtggagccgggaaaggatttgatggaggagttggcaaaggagttgacggtggagccggaaaaggatttgatggaggagtcggcaaaggatttgagggaggaatcggaaaaggaattgagggaggagtcggaaaaggatttgacggtggagcaggtaaaggagttgacggtggagccattggaggaatcggcggaggagccggtaaagaaattggtggaggaattggcggcggaggtcactgagaatttgtttaaccgtaatgtgcattgatgaggagctaaaatccaatgcatgtcatttaagaaaactaattcgttatatatgtaacaataactgaaatgtatgtcgtttctctttagtttgttttactctttgaatatgattgtatcttgcttcttcgtgcaagtaaagtgaataaaacgattaaacaaagccttgtgcatttaaattgattttaaaaggtatatgtttaaactaaagtgaataagtggtagtatcaactttcttaatctacaaaaagttcttagctagatatatttaaacccgagaaaataatcacagagatacacagataatcatccctcgcgcgtaaacggtagtaaaaccccgtttaatgagttcaaatttgatggccaagaatgtttgacttacccgcaaaatgattccagagatcgaccggtttggaagggtaaaatggtagttttcaaattctccgatgaatttgaaaaccttgtcaagtaactgaggatttgcaaaccggacatgatttactccgtcctagccatggatcaatgcactgcacaataaataaacaatggttacttttcgaatctctgttcttaataaggggttttcatttgaatcagtaaagatccttacatccttgtggaatttgtgcaaacaaggaagatgacgtatggtgtctccaatcttcggagtttccagacagataacacaagtttcttgaaaattatcagtctgcaaattaacacataagcaatcaaatagaagcttttagtaacaaaatttcgatatgaaaaagctgaattttacaagtgaacctttagcttacttgaactgtagactctggcaagttgttaatgcgattagcagaagcaccgccatgtcgatggttgttttcatcaagagctagcagcaattcgtaatcatctctgcaccggaaatggttgaactatcaagcttcatatattgaagaatcatagtaagataatgacgaaattctatcaataagataccatactcagtaaagtcacgatccatatgaagaagattactactggtaatggagtgtccaatagcattctctaattcctccagaatatccattctctgttacattaaaaagggtaaggatgattctacggtacttaacaacattaggcaacattcaggatataaacggagttaaaaagagtaccgagtctaagcccatatcaattggaaaactgaaattcagagctgtacgtagtgaagcagatgcaccgcctaaacgataacctcgaccccgtgctggtgctctaacaggagcacgagcctgtggaggattgaatcgcctccttgaagaatgttgttgcagtcgtgcttccaggcgacttctcccacgtggatttgctgcgatctgtaattaatatacattggcattaaaacaacggatgagactaacatgatccctaaagccagattctttttaagtgcaagtttacgaaagaactctttcatgtttgataaagattagtctcgcatctgaacacagaaaatcgaaagaaccaggtaaaaaagacgcaaacacaggaaattttcttatccatgacttacggtattagagcttcgggtaatacgagtagaagcacgactagaagaagcccggagagaattctcttcttgttccatcgacctggctatgatttcatcgatctgttaccacatatgaagaaataagaccattggaaaccttgattgataaaaggatggaacatatagaggatatccaaacaaaagggagcttggaaaatgtacctgctcgtgtctgatcaacgactcttctcggtacagctgttcttgtaattcacgggccagtatctcatctgcttctatttgtcttatattcacatcagatacatcattttcaacacgtctgggaccccggaagacccttacttcaggagatgaatcttcaatttccaacacttgtgtgccatgccagtgtcttagatgattctggattcttggtggccttgaactagatggttccccagaagatctattaacagtaacttctggctcatttgaagccgttgaagtagtaaatccatttttccgccgtcgctgttgtctactttctctttcaactacaccggtttcacgcacatcaagtctggtaacagaactacaaattccgcgtgtgttactctcatccctatgattcatttcatgttccatatttaaatttcggttacgcgtactaacccacccctccaagccatctctactcgccaccctatttgcattaatacaaagaatagaaactcttatagcacaaaaaaagaaaagaagaagggatcatcctttaggtatctgttcaaacatctaatataagataaggaaaaaatattacctgctactagaaatttcaggtcttttgcctctagctcttccgtgaatatcactttcaggaacaatctctcttatgccaatcgaagatgcagtttcagaagctagttcctgttcaacactaagtgtgtcataggaattggtatcagcagcttgtctagctctagctgctatttcatgtggagaaatgcagccatgtctcaccaatcttttagtgcctctgttctgtggtttgccactagaaaggtcaattgtttctctatgaggaacagagccagaatctgctttttctttacctttattactgttccccggcagcacaaaggagttatgatcacctcgtaaaggagaacaaccattacttgtgcgcaactctcttatatcttcagatggttggtatctcgatgcagcaacatgaacatgtccgttacgctgattcagatttaaaaccggatttttctctacacgaggcgcacatggatcagtggagatggatttccctttatccttctcaacaacagttctcctaaacaaagcattgcctacagaagcacgagggcgatgtccactctcagttcgtgtatcagaactttcccggttgtccccaatttcagggactggtctggctcttccgtgaagatgatgattacggtattcctctctttgatatcttaatggtgctactggagaatgtggccttctcttaacctctctatggtgtaccgatctatctggagtatcaggtatgattaccatgtcaatatcagaattctccatcctgaaacaattaaacaagaaagaaactgaagcaatgcacacatgatgttatatattagcaatagatttttctgattagagagatttaaattcgtgttttgagactttcgaaaacataaaccctaaattataacttaacacaatttccccaaaggttaagatcacaaaagtggcaatcaacaacaacaacgacaaagattgacatgccttaataatcatctaaaactgaggatcagactagtgaaaattcatgggcatttcagatacaccaaaatgagaacagatattcctctccagaaacaattatcgtagaggagaaatctatcacaaatacaaatacgaaaggacagaataaattacccgattgaatttgattcaaatgtgggaatcgaaaccctagttgttcgatgagaagcaactgcatcgaacaatctatctcctcttgctcgggtgcaacgattggacctcagattattccgggtcgggtaagggattactgggtcgggttctgggtccaatattaatgatgttggcttagacaattatattgggctaagatccaataataatgggccttttaaaaacagggcctctttttatttaaattggctttcacaatttaaaactgcaatcaaatgcttagtcaaagtttaaacagagaagttagacagaatcagaaacccaaaccaacaagacaaatagttcgtgaaagttttgattatagcaaaatccaaaacgtgcatttattcactagctctttttacaaatggttcctctattttttgccaactttactaatttaaaaaatggattttcaaaaatcaaaaaccaaaaccattctagatctacaaaaaaatcaaggccttaaagtgtcttgaattttgaattaagaacacttaatagttgaaacttatcgttgtcgcagatgattacaaaacgatcatgaatttagtcgtttttttccgctcctacgatacaaaaatgacatatagtatagctatgttttccaaattttaaaagtcaaactcttctaatttttaataattctaaatttctattcactttttaataacactaaatatagttcttatttcgacgcattacgtttcctagaaatatttaaaatttcagctgaaaataaacaaatgcaaactgatgttaacaatatgattacttaatattaggttgaaacttgaaattcatggcattgtttccatttcaacgataaatatacttttctaagtctaattattttaaatttaatacctaaaatttttcgaaatcaatatagtcacatagaacgctctcatcacgtaactttgacaaataagtataggacaacgtacttgttagggatttgtttaatagcaaaactatgaaaacaaaaacatagtacaataatcatttattgggataatcaagtcaccaattgcctcaaaaccaattattttggcggtttcttaatgatttattcgagaaaatatcctctctcttttttcctacattttggctttttctgcattcaatttttttaaaaaaaacattactcttcgttgggtatataaaacaacaattcaccaaactaattactactagtacttgttttgttttaaataatgctattttttttctgtgacttttattttcaaatctgactatttaataatttcatttactacaataattatatgaattatttattgtcgtaatattttttaacggttatcgtatctaaaatagttattcccagaatccatgtaagcttctcgaccggactttgaaccttccccattggacacagccaaaaggaaccgtgtccatcttcggttcctctccctctgaaaacttattcctttcttttcaacttcctagtcttcttacttcacatatcatctctctttgtttagatctcttcttcccacgattacaaaatcctgtccggtgggttttccccgatcggggtcggatctgattcctcggaagcaacgaatctcgaggcttctttttggttttggctttcggggaaaggctggaatcatttctctttacggagattaaacataaagttccttacttcagctgattagcttcattcgtgcttggtctgctccttcttgatctgggtttacaaacaaatttccttttttggcaaattatttctgtgtttggggtttcgaatttcgatctgctctcgggtgttttagtgattgaatttcgattcgtactgtcttatatctgttcaaagttgtcggctttactctaggcatttggggattttgcttgggttttgggttttatctccaatttttcagatttgtttactctaatcatatatcggagagttgcaattaggtttttatgaattggaggaaatttgcaatcttttgtgtttcccagttgagagggttttaggttttaagatgatggaacttgagttgtgtttctccttgtgaaagattgagtctttgtaaagcttttgtttgttatatccaacttctgagatatggcaagcagcaccattgatgttaccaagtatggtcacagtcctgttcatcacgctgttgtcacaagggattatgccggtctcaagaaactattatccgctcttccgaagatgcgtgacccgtctgaggttcaaaacgaagcagcttctgtagctgaagagacaaaagcggattcaatcgcagctgttatagacaggcgtgatgtggttaatcgagacacggcacttcatttagctgtaaagctcggtgatgagacctccgcggagatgcttatggctgctggtgctgattggagcttgcagaatgagcatggatggagcgctctacaagaagctatttgtggtagagaagagaggatcgctatgattatcgttaggcattatcagcctctggcttgggctaaatggtgcaggaggctgcctcggcttgtggctacgatgcatagaatgagagatttctacatggagatcactttccatttcgagagttctgttatacctttcatttctagagtggcgccttcggatacttataagatttggaagaggggtgcgaatcttagagcggatatgacactggctgggtttgatggtttcaggattcaaagatcggatcagactatactttttcttggagatgggtcagaggatggtaaagttccttccggttctcttcttatgatatcacataaggataaggagatcatgaatgctctagacggtgctggagctgccgcatcagaagaagaagttcgtcaagaagtggctgcaatgtccaaaacaagcattttcagacccgggatcgatgttactcaggctgttctcttcccgcaattaacatggaggcgtcaagagaagacagaaatggttgggcaatggaaagcaaaagtgtatgatatgcacaatgtagttgttagcataaaatcaagaagagtaccgggtgcaatgactgatgaggagcttttctcaaacactaatcaagaaaacgacacagaaagcgaggatcttggagatatcttgacggaagacgagaagaggcagctggagttagcactcaagttggactcaccggaagaatcttctaacggcgagagctctaggatttctcaaaagcagaatagttgttctttcgaggatcgagaaattccagtaacggatgggaacgggtattgcaaacaggagaagaaaggatggttcagtggttggaggaaacgagaggaagggcacagacgaagtagtgttcctccaagaaactcgctttgtgttgatgagaaagtaagtgatcttcttggggacgatgattctccatctcgtggaggaagacagataaaaccgggaagacactcaacggttgagacagttgtgaggaacgaaaacagggggctaagagattcatcaaaagcttcaacatcagaaggcagcggaagcagcaaacgaaaagaaggaaacaaagagaatgagtacaagaaagggcttagaccagttctttggctttctgagaggttcccattacagacaaaagaacttcttccattgctcgatatccttgcaaacaaagtcaaagcaatccgacgcttgagagagcttatgaccacgaaactaccttcgggaacattcccagtcaaggtctgtttataaccttctatgatcagaatcatcataattgtccagctttttgctcatttcatttggatttgtgattgcaggttgctattcccgtaattcctacaattagagtactcgtcacatttacaaagtttgaagagctagaagctatcgaagatgagtttgttacaccgccatctagtccaacttcttcggtgaagaacagtcctagagaagaaacacagagctcatcaaacccatcctcctcatggtttcaatggatcaaaacaccaagccaacgtccatcaacaagctcgagctctggagggtttaatatcggtaaagccgaaaacgatcaagacccatttgcaattccaagaggatacaattggatcacagctgaagagaagaaaaagaaggtccaagagaagaataaagctaagaagggcaagtcatctcagaacagctgaagaaaaagaaaactcaagtaagaaaagagcttgctctgtctctgagaacataaaatactcaaattaggaaaaatctagcagataaaaaaaaaaacaaatggaaccttttttcctggttcatgtactaataaaccagggaaaaacaaattcaattaaatatagtgggggaaattgaggaatgatgtgggttaatgttgttgtgactttattttatatttgcttaattatgattctttcttcgtctttttgttttaatccttggagatgattattattactatatttctcaatcatcatcttgaaataagcagcaattgttggtattgaaatgataaaaattcgattataaactccgattctcgtaagattcgattccgcttatgttcaaatatctcaagtgtcttaaacttcagtgtttttactcgatatggatttacgaaaaactctctactagaatcaacacatttcagacacagtgctaagaaacaaaacacgtaaacaacaaggtaatagtgtcactggattttacagacaccacagtattttcttctagaattttctgcatgttctccgtcctccgatgcgctgcaaataaaatcccccaaacgcagattaatgtctttctaaggtaaaccggtaactaactaaaggtgttcctaataatcggtaccaaaatattttttaagaaagttagtgtattgtgtgtatagattacctaagctcaaactcttgaacatgagcaatatctttgccataagcaatatcaggccagcttactttcctctgttcaaagcttttctcggcctccgtcttgatcttgaggttgcttttgagacggcaaggctcgctggagacggcagtgcagcttctcccgccgtgtctcttaggcggttgatgttgtcgccgccgtcttcctcctcctcctcggaagccaagttgaccatcttcgtctgtcgtgttggatatattaataatgtcgtcagaacaagtagtccttgacggtacgtaacaagaccggactaaagccgaacacttttctcttgttgatgtcgccaggtggtccaaactaatgatccgagtcacccgtagtagtactcaatcgaacacaaactagacaaagtacttcaaaataaaacttgtgtttggggtttgtgtgattaaggttgaaagaaaatgaaagaagaaaggcatgagaaaaggagaaagagagtaattagtgttaatgtattgtgggtttaggcaatgatgcatttctggcatatggatcgcttttgtggggtttccttgttttttatttcaacaagtttttttatttgggtttcattaaagagaaattgagttcgtattggatctttaaacaaacaatgggagaagttggtccagatgagcgttctgaattattatatctttaaacaaacatatatactgtatatattttttttgtgtttcttcgatcgactttgagataaaaaaaaatatatatatatatatatatatatatatatatatatttaacgtgttgtattgaactgtataaaccaattcaatcatcgccaactatgtcagtaactttacctacttagctctctgccaaaagaaaacatttagctactaattagctcaaaagccaaccgactgaacgtccatcatcatctttctatttgtgtctacaatacactagatatatgtgtatatcactaataaatgtctaaatttgcattatcatcgtctatcatttcaatttctagccgttttggttttgtatacatatgtatctatccatgtgtctctatccatgtgtatctatccatgtgtcattgtgtttactgaacgtagtatatgcacttgatcatgtttagtaatatcaatattattattatacacacaacttactatatctagtatagtttatacacaaacaacaagatcatgaaagtgtatgttatgcatttgggccatagatggtactaataataacagctaacaaagtatgttaaggcgtggcgttggaatgaattatcattatgatgtttccattagcctatttacacctttttaaaatatactcattttacactgttcttgttttttttttcatgcaaccaatggcacatatcacaaagccaccaaagcttgggagtataatgtttctacaagatctaaggatttataatggtccaatcacaaatttgtagcgaaacaaaaataaaggggccaaattgaataactaaaaaagtattggaccgaaatgttatttaaaataaaaccaagtcgtcttgagcgaaaagtaaacgcgacacgtacggtcacctgattaacacgtaggcccatcactttgcttcaaaatgcacacttaaataaaacgagataattgttgtgatatataaccttcccccaacaaattttaaaagatagaagttaggtactatgatttgatatagttaagtgtttaacacataattatggaattacttgtaggttgtgacatatgctgttgattttttttaaagggccaaaaaaattcaaactaaaaaaaattgaatagcataagatttgatataagggaaaatgttagagaaataataaaagcataatagattttactagtcaaaaaaataaaatcagactttaatttggaaaaaatcatcggacaattttttatatacattttgaattatcgacaaatcattagaataaccactttctagaaacaatgggcgaaatatctttttctttttttttacaaaacaatatggttattaactacattcagcagaatatagttaaggatgggcgttatttatgaggacaaataacaactacggactagatttgaaaaaaaaacaaaaaaaactggccaagtcggagtcgtgtgagaataatggggacggatagggtacgtggcactattttataggttagaaaaacgaccagcccgcggtattttagatccagttgacgataatgaaccaagacgagaatctgtctaggttccttcttcttcttccacaatataattatatctttcttcacacacccctagagagagaaaggaaggtgttaccggatttaggagagataaagaaggtttcttcatttagaaacagagacacgaagtttgcgatgatgatgatgattcagagaagaggaggtgagagacaagactcgtcggcggcggcgtacaacgttgtccataagttgcctcacggagacagtccttatgtccgagcgaagcatgttcaggtaaatttaatatacatatgtgtgactttatccaaaggaatcgagtttatattgatttttactgagattttggatttgatgtttggttcagttggtggagaaagatgcagaagcagcgatagagttgttttggatagcgattaaagcgagagatagagttgatagtgctcttaaagacatggccttgttaatgaaacaacagaacagagctgaagaagccattgacgctattcaatcctttagagatctttgttcaagacaagctcaagagtcattagacaatgtcctcatcgatctatataaggtaactaaactctgaccgagaccattctcttgtttctctcggttaccgttttattagatagtgaaattgacaaacttgggattccgaattttgttgaacagaaatgtgggagaatagaagagcaagttgagttattgaagcaaaagctttggatgatatatcaaggagaagcattcaatggcaaaccaacaaagactgcgagatctcatggcaagaagtttcaggtcaccgtcgagaaggaaacctctaggatcttggtaagactaataatctcacgactagtctttagttgtgattagatttctcaagtctcttgatcagtgaactgatggaatttgaatgaatgtggtgttacaggggaacttgggatgggcttatatgcaactaatggactatacagcagctgaagctgtgtatcggaaagctcaattgatagagccagatgcaaacaaggcttgcaatttatgcacatgtctcatcaagcaagggaagcacgatgaggcgaggtcgattctctttcgtgatgtactaatggagaacaaagaagggtctggtgatccgaggttgatggctcgggttcaagagctattgagtgagctaaagccacaggaagaagaagcagcggcttctgtgtctgtggaatgtgaagttggtatagatgagatagcggttgtcgaaggacttgatgagtttgtgaaggaatggaggaggccttataggacaagaagacttccgattttcgaagagatcttaccactgagagatcaattggcttgttgatgattctctgtgtgtttggattgatgtttgaatactgaataggaacctttttgggtagaagaatgtagtgagtgaatagagtttacctcttgtaagctttttcgggtgtcgttgtctgttattaccgcaatgtcaaatgatctcattccaaaagtaattccaaaagtagttgatgttatatccatagatataacactatcagataatgtgtcaagttggttggaggaatataaaaccgatcattagacttgtagattacaagagcataaaggcctaacctatataataagtaaacacaagaaaaagcttaaatctctcttccaaacagttgatttcctaaggatcattctgggtaccacgtcaatttttgtttgcctaaataaaagaagaaggaaaaatacaaaagagaaggataaaaggggataactataccgggatggttctaattagcttagtagctatgtgggtggtctgatccaccggaatcgagttcttaagtacacttgaagccatggcaaaccgacaaaatgatgatgagaatcaaagcgacaatgatgccaaagactatgagctttatcttcatgttttcgaaccacaactttcttttcatctttgttccttgtgttctaaaatcttgtgcctattaacaaacagaagaagaagagcatgttaccactagataatagtgatgtagtgtctcttatactgtatttgagatgtggttattattaacctgtgagcgaaggttctcagttttgtctactaatagctcgattttctctccacggtcaaggacctgccataggattgaattgcagaaaacacattcagcttacaggtgaggagttgtcgatgaaaaacatggataatttagtctaaccttctcaatattctccatcataacacccttcacttcagtcacctgagccttaactttggaaagtttgctaatctcctcaggatgatccgcacagtactgcatgtgctccttcaatttagacctacattcattacaacaaaaccatttaaaacacacatccacaaagatggaattgaaaagaaatgctctgactaaaaatgttaaaagtacccgaattctttgttcaagctgttggctttagcagtggaagcttttccaccaccgtatctcttgttgaaatcctccttgactctctccaagaaagccattggtatctgcctcccagcagattcaataacaacaacacaataggctgcataacaacagagggaaatgagaaatcttattgtcacattccaactaaagcaaattcgtgcattggacaaccaaagctttccaaacataaaaatcttcacaataaacattccaaagaagccatgcataaagctgattaaaatcagaacgaaaacaacagattgcatatccaatcaagacatggcattgattagaagaaaatctgaatataacacaatgccacaagaatcgagagcaacgaatatcctacgaaattcaaagctacactgttctcgaacatttgatttcgaaactaagcattcataagaaaacagatgaaccaaggcataaacagagaaatacagagcaaaatcgacacagatcgggagatagagacttactgaagccattatcagcgagataattgaaagtgtgaccgtcgcaattgtaggtaaatttgttgttcgaggacggaagtttctggagacactgagcggcgacggaggtgaaattgcccttgaactcggtatactcggcgaggatcaccgtaccgcgagcgacgaagctgtagatcaacgattgttgtcccattcttccttttatccagatgagagaaagataaaaaaacgaaacctaagaacaccacaaaaatccgatcgaattgatgagagagattagtaagcgatgtaaaaatacacaagggaacgaggggtagcgatggagaaagcaggacgcagagatcggagaagagaaactatatgagagcgctggatttgcgcgagtaacagagacattattttccctttggtaacgttcaaattttgaatttttaaatataaaaagtaaataaaaagaaaaattcatcatttgtatagtcgaaaattgccttaataaactttattttggtaaataattcacgtctaattaataatagtatcttcatgtttttacaccacggtggctcgtttttcaattcaaatgtgaaatgtttatcaatgagcattttaaaaaacaaatatatatatatatatatatattatatattgattttttataaagaaaattgcgatgtgtaagggatatttgagttgttaaattttctataaattatatgttatgttacttaaaagaacgttcaattgataatgttgcaaaccttcctaccaaaaaaattaaaataatgttgcaaaccttttctttcattccaattcactaaccttctattctaaccacaacctaactacctaaatttcaattatttgattgttgatcaaaatctttaggaacacgttaaacaaattaattagcaggttctaaacaatgcagagcaattgtagatgacaagagataacggtagaagttcgaattttgttgctgtaacaagatactatgactatgagctccccccgtccattaagaattaagaaatttggttaattacaacatttgtttttatgtttaagccttttgttcgtaactgagctaatactggaatcactgatcaatgatgaatttggaaaaaaagatattttgaggaagacagagacagactctcttcgaccatgggacctgaacttgtcctaaagttggtaattactaatttgtgccatcggcagagtccacgagctttttggctggatccgggcgggtccaactttctcgacatttgtttgatctctccgttttgaaattgtttttttttagtccttaaattcaaggttttatactatttttgacccaatctgactaccttaaatgacaactttacccttgcccgcttttcaactttttcttctcccatgtccactttagtcctcgttttgttctttcatagtcttctagatctgtagtttttttccgcgaccgcccaaaaaattctctgatcagacggtcgattggatcggagatttaaggtaaagaaaaaatggcgcaacaatcgttgatctacagtttcgtagctcgcggcacggtgatcctcgttgagttcactgatttcaaaggtaatttcacctcaatcgctgctcagtgcctccagaagcttccgtcttcgaacaacaagttcacctacaactgcgacggtcataccttcaattaccttgtcgaagatggattcagtaagtcacttttcgtttgatctatgcataggttttaatcttacaccattcggtgcttacctcgatttgtttctaggtttatttgcctaacctatcgattcgtatggatttgtgcatcctgagtagtctgatttcactgaggaaccgcatgaaccaagcttttagggttagatctatatttattaaacgcaataaatctctgtagagtcttacctgtataatcactcagatttggacagaatccgtggtagctttggttgatactatgtggaagaacaccaacattgatctgagacagggtttttactggttgctttatttgcgtatagtttcctaggtcatgggttttggctgg

SEQ ID NO: 12 - DNA, 49781 bp, Arabidopsis thaliana
cttgaaagccggaggggttgctcttaatttaactgttgcttcacatgtaagtgtttagttagcaactctggtctggagagtgatgtatgtgtattcaaacatgttctcacattggttgtttgtggaaaaattctattaggtttttatgatggacccgtggtggaacccagcggttgagaggcaagcacaagacagaattcataggatcggacagtacaagccaatcaggttagactttagttctctccttcaatctctgtattgttggtgggtaaaaacaatgtgtcaatacatgtctgatttgtggaattacagggttgtgagattcataatagagaacacagtggaggaaaggattttaaggcttcagaagaagaaggaacttgtgtttgaagggtaagtaaaacattctcaacttcttttccgaaccttaaaactactattgaaggttattataaacacatttttgttcattacaggacggttggtggctctcaggaggctataggaaagctgaccgaggaagatatgaggttcttgtttacaacataacttttttctaacagatgaaaacgcttttgtatgaccatgaagatctggtctcggtgtagtagtatggtggtaatggtatgtgttacttaagcccgtttttaacttcttacattcagagattttttgatgatgatgacacatctatgatttggtacttccttgtaagaaagtgtttcttgatgattattgtgaataatagattaaggggaagatgaattgaggttaagtagtaacaaggtaggtcttaaccttttgtcctttaaaattatttaccatatgataattagagatttgtgtggaagcaaaggcataatgaatgactcatcaacatggcctaaccgaagcgtaccaaattacccaaaaaaaaaactaaatggaaatgcgaatccttaccaaaagattcctttcgaatcttttagtttgcctaaaccctcaaaatgaccaattaaccaaccaacaaacaaattcggcacctttttgttgccttcatttctcactttccccacaagttaaaatcattacactcccacaaaaaaccatctttagtatgttttatcataattgtcaatcttttacctaacttgactacctctaacttcatgcaactgaactaactagtgtgttcaagataattggtgcaaattctagcaatacttggttcaatggctcttgtccatttgttctattagattaagaaatcaaagtccaattcacaattgttttaactaaattgttgtttttagataatcaatcatgactcatattataacatataatcaatgaataacaaaaattggatttgtggggataaaaaatgatgaattaggaaatgtacatgaaaatctctaaacctcaacttctactaaactaaaacaatatcttcactaattgaatcgaataatcaacgctccttcatgtgaaccgactaattccgtcgaaccgtgatccaatcctcaccgtccaagtcccatgtggactccaccacaacatgaccaatccagcttagcactccaattctctcatcctcgtgacattcccaccagcttgaacggtcctctgacacctcctcttccactgatctccagaacatttgatccgtcacacttgtcggtgagttcgtaaccaaaccggttaccaattccggttctttattaaccaagaacggatggtttagtagttgactcgctgtccatctctccgtcgcttcttttttcaaacactttcctaaaaaatcctttgcttgttccgtaagcgagcaaggcagctctggtaactcacctaaatatccgacccggtaaagaaccgaaaccgggtcggtaaaatccgccccaatccacggctgagacccggtaaccatctctatcaccgtacaacccaccgcccatatatcactctctttcccttgtctctctccacgcgccgcttctggagccatgaacgccggcgttcctctaaccggttcggttatttccggttcaacccatttcgcacacccgaaatcagcgatcttggcttctccgttctctccgaccaacacgttgcttcccttaatgtcgcaatgcgcaattccctttgagttatgaatgtactccaacccaagaagtatctggcgcgtgtacttcacgacccgagcctcgtcaatgaagccgccgttcttggtcgctacgtcggtcaacgttccgtacggcgcgtactccataagaagactgtaagtcgtagcttctccgttgttgtggaagggctctctcgtaatttcgcatcctctgtatccgatgacgtacggagagtttaatgaggagagaatcttggcttctctttgcaagaactccgaccggtgaaactcggcggattttacggcgagtgtttcgccggattcgtgacaagtggcggcggaaacggtggccgttgagccacggcctaaagtttttcctctagtccaattcatttggagaatgatactaaaaaagatttgagtaagaaaaaaaaaatggtttttttttttttttgaatgtttgctttcactctgttattgcaaagaaagtatatatatatagaagggtttcagattaattttggttcggtaattagatagtgtatacttttggtaacatcgagtttatccaccaaagcgaaaataaataagtgtacgtatgtaatcgtccatacacgtggagactttggaaaaaaaagttgattaccaaatgtgatccaatttcgaatcttcgatgtgattaccaacaaaatatgtgtagagagaagaagaagtattagtacaaaaataggaaacgtgaccaaaaaagaggagtgacgcggcagtgaacgtatttaaggaaaggtttgataggaagtgacgtgacacttcgttaggaatggtagagtctcattggcctttgtactcttttgagtctagaaggtgatgacgtgtcgaatttcaggtagtcaaaataagtatttgtttctgttccgaccgggagttccgtatttgtctcgagccacgtgtcggcagaggtaggatgctacgatgtgtcgacaagtgctcaaatctttctccctttttttgtattttattttattttaggttcgtaagagttaggtgaaaaacaaaaatgtatgggaaagtgcaagcacggaaatttggtagatttcatggatcatattcatgttgatgttcttcacacttggagctttgtacatctcttgtaacaattatctggctttacattttcttttaagaattgtaacacatatacacattttttttttttttttctgcgttttttgaatgtgtttggaaattgtagaagatgtttgactaggaggagcggtgggtttaacaaccatcatcatcaaatctgactaggtatactatagtattcatggctgactttagcaaattaaaaattaaaatgtacatatagaaccacgggtctctaagatattttggtatcttttccccgttttctctaaatacctaaaatgtaatcccctcacttattataatgataaactagtgtgaactgtgaagattcgattatgttgattttatatcacgttctcaaatgaggaaaaacagagaggtatttaataataaaaatttgtttacgaattagtagtgattttcggactaattgatcaagaataaaaaagtcttcgacaaaaatagttaacacataaaaatgacgtagtaataattaataagaaagatttctcaaacttaatatattgttacaattttagaatataaaagacgtaaacttgtaagaagaagcgtccgacaagatgagttttaacctaaggcagtagtagtactgttgggtaaaaagataaggaaaacgattttggtcagacatttacggctgtccactgccatatacgcacattcacagctcatacgcacatgtaccctttattattaaccacatgcataataacttgcacattcacgtgtttaaaatttacattttaagtttttaaagctaaaataataattgtaatgctatacttataaaaccaaacataaaacagatgaccaaacgcaaaaaagtgtgctaattaagaaacttattgtacattggtgaattttattttattttttagcattaatggtaagaaaagtacccatgaataaccaatgaaaatttgtattaatcattatgaatcaatgcattttcttggatgataatgtaaataaactgatcatttctaattagttggacgctagctatgtcaaaccaaataactgatatattttatttttcttactgttgggtagaatagaaatatgttcttaaagttgtttgataagccttttcaagaatgttcttgtggcgtgtgagcggtagagacaacacgtggcatgaaaacaaagagaaacgcaaaagattcgtataatgaggaacgcctacttcaagcaacaacctactcaattcaaattgtttgaattacattttgaaaaaagttttatcacaaacactatgatatctacttttaaatatatcatttgtaactatcaagttatagttcgttcaccgttgtttaccaacacctactattacgatagttaaagtcatttcctctacgtcagcgtttgattatacgcatttgtatttgtatttcatttcattgtgcttaattagatatctaacaaatagctaactttaaatgactttatgaaatagcacatgtttgatttgtgtcaatcagaaataaatatataaacaaatataagttaaagacgaagtctgttacgcatggtaaaggcaaaatagagcgtttttgttgcttcaaagtacaaactttagatgtcaatatcaaagagtatgccataagtaacttatatcttctctcttctatatgtgaaaatgaacaactatgtatttcaatcatgcatgtttctgcaatttagtagatgaatcttttgttatatttcggttagtataaatggccactactactggtttattgatttgcagacttatgaaacaattaaggtcgacaatcaacataattaatagaaacgataaacttaatcaccacaccacttttgtcagaaaaaaatcacaattttttttgatacaattacttaatcgatcatttgacatatatataaagtctgaatacggatttgcatttgagtttaattaagtactactgtacgttgtaacatgacaagtgacgaatagcagatttgaaaatattattaaaagaaacaaatagatggaacatagctagcgctacgtacatataaatgtgaacttgcacaaaagaagatgattcaattccatttatggcaatgtggctcgaccgtgattaatggtacccttaaacttttatgttggagttttggaggttggcatagaaaatgtattgatttaaagtaatgttaatgtagtacatacaactattcattgtacaaaaaaccaactgttcacaacaagtggtttttctgtcagaattttcagttataggacgttactacattacaaatacagcatcagtcatcgattacactcaaaaccctacgtggccgaaaaattgtcagtctataatttgaggttgtgaattatccattaaataatacgccccagccagtgaaatcccaaacgaatcatttcatatgattacatgtatattaatcttttacaaaaatatatattaaagtatctgagtgagtagttattaacaagtgttgtttagaaaagttggaaccaaatactcgtcacaaatcacactaattcatttggtggtttatattactaagctagcgcaattgtgtaaataaaaataagtattgattaccaccttaattatgagtagttatacggttgtaattttcgaggtaccgtacaaaagagatttgaggatcagaaacaaagaatgatgggaaactaattagttttagaaacataatataatgcgtggcttataagttactaatcttgtaataatcaaattaagtggtttcccaaaaacaagcaaatcacttgtgttgtgtgtcatgcttatatacatacattacacagcctaacttaatttttaatatatattttctagaagaacaaaaactgtccattctttgatttaatgttagccattcagaaaagaaaaaagagttctcaaagttacaaggtcgaatatcggtaattaacttgctttggttatgactagtgacgactacaagagattatggacctatcaccaaaaaccaacatcttggttatccaaaaaaatggaaaacacaagagactctggattgactcagagtccgaacaagttcttgaagtctcagttgttatgtgtgtatccacatgtggccaatatcaatggatgtaacccaatgaacaatactactagactaacaaccacttggggttacagagtaagtaaaattggatccttgaagttattgaaaatgaaatatatatacatgaaaacaagcaatctccaagccccaggaaaaacaagagagcgcaagagagatagagagtacactgtgataatattactctgtcttggagattggaggcactgaaagtttggtctcgagcataaatgagagatcatgcatctgtgacatcagctcctccgcaacatcactcattgacttgggaactgttgtcgttgtgcctacaacaagatcaactgtttgatctttactaccatcaggatcactcggtctgaaatcaaaagcgaaaaacacaaaaaaaatccggaacatgttactaaagctccttgtaagcatgaaatgaaggttatttagagagtttagagaataaggaatcgactagaaaataagaaacctgtctaaggttgaggttccagaaggtatgactttgacttcctctgagttggttttgccgccactactttcagaaaagaaatcagaacgtgagatgctatcaaaatcaaggtctctgttattgttattttccccaaacaagttcatttccggatttttttcaccagagggattcgcatgaatggtgggaggctgcagagatgtctgcagaatggttgaggatgtgaaactatcccaagtcccaaagagatcatcttcttgacatttgcctatgtcagacatcacgcttgtatcagtattctgcttctcatccacgctctgttctttaacaccgttcttatcttgcgcatgtccataaaaaatctcaaattgggaactttccatggtttgagaaagtggattattaggagtcttggagttagccgagcttgcaaaatcattccagtcatcgtcatcatcatcattaacatctgtaggggtcttctcaatggattttttttcattggtttgccatagatcatctccgatccaatcaatatccatggatgaatttccattgccaccgacaatctgtccctcattcttgtcatggacggctgagtcgttggtttgggcctcaccagtgacattaccaaataaatcatcttgcaaccaatcgccagcttttgaaacataagcagttgaagaatctgccggttgtgcatagagtaaatcttttccggaaccaaagacagaatccatatgagcagccaaatcaactggagaacttacaaatgggtcaccatcaatctttttctgagaaagattttgatcagcagattgaaagtcagagtcccaatcagaagaagcagcaacaatcttgtcatcaaaagacttaaggtcagcatttgataatggtgcaccctcaaagaaaccaaaattttcattctctttagaagaactatttctctgagcatcttctttaccttcaaacataccaaaactctcatcctctttagaagaactatttctctgagcatcttttttaccttcaaacataccaaaactctcatcgtctttagaagaactagttctctgagcatctttaccctcaaagaaaccaaaactttcatccactttagaagaactagttctctgagcatcttctttaccctcaaacaaactaaggttttcatcctctttaaaagagttccgagcatctttctcctagtttccctgcgctgcgaaagaaacactttcctgcgcatctcgtccagcaaacaaactaagattctcatgttccccagaagaaacaacactcttaggtgcatcttttttatcaaacaaaccaacattatcatgctgttgcgatccaacaactccctgactctttacactatcgaataagctaagactacgtggatccttaaaatcatcatcctccacaggtttactctctgcctgctccactttggaaagatctcctctccgctcaacgaaataatcatcaagattaatcccgcctagattcagagggtttttcttctgtactgattgtccatcatcagacttctcctctaatgcagaccattgtatttccaaatcaagaaacttagacaaagcaattccttttgaaggcggtgccttagtagctcctctgcttgacccatccgtttcctttagtggctctaccatctcctacagatgaaaagttcgtttttttgaagacacaacacaccacattctacatctgactaatacacaatcagctaggaaaacaagtaattacaaattagtgagaaaggtatcgacttttaccgatccatcgagattaagagaggtgagaaaccatttgtaagcagaagtggaagtaaatttgatgggatcaggaggattatcactcgtgcgttgctgatttccacagaagacacagatcagagactcgattcctcgtaaaagttttcctttgcagtttcggcaacgaaggtacggagctgaagcatcaagttctgcgattgcctcctcggatgtgggaaggctggggaaggatgagtccgagcaatcgtcgacggaggtgagcttggcctcctttcgaagcgagaccttgagttggtttatcagatctaccgagatctccatcgccatttcgttaaggaatctagggtttgaggatgaagattctgagtcttcctcctctgtatcaataataatatcgaaggatgagcaatttggagagacctgccatctgaggcaaagcttctgcaacatacccaatcaattttaaccaaaaataaccagacaatcgtaccgaaaccggtttaccagatccgtccataccaaactacttctttgaaattcgtttgtttgactcaatttggtttatgagtctttcaaatggttcgttctcttgcttcaatgcttcttgactaaaaataaatgatttattaatctcattgtacaaataaaaaaacacaccttgaacatcaatcattttggggtatcttataaaaataaaataaaacacaacttaagtaagtagttagatgcagcaatggaattacaatgagataaaattagagagataccacaacgagccaacgatattatcccatatagtcatttatgccacaacatctctgaacaaaaataaaaagtctacaacatcacaatgaaattcagattttaattatgacttatgagcatattggtgtaatcaaaaatatttttcattacactacgataatgtatttagaacttaattgaaacaaactatatgcaatcatttcaattaaaattatatttttgttgcttcattaacttttggaaaacgaaaagattagcggatgacgaaaaaaaatcaaaatttgaatatagtttgtatacggaaaaaaaatccaaaataaataaatacattaatggatttggatttaagttggaaacaacgccattttaacgtttgcgctaaggcatggcgcaatgtgaactggatggagggttaagagaatgtgggcctataaatattataataatgggccctgaaaatgaaaattggcccaattagtggatataaaaagtgacgagagattagtaaaacccgagatcagcatgtgatgactcacactcactattaaaatcttaaacaaaaagcttactgttcatgctctgttttgcaactggacagtgagattaacctacaggggaagaagaaggtgatgtctggatttttatacaatggaacggaagtggtcctttctttttctttttctgagggtaaccccttacttctcatgtaacggcgctccatggttttctatctaactgctgtgcttgtattattctgttctggcttcttttgaaaatcttacagggatacagttattgtgccaaaacattgggctcgaagagaacatatttacgttgattgtcacaaattgcgggtagaagatctctttacttaagtatatatgtgttgacttgtcgatgattttaaatcacggtaacacacaagtaaaaggacacaaaagccccatctaagatttctaaatgcaaagccatccccgacatgggttatgttagcttgtcctttatgcttaagatcaaagaaacccaaaaaccctaatcatcaacaaaaagaaacacaagtgtggtcatttattgagcttaactatcatacctatcaatcaacggaagtatggtgtaaggaccctgtgacaacgcaaaatggaagatgttaagatatagtaagcctatgagaagacgaccataaattaacttgaattgtgcctggaacctacgagaaggaaagcatgttgcgaatcttgggtgcagcaggcatgtcccattaatagtgaatttgaaaagaaagtactgtaagacgccttcgagattccaagttggatggaacatccatagctgactccttgacagtaagcaaaagatgaagcctcttgatctgcaaaagaacaaaaacagaggaaagcagacaaaccacttaagacattcctcatgcaaagatatcaaatgcaccactgtggtggaaacaagaatgaaataaatggaatattttatagaggatgagagacttgctttttctttccacgctttccttcttcttcttttttcctagttcaatctaaactttttggaactagaatatgtatatatgataatttggataatggtaatgggatatgttgagacttgagatgaccaaacacttactttgtttgttttctgcccacggattacggttaacttcagacgaatgttgacaagtataacgttgactactatagaccacttattccatttacatgtttcgatattcctcacatcagctgtccaacgaggcttgaccatttttcaataacattggttgttttttccccatacaatttcaagaactaagtaagattccaaacatcagagggccagcagcgagtcaatgtttgactttaaacccaaaatttgttttatgatgttgtaagaaaagactcattaagagcgacccagcagaaatatgtgaataaacaattaaacaccctatgaatcataggctatgatgttattgttaagactgtaaactaggaaactaagccctctgcaacttatccagtatttggaaaaaggaacactatcaagaaaccgtaaatagtgtttttactttaaaagaaagaaaaagaaaccttgaacatcaattattttggggtatcttatagcagataaggctaattaagcttgcacattcactgagcttctgtagacttttcatttgaacaaaaggtgagatgttgttgaaaccctaggaaggtcttttatttcctcgatgatcaactctggatcttcaagatttaacctcagggagattgttgcggtttttaaacgcttagagttggccaaaacgtatgtcaagaattcttcctctattattctatccccatagtctctccactcgaatatctcgagctgtgatgacaagcattcgggaacatgactcggttgtttccatgaccatgggagatcctcgggattatagacaaatttctgagaagcaataagggagggctatatatgataagcaaaaatttgaatagtatagattatagatagtccattaaagcaagaagaggaggaggaggatgatacgtacataatctaccaaaaactcttttagttttggagcatttccaagtaaacgtaggagtgtttccaacatgtctggtccatagggatatatgcttaactttattagtcgagagaagttgatggtggtacaacgcataacctgaaaggaaaacaaacacaacttaagtaagtagttagatgcagcaatggaattacaatgagatgaaattagagagctagataccattgcatcagacaaatgcattcgaagagacaagactgaagaaaaagatgttagaaatttgtcatccggatgataagcctcatctacatcgatagttgcatcctggagacagggcatatcctcgatggagaaagattctagtgaataatcagtgatttgacaggtgttcactgcaggagcatttacaaccaaacacctatcggtattgtctactacatcagagcagagattcttatacgttaactccaataaagaaggcactttgacagtaaacgttttcacattgtcatctattttccttagcacgaacaagaactcaagaacagggcagctcgataagaagctaacaagagaatcctcgtctttatacacaacacagattagttcgagctctgtaagggatgggagataggcggaagaaggaacattcacgagaatctggtcagagagagtcagttcagaaagagaggtgcaagagtaaaggctcttgggcaagctggttggacctgcggaccagaggagcttgattgttagcgtcatcaccaaacaatcaacagcttttgcaacccactttccgatatcaacatcatcagtggtagggcactgtggaccaagttccatgcacaagctgtctattacaggcgccttgtggagttgcaatgatttgttaagaaaccaccaaacgctcttcttgctttcatcatccatgtcatctgtatactcaagtgtccttaccatcgtccaaatcgagagccatcgttttgacagaatcatggtggctactacgtcttttgtcgggagaagatccaatatcactacgagtaaatcttccggtaaaacactgatcctgtcttcacaaccgatctcttcaattttggcttccgccatcgaaagcaaccaaaataatactagggtttaggttttttactttcaaaacagcattagttattaacttatatagtcagacttattctacgtcgacggccaaccggcccaaccggttccagctaggcctaaagaggaaaaagcatgttggaccaagagcaactaaagccccattcaataggttccggctggagttacgctataaccaaaggcccaaacacagaataatttcacattatgattgtaatcaaaaggtaatctcctgaaccgaaccaattcaaatcagaccaaaccgatcatgtcgagcatttgaaggagagacattgacgcaaaagagaatcttaaatctacacgcttactatttaactgtcgacgaaattagagagcaaaagagtcactcaaaagtgtgtgtgtgtcaaaatctctagcaccgatttttctaaataacgtcgtctcacagtcacacacacacagctctaaaatccctctacgaggtttttcttcaaactcgccgaaaaatctaatctttacgaagacccagatcggcggatctagagttgaaatggcgagacacacggcggcgctgaagatcgggctagctttactggggctgagcatggctggttacattcttggtccgcctctctactggcatctcactgaggctttggccgccgtttccgcctcctcttgtccttcttgcccctgtgaatgctctacctattccgctgtcaccattcccaaaggtaaacagaagttagcttgatcggtgcccatgatttcaacagatctgtggctaaagtttactcctttttgtagagtgatgtaggaatttagcaactttatatcaaaatttggtgttgtagctggtggtggaagtaaggattagtagtatcagttggattttcaagtttggctttttttaatctggtgctgaggttactgaatttgtaagctttgagcttgattcgtgcttgagtttgagtctgagaatgattagtgtagtaagtaagtgtagatctacttgaatgatgtttcattcgtttaggtgttctccatcttaaaaagattatctcagttatttgtccacagtgttgatgctcctattgtttgagttacattaatggttcaagttatgatttgttaacttctcggattgtggaagttgaagtttactggcgactgttctgataatagccaatcaacaaacaatgcagtttgtttggattgtatgcattgtgattgcttttagaccgatttgattgatagaatttgtttagtgaaccccaagaagactgtagtatgaactcaacatcattatttgtaatgcttgttgtaacagatttcttaagttactatatgtttctcgctaagctgaatttatattcttcttcagatgttaccaattccaaaagattgatccttttttacttgtttcctttcttcttgcagagctcagtaatgcttcttttgctggtgagttaattgtgaatggtatttcgttaactgtatcagtttaaaagtcttttagcaatcgagtctttgtactaaacttctctagttttgaatgtgtagattgtgcaaagcacgatccagaggtgaacgaagacactgagaagaactatgctgaacttcttaccgaggaactgaagctgcgtgaagcagaatctttagagaaacacaaacgagcagacatggggctattggaggccaagaaggtaacttcttcataccaaaaggaagcagataagtgcaactcgggtatggaaacatgcgaagaagctcgagaaaaagcagaattagcactcgccgagcagaaaaagctaacatctaggtgggaagagagagctcgccaaaaaggatggagagaaggttccaccaagccaaatgttaaatccaaaagcaatgttcaggttgcttaggatacccaaggatcagcaaaaagatcttagttacaaaccactcgtgtaattgtttgtgaattggatgctaacaatatagtgtcaactattattatactttccaacaaaacaatcacaaattatatgcttatagaaaacactcacccaaattatatccaaattaaccatcagacacatgatcattgtccaaggattgagtaggttcataatcatcatactgatgccatgttgaaacagttttgaccaaaaacagattttagcaagaatttgttgaaatagttttggttatatggtcaagaaagcagaaattcattggatttggggctttgagattttctgggccatcgccacactttctctggccaatattgaaaggtgtggtcggcaacctttaacagatttgggttggatgggccagaaattctcaaagccccaaatcaaatgaattggccaatgtttcacttatggtcggcaaccttcgttagtcaagaaaatagtattatatcagccggaaactatgaaaatagacaataatataaccaccacgaacagttcaatgtttgacataatgagatgttgagaattttgcatctatagtcggttttaaagttaaacatgagatctatattatactctatttatcgaccattagagcaaagtcgttttcactagtcaaaataatttaaatcgtaggttttattatattactgataatcatgacttttgaattagtctgtggagaaaaagaaagaagaaattttccggtcacatttcaaaaaggtcaacagaaaaaatgtaactttataagtaactttgtctcttgtgtttcatattgttgataatgatattcatacaaatcatgtcgctattcaaagcttcatcattctgcatacgaatactttcaccttaaaaatcttcttaacactcacgcgtaggtatgaaactgatatgttttaaagaaaaaaaattatgttttacgtttcattagtgaaaaccctaatcagaaaattgatcatgacaaaaactttcctttagttattcaccaattaaattgtttgtttatggataaaatgttgcaaaatttggaatattatccgtgcaaactacatggtaaattactaaaaatttatagtatctacctatatatgtgtgtatgtgaactttaaaaaaaatgtattgatgtacgtgcatgtgtatgtgtgaccttgcacattaaatgctattggatatttattttgcatttgagttaaatttcaaatcgtagcatctataatcaatactcacttttaaaccggccatttttaggtgggaagtggggttcaccgttcaccattgtatttatcagattctctccattttacaagttactgacagttccacagttatgtttttgtaaattttgtaaatataagtttgtatattttgatcatctcccatttttttttgaaacaaaaaacaaataataatgaaagttttattaagcgaaaatttgtaaatgtgctctaaactctaaagtaggttgatttttttaaatactattgggataataaaagacaacaatatgtattatgcatgtttgaatccagatgacattaatagaaatcactagactacatgttttagtccaccagtaaatatagaaaatttagtattttgactcacaaaatgtatttactaaaactgcacctcaaacttgtatattcttaaattatcaaatgaaaaccttgaatattgtaaaatatgaaattaatgttgacaaagaagaaactttatgaagtggaccatatatgtctacacctaatccctaaataaaatgcaaatatatacacactcgcaacaacacatatggaagtttgtgcatcacaccttgtttcttctcataatcatatataccaaaaatctctctaagaaaaaaaaaaaaaaatcttcaagaaaagatttttgtattcttatgaaaaataaaaatatgaatccgagtcgtcctcgtcttctctgtctcattgtttttctcttcctcgttattgttctatctaaagcttcaagaatccacgtcgaaagacgacgcttctcatccaaaccttctggtgaaaacagagagtttctcccttcacaacctacttttccggtcgtcgacgccggtgaaatcctaccggataaacggaaggttaagacgggatcaaaccctttgcacaacaaacgatgaggaaagaagaaaatcagataattagtttccctaaacactctctctctctcctctatttgttttcttaaccacagagatatatcacataggtaaatcttattacacatatatatattaatgtaggatttatccaatcttttttgtggttttttccattctctttctcaatactttgaggtttataacatgatagagcgttattaatcattgtatattgtactttgtacatagatctttttagttcttttgaattgatatgaacaaaatatgcgagaaacaaatgatgtacaataattaatggttttgttggatcaaatttggccaaaatcgaaactaattggcaattaataggtgtttttcttctcaagggtgtgttgttgaccaaaatatgtttttttgagttagaacgacgtcgtttccttggtccaagttatttagccatgtcacggagactcagaagtctctccctcgccgtcgtcggcaagaattctcagaacttatttttttggttgtgtgacgaatcatgaaaaagagatacgaaaccgaacttataggaagctctcgcggcttttcaatgacctaagatagaaacagcgagaaagatcacagagtctttggaaaatttggtatcagagtacttcaatcgaatccgtcacttctcttaaccctaaattccagagtaacccgtctcattctttccgaccctgatattcattgacgactgtggttgaaggattatgtagagcttatacttaacaacaccattatcaatgcttacgttaaaaagggagattttttggcggtagaaaagattctgaaggtgatgaagaaggagaacgtgacgtataacgctgctacatacgattttgattgggttaggtataagtaacgggaaattggttgatgcagagaaactgttcgacgaaatgcctgagagaggaatagaattagatatacatgtgttatacttctctcataagttagaattgcagaaagaggaatgtcaaaagagcgtttgttgtttgatgaattgatagagcagggtctttcaccgagtagtcacttagagaaaagggattatgttggtgtggggaaatgagtacggctgagatgttggttggaagagatgcagagccgtggagttaacattactcaggtggtgttcaatacttcaattaatgggtactgcagaaaagggagtatcgatgatgcattgatagcgttgagatatatctcaagctgatgtgatggagaagaaagggtttcaagctgatgcttttacttataacgcggtttgctaagtaaatcaaaacgatatggtgaggcaaagcactggttgttcacgatgattgatagaagtgagcgtaaaacggttgaccatactaatctgattgatatttactgcaaaatagagaacttcaaagaggcaaagaagctacttgaagagatggccatctgagggagaacaacaacctaatgttgtcacttaaaatgtgatgatcaatgcgtactgcaagcaagggaaagtaaaggaagctcggaaactaaggacggacttggaagacaaaaggatggttctctttgacgaatggggctcaaagggtttggttcaaaacgttgtaacatacaccgcaatgatctcatcgggtttgtccaaggctggaaaatcgaacgaatcatttggattctaggaaaggttaaaaaaatagtaaatagggtttatacagcacgtgttcaaagtctgcattcagctgggactacagtcgtcacagtgataactgtttgagctggtcattctgttgaggagatatggttgatggtttattggaatcagaatcgttggtttggggctgtgaccattgatttcaacttgtcaagaaagtaaagttggtctcttttttgcaacctcgggttaaaagtcaaaaagagcttctctccaatctatcttccttcttcaaccttgatctccaaggttgggaaatcgtttttttaatcctattgtcgattaaaaatcatatctttttatggatatctgagaccgaagaagatataataatatgtataaataagaagcaacgagactaatcaaccgaaacaacaacaaaagaaaatgagttttcttggagcagggagactcgcgggaaaagaagctgcctactttttccaagaatccaaacacgccgttaatcgtctcgccgagaaatctccggccactggcaaaaagcttccatcttctccgccggatccaccggaaattcaacctgacgttcttccggagattctacgccattctcttccttccaaaatatatggtcgtcctcctgatccttcgtctctctcccaattctccaaatgggctcttgaatctgacccgaacgcaacagtttctatatcccctgatgtcttgaatcctctcagaggttatgtgtctctgccacaagtcactttcggccgtagaaggttcaaattagggttttatactctgtttcacttgatgagtatttcaaaattttggatttgttgttaatttgtgtcgatttttattgcagatgggatttaccggaatctgagaattcggttttggcgtcaacagctaatgaattgaggagagacagatacggcactcctgtaaatcctgagaaattgaaagctgctggtgaagggcttcaacatagtatgatcacttctcttcttttgtttatctgcaaatcaaatctttttgaacgtggataattggatttatggatacagttacctacagaggaacatgactagatttgggttgtttgctagagatagaaggattgctatctttacgtgttctgttttcacttccttgcttttgttaatgttgatcatgtaaattgcttgcccaaacttgtctattttaccttgttagggactgcaatggcagtaattctgaaaggtttcagcttactagagaaaactttggtttgtttggttatgaaagccaagattttccgtggctgagggttcatgagtgtctaatgtaacaactgctttctggttgtctctttttgactctgatgacaaataatctaagtatctctctcacagcctagaaattgttgataatattgcttagattgagattctgttattgtcttttgtcttttaatgttaattgatgtcgtgaagtgttcggaaagtttgcctaatctcgagccctctgatttttctggtttctgcagttggaaaagcatttgcagccgctactattatcatctttggttcagccactttggtttttggaacggcagcctcgaaacttgacatgcgtaatgtaagattgcatatgtttccattttcttacttaaatcatttagattagcatttctaagcattattgactgatcttgaatgccatcatcgccttacttggttttattgtatgattttcgttctgttaggctgatgacataagaacgaaaggcaaagatctttttcagccaaaactggagtcgatgaaggaacaagtagagcccttaagaacttgggtaatgttttacaaagatacttgcatcttctcaactgaagtggatcataatcattaatagactaacccgaaaagaccataaatttcaggctgaaaacatgtcgaagaagtggcatattgagaatgaaggtggtaatactatcaaggagaaaccaatcttgaaggagctttcgaaaattctgggacctaaatcttaaaaggccaagacctttggttaatgtgtaaccatgtggatagagaaagtcaaagaagaagttctatatgtttgtaagattcaataagatcttaggtaaattatcatattgtgctgtaagaactaagaagtttcaatgttgctgtataaaggttgtatcgagtgatttaagttttgtataataaagtttttatgagtttcaatatcaatgtttcctattgtgtaagcaaaataaaatgtttcacttctgattggacatggattggtgggttaaatatacagaataggaagttacagtcaaaattgtgaacgttataataagtaagggttgtttatgtaaattttggcttcagtagagttctcttcttctttttgtaattaggtctcttagacggtgaggttaacgatgagtaatcaaagaaagagatcaaacgatgaaagagaagaagaggacgacgaagatgcggaaggtatcggcgagtgggagagagcttatgttgacgaccgatcctgggaggagttgcaagaggatgagtctggacttttacggccaattgataacagtgccatttaccatgctcagtatcgccgccgtcttcgtatgctctccgccgctgctgctggtactcgtatccaaaagggacttattcgatatctctacatcgtcattgacttctctcgggtaaatatttttctttgcaatccgccgctgctgctgctgattttgtgatttttagcttcaatgccgtttcctttgagtttgatggcgtgaaattgagcttatgttgctttcatcagagcttatataaaagagaaactatgcactttgggtcactgataagtaactttaatgtaatcgtcgttctagttttggagatctctgctctttagtcttctcaataggttctataattggctctgtattgtttgcaatgataatcttactctaagtgggtttgtagagcttaaggatgtgatccttattcagattctttattgaaggcaacattatgatttgggttcaaatttctctagttccaaggtatgcaaagtcttacactttggactgttttgtcgtgtctaggcagctgcggaaatggatttcagaccaagccggatggctataatggccaaacatgtcgaagctttcattagagagttctttgaccagaatcctctgagtcaaattgggttggtctctataaaaaatggagttgcgcatacattaacagatcttggtggtagtcctgagactcacatcaaagcgttgatggggaagttggaagctttgggtgactcctctttgcagaacgctctggaacttgtacatgagcatctcaaccaggttccatcttatggtcaccgcgaggttctgatattgtactcagctttatgcacatgtgatccaggcgatatcatggagaccattcaaaaatgcaagaaatccaaattaagatgttctgtaattgggctctctgcagaaatgttcatatgtaaacacctctgccaggaaactggcggattgtattcagttgcagtggacgaggtgagtttagctaccttctacttacacttggacctttgaaaaacttgttttgtatggtataacattgtgctttgtgtgtatttgtcttttcacgcaggtgcatctaaaggatcttctgcttgaacatgcgcctccacctccggcaatagcagaatttgcaattgcaaatttgatcaagatgggtttcccacaaagagctgctgagggttcaatggcgatttgttcgtgtcataaggaagttaagattggagctggttacatgtgcccaagatgcaaagctcgggtatgtgacctccctacggaatgcactatctgcggtctaacacttgtttcttcgccgcatttggcgagatcataccatcatctcttcccgattgctccatttgatgaggtgcctgcactttcaagtctgaatgataatcggagaaaattgggaaagagttgttttggttgccaacagagcctaattggtgcaggtaactacttgaacaccattttatagagtcttaatactgttggttgaataaccatttggtcactagaccagtagttgaacttaagatacggttcacccttgtcatagtatatacaaagtaaccgatccattcactcaaatataaaggctcattggtgcttttgttttttgcttagggaataaacccgtcccatgcgtaacatgtcgtaaatgcaagcactatttctgtctggactgtgacatatacatccacgagagcttacacaactgtcctggctgtgagagcattcaccgtcccaaatcagtttctttgatggaagaatgagagaatgaatgtgttcacacttccaattataaatcacaattgagatgatgagaggaagcaattttttttgtgatataggatgttgtaattggtcttatgtccttaaccaaaatctttcttcttttgtggactctattgctctctcacaattgatccaaaacaaaccgactcaaattttcagagatagcattcttaattgtttgattttctatttaacttgggcttgaaatttcttcactcatgagaaaacgaacagtagtaataaagaattatttcggtggtaaacaaaaggagaccgtatcatcagttgtttgttgatactgtcatgacaaggtcgcaactacttccctaaatatctctctgtttgttagaagcttttatattagatctaagtgaaacaattcttagtgattgtcataagtaaacaacgtacttaatctttgagaaaagtccctaacaccaccatgaaggaagaagatactaacgtcactaggttctgcaaggcaacgtctgcgtgtaaagatgcagcattctactaccttgaaggattcgactggaatctcgaagacgccatctctggtttcctcggtgatcaacttcctccgctcaaaataagagcgactccacggagggtgaatgaatggcgagagcgatctcgatctcctttaagaagaagatactctactacctctgtctcggaatttacgctgaagatgcgccaagatgagataaccataacgaaaagctctgatacgggtgctttggccaccaggtgggtgatttaataatattaagggctcggtaatccaaatcatctaaaaagaatgtttaatcttgtttcttttgttttgtatagtttggatgatagtggaagagagcttcatgattctgatgatatatctcatggagaaaaaattgtgtctatagctaatccggtgaatcaagagtttaaagaagaggtaaattctattcttgcatgctactccattaccagtactgtcttttgcttattatacctataatcacatctctttcctttaaatgatgtgtattgtatcaccttagggatcatcagttcaagctacgaagatttgtgaatccacctccattgagattcacttgcctagaccggatccttattcggactctgactaagctgattggacttttttcttgagatggaagcagattgatgtataaatcctttattggtacttctttatccaatcttgctcacctactcaacatatcattaaaccttgatcttacacaaacttttttttttaggtaaaccttgcacaaacttcatatacacacaacttaaattcttcttgaatacgattcagaaaagtctggtgtttgattatgaggatcatatctagactgtagaaatatcttagttgtatttattatgaggaccagtgacctctaagtccaggtccaatatggtattggtccatactttgtcctcagtaattgattgatcttgtctgaagttcaaattgccacaaagtttagagtcaagcaatttgacgttgtctattatgagtcttatcatcgttataagtggtttggctgcagaaccaaatcatatgtaccaaatttctccttcggtctcttcttttctttcaagtctttattggtaaaaccgcttttgcctgttttctccatctcctgtttcttgtgttgtgtctttctatccagcttctctgttatcagtcttttttctttgccacttcctcgtcccgaccaaattgagatcctttttggcttttaaaaatgaatttccattccccaaatgcaacttgacttactcaaatgcaacgacaaatttgataacgagaccggtgtagtgacgaagctagacctatatggtgcatgtctcagaggctccctcaatgctaatagtaagtcttttcagacttcatcacctcaggtatctcgatctcgcttacaaccactttgactcgtcctcattcttcgcccaacttggaagactcaccaactgagaggtcttgcatctaactggtatgggcttagtcggagaaattccatcctcaatcagtagcctaagccgtctttacttccttgagcctttcacaaaacgaactgaccggtagttttccccctttatacaatctaaccaataatcacttttctggaaaccttccttgttctctactcaccatgcctcttgtgtcagagattcatttggaccaaaaaccatcttagctactctcttgaaactatgaattgctcttcatcatcatctctgcttgaacattccttgactatataaccttttcagtgatcgaatcctagagcctatgtcaaaactatccaacctcaaggatctcgaccaatcttttcagaaaaaaattgaacaactaaagttcgattagttttcatatcgtattgtaaatctagtatataaaacaactaaaatgctaaatttacttaacgattagaaaacagattgaaccatcttagctactctcttgaaactatgaattgctcttcatcatcatctctgcttgaacattccttgactatataaccttttcagtgatcgaatcctagagcctatgtcaaaactatccaacctcaaggatctcgaccaatcttttcagaaaaaaattgaacaactaaagttcgattagttttcatatcgtattgtaaatctagtatataaaacaactaaaatgctaaatttacttaacgattagaaaacagattgaacttgtgaaatcgctaacgatcaaatgactaggtcaaatgacgggatccaaaatccggttagttttcatatcgttttgtaaatctagtctaaaaaacacaaaaacaaaaatgctaaatttacttaacgattagaagacaagttgaacttgtgaaatcgctaacgatcaaatgactaggtcaaatgacgggatccaaagtccggttagttttcatatcattttgtaaatctagtttaaaacaaaacagaaaaagactaaaaactaaagcgctaaattcacataacgatcggaaacaagttgaacttgtgaaatcgctaacgatcaatgactaagtcaagtgacatgatccaaagtccggttagttttcctatcgtttcgtaaatctagtctaaaacaaaacagaataaaaaaaagactgaaaaactaaagtgctaaattcacataatgatcagaaaacaagttgaacttgtgaaatcgctaacgatcaatgactaagtcaagtgacaggatccaaagtccagttagttttctatcgttttgtaaatctagtctaaaacaaaacaaaaaaaaaagactaaaacactaaagtgctaaattcacataacgatctgaaaacaagttgaacttgtgaaatcgctaacgatcaatgactaagtcaagtgacaggattcaaagtccggttagttttcctatcgttttgtaaatctagtctaaaacaaaacaaaaaaaaagactaaaaaactaaagtgctaaattcaaataacgatctgaaaacaagttgaacttgtgaaatcgctaacgatcaatgactaaatcaagtgacgggatccaaaatccggttagttttcatatcgttttgtaaatctagtagaaaattaaaaaaaaaaaaaaaaaaaaaacttgtctaaaaataagaagtgaaaatttaaaaacgtaataaggaaactcacctgaaatcgtattggaatttgatgtaacgtggactcttttcctgatctgatacctctccaagtcgtcttctctcagtaatctcacgaatcttcaccgtagtcctttgttctctatactcaaagcaaattccaaaatagcccttgtatgacatcatccaaaatagccgttgtgtgacatcatcacaaaataaccgttgtatgacatcatcataaataatctccgacgaagaaaattcctccatctcgttgtaaatttcaggtcatgttctttcaaattccggccacaacttcatcaccgtaacgttgaatctcttataatcccagattcacctttaaacacctccttgccatctctaatgatcgactaaaacttggtcggagaaaaataaaatcagacccgcagaagagatacgaacgaacgaactcaccgaataattctcaaagcgagaatgagattcataacggctcttcgatataacttgctcaagaagaaactcaagtttttaaaagcagaagaagaagaaatagcactttagggttttgctcttcggaggttgagaactttgatccttaagatgagattagtatagtatttataacgacggttatcaccggaaaaaaggaaatttaactttgataaagaattttaaaaataaaataaaaaggaaattctgagaacgcaaaaaaaggaagagaatattacactctaagacacttttctcaaacaatttccgagatacgacactttcaaaatacaaggcacttctaatataaaaattgtccattttaccctcaaaccaatttcggtttaattctctaattttaatttctatacgaaaatcaatttgtaagaaacctctctttctcacccaatccctcacgacgactttacaatttctgtttgtttcccttttctaatagatggttcatgcttctctttggcgatttcgctttcaaataatccattggcatcttcgtaattgttgctttctcacttctcaatgtcaatacacatcgatttctcctcccaataccgtttcaatttcctcgtactactctcttacgactgacaatgatcaatccttcttccattacttccaccatcttcttcgattatgcgtgacggctcaacaatgcaggtaagtgcatgcccaaataattttatccgatttcatcttctgttctgggtcattagctgcgaatctcatatttgtttactttcggtgaggactcgtcctcgatgcctgtaacgtctttgagattgtttctcttgttttgttgtcggatttgcatttgtggaataatggtcaaagaaaaatgaacgatgatgtactttgaattggcgtttgaattggtgattattgttcatgtataaacttgtgtattgaaatgaaacaaccccgtaagtcattagatgaccacatggactagaccgcttggacagtcatcaatggacacctgtgtctttgatttgctttaaatatgttttattggtcggtaaaattaccattttttgtatgagtttagtgtttgtttttacggtttcagatttagtggagaaagatcatgggttgagggtttgagtttaattttagggtaagtaaattaggatttagtgcaaaccgttaagggtagagggtttacacacttgtatgaaccatttttgaatataatcataagaatatcaccatatgaatgattctatattttacatctcttagattgaaatgtcttagctgcacaaacagatacacgaaagatgagtaacaccaaatctaaacattgttcaccaaaatcaaatacaagaacacttcattagttggagaacatatattcaaagagtaatggacggattcctatagctgacagtccgcaagtacgtgttcatatatgatattaagaagtagagatgtatccatgtaacatcgaccaaatggatatagtgtaaaacatgactgtgtatccacctagcatcgaacaaatggataaacattaactttggtgtataatggatatgcttagtaaacaagattccgtatgaacacatttgaaatggacacattattatggatctgtaagaataacaaatgcagagaaaagaatacgtgaaagaaagcatgttaataagattttgggttttagttggtatggttttgtctttatatgaaagcatgtttgatgggtctcgttcttttgtgtaagtaatgtattgttattgtggatactctgttgaataagaaaaagacgcatgatttgttttgactaagttgtgattcttgcatcatcatgacactctttttcattcgataaaaaattgatgaacgctctacatatgaatcatttgtgttcaagtgtttgtcatgtttcaccattactccacatgttaaagtttaattggacaagttataatggatacaaactatcattaactaattggattttgagtgttgctatttgaaagcaatgtctacatattgttcttggggcttggagacctataggattattagtttatacataatgaaatcgtgttggatgctttgatagtttgtgtccatgaaaacttgtccaacaagatgtgaccatgtggaaatgatgtattctcatgtgcgaagtaaagtgctcttagcttagaggttcaacgagacatcaatttatcaaactagaatcaaatggtaccaaacaagctgatcatatggatatgaaattcaatactggaatttgctaatctggtgctccatggaatagaacagagtaacgaggacctcgcttctccgtaaccccgtaatatcgaggttactccgaacaatttttgttctcacggaatctcttccatgtacgctgccatttcttcttctttttcgggagagagttcaaattctcaggtggaatttcaaaatccaaattaagtaagtcgagtaacgtcccacgttacgttatcaccgcctctctcgtcgccttcttgctacagatctgaaacaaaggagagtaaggaaagaggaactttcgatctgcaaccgatctcatcgtcttcacaagcacaatttcgctaatatgaatcagatatttacacaatctaacaaaactctaaattctattcgtagaattgaagaatcatcgcaaaacctggatcgattggttgtaagattgagggaacaaaaattttcttctttcacctctagatgttattgtctgatacactcaagcttccgtcgttagtcacaagcgctgccgctccgaaaccaatcgaataagcctaatcgtcacttaaatctagagaggcttctctgtaaagggaaatatagaagctacacgattttgacaaagtctctcatgtttgattttgcaaggaaagactgaaagatgaagaaagagatagataaagaaagaaaagaagagtcgatgaagaaaaaagaagtagacgatgaagaagacgaagaaaaaaagtacaaatagagaaagaatattcattatacttttttgagtaattaaattatatatataatctgataatagttacaacttccatccaacgacccactcatcatataccaacttccaaacgctaaagtattttcgttttcacttttaggggcaaatttgtcataaattcgatgaaaaagttgaaaaaatgcctcatctctgcaaagtgcctcaaatggaataaaattttctaaaagtgcctaaacttgtcacattcctaaaaaggaaatcactcagtatttgagcacgtgagtgtcacgtgcttacaagtttattattttccgtcgcctcaaattttattattttcgcttcgccgacgtatttctctctcttccgtctagtctagctctccgatcatgtgggtgacgaataccgtacttctatatcgacccaattctatgaaccgattaaccttttcttacccgacccgactcgcccactctcgtaaagcctcttccttttcccgtttctttcggtcttcaaagaggaagaagcgggttacgacattgtcgacgaagaaaccaggttcagctttctcacctccattgacttaccaatctctttgccaatgtttatctgtttgaaatattctaactttattcaaaattttaacagatgacgatcacgagatatcgccagttccgccggagaaattctccgctgatttgggatggttatcggcttttcctcatgtatcagttgcttctatggccaattttctctttggttatcacattgggtaataatatagccaattcactgttgccaaatttgtgaagtaacagtcgttgttgtttgtttcactggcctagtttgatttctataccagaagattaatctctgttcgtgtagtagtgttaatgcttggttgtgttacagaattcgaaaaaaagtttcattttgacattgctggtgagaaacagcttcaatttgagcttacaaagatgttgattagattgtttttacagagtgttgatttgtccccgtcttgacaatttgttagcttccagtgagaagaatatgagttagtcaggttgatctggattagtttttcgaaagcttagtacttataatactatcagtttgttcttgcagagtgatgaatggccccatcgtgtctattgcgcgtgaacttgggtttgaaggcaattctattcttgagggtcttgttgtgagcatatttattgccggtgcatttattggtagcatagtcgccggtccactagttgacaagtttggctaccgacgcacctttcagattttcacgatacccctcattcttggtgcccttgtgaggtaatatcttgttactaaggtgaatcttgatttcgttatgttagtaacaattccatgatgatgttttaagttgtgaggtagcagcataactaaattttactttttctctcagtgcacaagctcactccttggatgagatcttatgtggaagatttcttgttggtcttggtattggcgtcaacacagttcttgttccaatatatatatccgaggtaatctaatatgtgattccttttcaacttcatgttttaactatttggcttcttctgctgtaagatctaggacatttcttaaaattgatcctatgtactctcagactctcagtacaataagttgtggtttagcattcttttgcttagcatattttgcatttcatatgttcggctgaagagtcttgttacttctgatattaagccaaccatttttattctataggttgctccgacgaaatacagaggttcccttggaactttatgtcaaattggcacttgtctcgggataatcttttctcttctcttagggattcctgcagaagatgaccctcattggtgagcttcatttagctatctatacatttcactcttcacttcattctcctcatgtatactactgttcaggtggaggacaatgctctatgtagcgagtatgcctggttttcttcttgcacttggtatgcaatttgcagtagaaagtccccgttggctctgtaaggtataagtcgcctcttttaatcatgaggaagcattgattttccatgttgaaatcgtgtctcatgatacttgtttaggttggacgacttgatgatgccaaagtagtgataagaaacatctggggaggatctgaagtcgagaaagctgtagaagattttcagtcggttatgaagaatagtggctccaacttaaatagcagatggctggaactccttgataaaccacattcacgaggtcatgttaaggttgcttttaatgttagttctaacttctaagggtgttatattataccataaatcagaaactgaaaacattcaagtttaagaataaccttttccaggactttgatctaagaaactgagaatatataacttcatacatgaaaaatctatgtagctaaattgtatgtcttgttgatataatggttgcagttgcattcattgggggctccctttttgtcctacagcaattcgcgggcataaatggcgttctttatttctcatctttaacattccaaaatgttggaatcacgagtggtgctcaagcaagtctatatgttggagtcacaaattttgcaggttctcaagtctcacctatatcaactttaaatttagatgattgtttttttctactgtttccatcacaatgtcccttttctgaactgttgggtctaataggtgctctgtgtgcgtcttatttgattgataagcaaggaagaaagaagcttcttatcggtagctacttgggaatggtaaatatctttttcttttatcacataaactcttttgcttttcactgctttagcttattttgattgaattgatttggtgtcacaggcagtctctatgtttcttattgtttatgctgttggtttccccttggatgaagatctgagccagagtttgtcaatacttggaacactcatgtaagtagcttgaagtccagcaattactagtctccttttctcagctcatatagtacccaaaaaaagacagaaacgtatcatatgtttggtcctgttacaggtatatattcagttttgcaattggagctggtcctgtaacaggtctcatcatccctgagctaagcagcaacagaacgcgtggaaaaatcatgggtttcagcttctctgtacattgggtatgtgtttttttagttttcccataaatcattttataaccttttgaagtttgaagaatgacgaagcaaatgttcttcaggtctccaacttcttggttggtttgttcttcctggatctggtggagaaatacggggttggaacggtctatgccagctttggctcagtatcattgttggcagcggcattctcacacctcttcacggtggaaacaaagggtcgatcactagaagagatcgaactgtctttgaactccagagacgacctgagttaaaaaaaaaaacggtataagtgaaagaaagagagaaagacctcaaaatttttatcagtttttcatcagttgttgtaaaatgtaaatagcctggaaattagcttgtgagaaatcttgtgagtatatagatatacttaggtatgtaagaaaagatttataaaaaatgcgaaagaaagttgacaaggattacacaaaatacatacttatgaaaggtttgtgcctatttacaagtggtaagacgttcttgatttatagcttaatgtagtaacattgtctcgatctagactatacatgcttaccatgtcatggtgaaaatcgtgagtccataactcatgatctctatatattcatattcatatataatactggtttgcacgtctgcaaacaaagataaagatttctgataatattaaatttatcccaagaatattgaatataaagatgctagctggttctctgaaaaaaaaaagcgtacacagcttgtcattgaatttataacctatacgaatatgaggctcgtagaaacaactcttaaggaattgtgagagaatgttacttttagccgatcaaaaaatttgtaacataaatacactgacaagatatttgtattataataagttttcgaaatttgaacacaattctatgcatcatgctttttcttctaacaagaagaagaatttaaacacaattatatatttaacgcgccaaaatcgcgtgtgaagtctctctattagtcaacgctatatcttgaaagggtctcgagactctccagccattttattctgccttcctctctatatttagaagaacaaaaattgaaaaaaaaatccttagagagaggaaaaaaatttagaggaaaatcttctaatttggttttaattcttcgtgattaatcgctaatccagagtgattaagaaattaaaaccccttgaggaacaaagaagacgtttgggtgaaattaaaagcgcgacgacgaggacaatgccgagcaagcttaaaaaagcgattggtgcggttaaagatcagacaagcattagcctcgccaaagttgctaacggagccaccggaggcggcgatctcacgactctcgaagttgcgatcttgaaagctacgagccacgacgaggaagtcccaatcgacgatcgactcgtaacagaaatcctcggaatcatatcctccaagaaatctcacgccgcctcttgcgccgccgcgatcggtcgccgtatcgggcgtacacggaattggatcgtcgcgctcaaatccctagtcctcgtcctcaggattttccaagacggtgatccttatttccctcgcgaagtcctccacgccatgaaacgtggcgccaaaatcctcaatctctccagcttccgcgacgattcgaactcgtgcccttgggatttcactgctttcgtccgtacattcgcgctttacctcgacgaacgtctcgattgcttcctcaccggaaaattacagagacggtacacaaaccgagaacaaaccggaagaatcagcaccaactcaacaacaagatcccggtttaatcccaaagccggaattaaatcccacgaaccggcggttcgagatatgaaaccggtaatgcttcttgacaaaatcacgtattggcaaaaattactagacagagcaatcgcgacgcggccgacgggagacgcgaaagccaacaggctcgtgaaaatgtcgctttacgccgtcatgcaagagagttttgatctttacagagacatttccgatggattagcgcttttgttagacagtttcttccatctgcaataccaatcttgcatcaatgcgtttcaagcttgtgttcgagcttcgaaacagttcgaagagcttaacgcattctacgatctttccaaatcgatcggtataggaagaacatcggagtatcctagcattcaaaagatctctttagagcttcttgagacattgcaagagtttttaaaagatcaatcgtcgtttccagcgagctcagggttgtatccgtcaccgaatagttttcttcctccgcctccatcgtccaaagattcagcggtttcaagctcgcttgattttggggattccacgattgatacgtcggagaggtattcagattacgggtcgtttcgtagtacttcgttggaggatttgatgagcaggactgaagcagggactagtagtcctccaatgtcttgtcattctgagccatacggaggaggacgagatgatcctaatgggaataattttgatacggtttcgactaaatcgcttcccaataatccctctgtttctgcttccaatctcatattagacctattgtcattggatgacgtaagtaacacggcagaagcagaagatgttgaagacaagaagaagcaagacgattcaaaggcagagactttcgatccttgggaggcgttgatgttgagagatgatccgaagaagaagatagaaacgattgaggaggaaccttcaaccgctgaggaccatcagagagattcagggaattggttgcttgcgttagaagaaactgctacgcaggtgcagggtaataactcgatggcgatagtaccgttcgggttagatgatccgatgcctgcgtttcaagccgccacggaccaatacaacccattcttggaagaaccagttgcgcagttagctacagccggagaaccaatgatcacgttcggtggcttggctttgacagggtttcagccagaaccgacatttcaggtgaacgttcctgatgattttgagccgtcttctacaccaacatttaaggccacggagactttgcctatgaaatgtgacccgtttacaacatttgagagttttgggttcggagagacattttcagaaaatggaggggtaaatcagcaatctgtattgcaagaacagcagatatggttgcagaaccagaaaaagatcatagccaagcacttgagttgatacaaaatttatttggctagacagaggttgagatgtttctttgagtttttcttttgttacattgtcaacttaactcttaactcatttttccataacttagagaaatgtgaaattcagaaattctttgattaaaaagatatttccgcggattctatcttcgtacttgcattcctgtgtatacacgatgtattttgtgtgtcttgtatcataatcacattgagaatttgattttcaagtatatctcaacgaataacactcaaatatctaagttcaccttctgaatacatttacgtacacggtacactttgggatttacttttgaatatgttattttctttgaagtttttgggaattgaaatttagctagcattttgatcatcgtgatgatgttatgtagcatttagtttatgtatttttgaaaatatttatgtattcatttttagtctatattaatataacaagttttcacataatcacacaacagatgcatgcatctaatgtgtgtgtattagatgaatgtatccgatatgcgtattagatgcgtatatctggcaaacaattttttgcattttattttccgatatgcatgtatttatgtgttatgatatgcatccgtgataatgcgaatgataaaatgaatgtatatcggtggaagataacgaagagggaagccaaatggaataaattaaggaggtccactagtaggtcaagttggctttgtggtgtcgataacatgagattgaccaaagctgtagcttgaccccaaggccacgagggagaaagatctaccaaaccaaaatcatcataacacatctctttctagtatatagcccaccacaaatattaattcttttaatagttatacaccacaaattttatcccccattggccattgactagagtcgttttcgtctttgacagtggtaaaagcttctgtatatgtgaatttaggattccacctttcttaggtttctcattacaagttgatttaacttcttgacttctcaagttgttgttttgtaatttagtaaaaatttgcttacaagtcatacatgattgaatataacaccggctgctaagcctatttttctatcataagtttcgctttcgagtcaaaatgttagtcaacatgaaataaaacacgtttctttatttgttttgcttattgatcaactttaaaatagtcccataaaatagcaaatattaagaaatttcaaatcaatacattagttgccaaaacccgtctgtgatattatactttttgaggctccataataatgacgtgagatttgtttgtgactgaggaagtggaaaataaagttaagcatgtcttactattatcaaatatcagtttttctataacaaagtatgaatgttgatcaaagacaaaaacaaaaaaaaggtgatccacctttctccaaatagaaaggaagtaaggcaatgaatgttttttttttttttttccattgcatttgcttttaaatccttataagaatttgaaagaaaaatatcttatcaactcttagaggtgatctttgggccaaagagggaaccacgtaatcgaatctgaacttctccgcttaaatgggaaattttattagatctgataaacggccaaaagtgatagctcatgattcttaatatagacgtgcatacagagatgttgttaccggccgaagagcagcttcgtaatcaacggacacaaataaaccactattggtccatcaaaattaatacaaaacgaatgaaaactgctgtgtcataagactaaataattttgtatattattatgatttagatggatgcggtctacaaatttttttaacaaaaaccaaccattagtttgtttaagttacttgaaaacaagaaaaggttcagtgaaaggtgatatataagctattattattatacacagagtaaaaggaagaaatgtgaaaaggaagattaatccacactaaaagtaaaaggaagaaaacgggtcaaacaatgaatcgtctgactgagtaataatatacgtcgctgtcatatattttgtataaccataaattttttatattttttccgacccaaattatttttagttttctatagctagttactaaattaaaggtgatgaatagtaatcatgactttatgtcacacgataaggttattatcacctacctttgagtatatttaggattttccgaagacttggacgacccaactcagtttggataaaaccttgtggtctattctaaatttaattctaatttacttctgattatgtggatttatacacggttaaacatcagaggctgaataataattagtttgatagatctgatagttcctctgttttctttttcttttttgagttgattatactgtttgcttttgttgattattagtccaaaacattaaaagaacaaaaacaaaaaaaagtgttcacgctttttggtcgaccgtaacatactttattgaattttgttaaaaaatcattacacaaatgatattatggatgtgtgtggtccaaaaaaccaaatattgactgtagaatgataactcgtagaagtaactcaaagctcctctctgcgcttcttttctctctataaaaccaagtctttgatcatcagatttatatcaaacttcaaaagcgtcaaacataaagttaggccaagaaacccatttaaaaaaaaagagagagagatggagagtttcccgatcatcaatctcgagaagcttaatggagaagagagagcaatcactatggagaagatcaaagacgcttgtgaaaactggggcttctttgaggtactctcacttttcttttcttctataaaattgtgtaactcaaaatctaatcatctgtttgtgatattacagtgtgtgaaccatgggatttcactcgagcttttggacaaagtggagaagatgaccaaggaacattacaagaagtgcatggaagagagattcaaggaatcgattaagaacagaggtcttgactctcttcgctctgaagtcaacgacgttgactgggaatccactttctacctcaagcaccttcccgtctctaatatctccgatgtccctgatctcgacgacgattacaggtaaccttttttagtttcataccggtccgttttttaccttaaccggttacaggatctcagatttactggttttcaaaacaactcagcatgaaccgttttttttcttttggttttaagtaaaagtttaaccggtgttattgtctttctacagaacgttaatgaaagacttcgccggaaagatagagaagttgtcggaggagctactggatctgctgtgcgagaatctcggtttagagaagggttatttaaaaaaggtgttttacgggtcgaaaagaccgacttttggaaccaaagtcagcaattatccaccttgtcctaatccggacctagtcaagggtctccgagcccacaccgacgccggcggcatcatcctcctcttccaagacgacaaagtcagtggacttcagcttcttaaagacggcgagtgggtcgatgttcctccggttaagcattcaatcgtcgttaatctcggcgatcaacttgaggtaactactgaaccaaaccgtactaaaccgaaccaaattgaaataagaattttgagttttaattttggattgattaaaccaggtgataaccaatgggaagtacaagagtgtggaacatagagtgctatctcagacagacggagaaggaagaatgtcgatcgcatcattctataatccgggaagcgactctgttatttttccggcgccggagctgatcggaaaagaagcagagaaggagaagaaagagaactatccgagatttgtgtttgaagattacatgaaactctactctgctgtcaagtttcaggccaaggaaccaaggtttgaagccatgaaagctatggagacaactgtggccaacaatgttggaccattggccactgcgtgaatgatatgtaactggttaataaatatatatatatatatatatatagtctttatataatgtcttagaaacttgattattcactatacgaataattttgttcatgttgttgtatgtttaagtggtgaatgtgttttatatatgggaattaatgttttctgttcgtagagttcaatacgaataaactgcagacaaataaggcaatcaaatataataaaaaaacaagtaaggcaatcaaatacaagaactgtgtttattgtagagaatattactattttcccatctacaaagctgataaatacacattgcacaagacaacaataaccagaaaaatgctcacatacgtggagaggtaataaaaaggaacgaacggtcacaattgtgtgatttaactagagctgtcaattggacaggcggcccatgggcttgcccagtccaaatgcatatggacaggctatattctggactataaaacaaatggtccaattgggcatatgaccagttttgtccgcggataatatgggcttgaccatatggacaatgggctgcccatgggcatgaattgagggaaaaatacaattctccgattttacgattttgacggaaaaacgtaattccgcaaatttcctctaaaacgcgattttattatattggcgagaacacaattttacagtttcgacggaaaaacgcaattctccgattttacggttttggcgggaaaacgtaatttttctgccaaaatcgtgattttattatattggcgaaaaacacaattttacagttttggtgagaaaacacaattctccgttttggcgggaaaaaacaatattacgattctaccgttttggcggaaaaaaacaatttcataatttttccggcaaaatcgtgattttattgtattggtaagaaaaacacaattttaccgttttgtcggaaaaatgcaaaatgcaaaaacacaattctttaaaatcatgatttttgatttatcaataataaaatgggctatacatgggcttgcccatatggacatggtctttattgggcatgaacatttttcggcccattgtccattatggaccgtccaacttggcccataaaaaaaactgtccatacggacacgcccaatggtccctggacggaccatttgacagctatagatttaacaccatccttgcctttttggccagttccaactcgagtcctttttctttccaatcactatggaaaaagtggtgtggctaaaaaagcgacataattttgtttgtttaatctataaagtggttttgtttttgtaaacttctgtttttttttttcatttcatgtctagaagaacatcacttaattaccaaagaacaatttagtgcattattctttttcctaaaagaatacaaatctaagaagcctagtaatactaatgtgcgtcaaaataacactcaaaacaaccagaggaatgctcaaattcggaggacaaacaaaaaaaggaaggctcaaagtgatcaagatcaagagcagattcaaaacatgtaacagcatcattgcctttttggtaacctgttcccttacgttctgttcttttttttccccctctccatatatatcctctgcaccttcaacatcatccagtttcgacaaagagataaccgctgttcgatacacctcttcgcacttcttaaagtcatcccaaagagtttgcagcaactctcttgcattccataccacgttaccatatatctctaaacaaactctaacgtaaacctttgccatttcaactatcctgtctctctccagtttgattccttcttcatcaacccacattctcataaacatctttatcgcctttacatcggccttcaaaacagtgtttgcagtgacattgtcgggtttcacatcgtcagatctcgcgtaagaggttaagagcgtggagtaatcaatcatgtttgaagggatacttttgaagaacttgtctgcttcttctaaacccaacagtgtctcaatcagataaagccgagctgcataatctttctgaaacagagtacacaccttttctttacccatatatcttgatgcctaataataccacaaccaagagcacataatatgtaagaaaccacaaattggtacataggttgaagatcaggatttagaagaaataaaaaaaactcgcgtttttgagaaaatcgatccgaatctcgaagattcttatgagccctctggtgtacaattgtttctcatgttgctgcaaagacgctttgacccgaataagcagagtttggctagcctcgggtgaccataaggttgcataggaacggaacaaagaactcttgtagccgcaagcaagaatgcgctttgcatgttgttgaagaatcggtgtcatgctttttattaaagtaaatgattaacaacactccagtagagtgtttcgtattcgtgacctataaggacaactatcactcacttatagctaaaaattggtactggccttagttaggtttcatattcgtgacttaacaaactcttcacacatctagcatgtctttttcaactaataaaaataatgattaattccgtaactgattcaaaaaagaagttatagagttatgttaatgattggtcagtaaatcaaattagtccatatatttcggtttagcattacattgaacaaattatttacacactgatggtagtagcattttcctctacacacgataataacaaatcatgttctgaagaattgaaatatatgagctaataatcgttaagcaacattcgggataacccaagaaaatacatatattcctaaacaaactcctgtatagtttactttatatatatacgtaattatctacctttatgcttacactgagcagtaaaaaaacagagtgaagtcattataacaacgaaaaccttttcttttctcgaaatagtattattgattccagagaaaggtaaagaaagagaagaatgtttcctctggaactctaatatgattaatctctcctttttatctgaagattttagcttcccctgtttacctgatggaacaagagaatgacattggaatatgactgaagctggaaacatcgaatatctccatgaatctttgatctgaaactctagctttcgctgctgcaaatcgttggtactcgtcgaatatcgatgtcaaacaccatttctggagcttcctcaagcaaccaacaagacaaccggtccgatgctgcaaattccagattcatacttagaaactcattttcttcttcagtggtggagacaaaagatgaaatgtttaggattggagtgaatgatttaccttgcctcgcttacaatgaatcagaacaggatggtttttctcatctgaggattttaaaaggagagttgttaataaaccaagttagaattagaaagcatacaaaaagtgtggttacatgtgttcttttatttcagcgcttctatatgattcatagttacctagaagcactttcagtgccatgcggattttatggtctggaatattcacaaatggctcctgaaaataagaagaaaaaatgtctttttaaaattgtaagattatatgtcaaaagatcaatcacactactaaattgagcagattaggaaaagataaagcaatctaataatcaaggttcatgcacaagcaacgtcgagagagacaaccatgcaaaggttcattaacaggacaaagtctacaagttatgaagcatgtctaatgtgataccttttactggttgcgtactgagagaaagattctttacttttttatatcaaaaagttatctccacacacaacaacaacaacacggaataaacacaaagtcccattgaaagacgaatctatgagaagaaaaaagcatagcaagccaagaatatcagcgataaaggtttcctatcaagatcgaagttgtcacactaattataaagaatctgagtccagaaacaaaaacaaaagtcaatgagatccagattcttccaataaaatcactacaccaagaagagaaagccactttattttcatctttagtgtaaaagcaaaactagggaactatggtagtaagtatctaaacgactccccacataaagaatcgactatcctaggagtagaatcgacagggaaaaggtggattctgtggggggagagaatgatagctactgcataccagaacaaacatattttctttcaaacatatcaactcaaattagattcatacccatctcttcaggaaaggcgaatggtaactcatgagggtaataagttcaagactctatggtgaagtttttggttattctatcactttaccaacgatttgcccaaacatgagccactaacacatagaaaaggaaaggaactaaaggtacgtattaaacaacattaaccgacttacaacgtaaccatctatcattttcccagcaattcctaaccttatctagatttcaaaccttacagctaatatggacactttcacgatcaacacgctttctacaagtttttaccataaaaaacggtttacttgtacacaatcaaaaacactttcgctgatgtatgatttcataagatatcatatctgtataaaaaagtgcacactcaataaacatgaaccaagaaaacaataacaacagaaagtaagctattgagtagtgggatcattgacaacactagcaacaagtagctcagcaaatattttgacgtagtccataatctaattttataaatagagagtagaaagaacaagtggggaatagttgctgaaggggcagaaaaacaaagagtgggaccaaatcagtggaggtcaagagagacggaaagagccaaagaggcaaaacaataaagaaagatgtgttctttttctggtaaactcataataataaaatatggcttggaacagagtgcccatgaaggatcaaattcaagagaaagaaaacacagaaacagttttagtagtctaaagtaaacaacaatgagacaggattttcaagaacaattaggcaataaatatcaagcaaataaaacccttcaaattgaatgaactatgatatattccagaaatagtatcgtgttccagttaatatatgtagtgtgtaccaaagttttcgaaagtccattagttaagggaccctgtttctgatgcttagaattccataaatgcaaggaaatctcgttgtctaagtcaggaacacactgcagcaagatatgatttttccattcagagaattctcctagtgaactatccaagtaaggtttagaattacagagcaattaaaaacggagacttgatgaagagagaggagaagaaagatggttaccttgttgccttcaataccaaactggaaaagcctgattccattggatttaaggaactggagattgctctctgggtagggctccgggcacaagtatcttcacaaattcgaaaaaacctaaaatcagcaatttcgaaagtttgatatatagtatacaaaatgtcatgaatgtggaaggagcttttacatgattgagcggagaccgagagtctggagaaaggagaagttagctgaatcagggaatccagaccggaatataccgttatcgaccatggagaagttgagcggcggaattaggtgaagttcttcgccggagacaactcgaaagggatcagcttcaccgcccggagcctgaaacacgtttctgttaacctcggaaacctcgatgatggtgcggcagaaatcttctccattgtcctgctctgtagtagtcgtcttctccacaagcttcatctctgaattgggaaacagagaaaaggttgaatctttaggtgaggagagtcgagtaatggagatggtcgttacgtagcgtcgaccttggggaggtttatatggagagagacttgtgactctgttcaaaattcaacagacgaaaaagaacgcaaaggagatggacccagcaaggactccttttttatttttattttttgtttgtcaatagctgtttatttgtttatttttaaagaatttgtgacatttatcttaaaagcttttttgtttataatctgttaagtgtttttactttttagataccttttagcatatgtgaaaatagttgattggatctacaatttcatactgaaatccgtaatctgtaaaaaaaaaaagcttagaaaaaaataagttgccactacacaaaagaatccaatattagaataaacagtttaatattttatatttactcaagttgagctgaaaacagcaacatacggaaactatataataattaacaatacacgaattttgtaacggtctatcttagttgtacatgctactaccatttttatcaacggttgataataacaataataatagtatgatggtctaatttgaggaaataactgttataacattttcaaggattattaaagtaaacaaaataaaatgactttgcagttttgcaaaacaaacgaaaaaaatgatattacataaattgttcttgttaataggaaagcacttgttgaagcttaaattggcatcattgtggaatctttttgctcacacacaatcatcttattcgggtaaatcactctcattgaataaattatcaaccgaacctaaaatcattttttgactatatattttcaccaatattataatatttaatattttgaatttgaagtttctgacctatatttaccttgaaaaagtcacttattcacaatatacaaaaatattgactactacatactaacatacatatatatcatcattccaggaaatagcgaaaatatagattccaagcgaaacacagagaaataaaaagagagagagagattccaaaggacaaagagcaattactctgctaagtgggaagaacaatcactaatctgagtcatctggcattcataaacgcacctttatttaagttctatgggatcgtaatctgagtacattaattacttctatgttcctttcacattttgttttgttaaacaatttcataatattgttttgaaatgtataattttagccaatattcggttttaatatttgttactgccttttttttttttttttccaccaatttgttactgccttgaaataactatttaattgtgtgaaaataaaattcggtccaaactatctactgtagttgccatttctgtcatacatgatactacataataacacggacgccgtgttttaccttttttttggggtcaaatttcgtataaagaaaaatggagacgaatgtttttcttcggtgcataatcgcaccatttaaatatatgtctattacataatcaaaacgaaataatgcaaaaagaaccacatcacgacaatacattattagaatccacgtcacatatttgtcttccacataacactcacaccagaaaactactcttttctaattaaaaaaaaacagatgataactaagctaaagacataaaatttgtaatgtttagtgtcccacactggactttaattggataaattactccataaaaacaaaatgcaccagatagtttttttataagaaaaacaaaaaaggtacattccagggaatataccttatgattctcaaggattattgcgccgcgagcactcggccacgtacgaaagcgttttggatgccgttaaagaactttccgtaaaaagaacgtacgaaaatatcataatgccttcaatttatctttcgagaatttgttctaatttgttctaattttccaaaacattgaaattttctcacggaatataaaacattaatatatgaattaatgtttttccaaagcatacgtaagcctcgctataccgttgcccattccgaagttgcgtatcaaaacgcaaaaggattacagtgaattaacaatacgagaagaccgttcatgagagtgagtatacgcacattttcaattgaagttattggagttgttaattagttgcatgcatctaacgatctaagtctccgattttgacgtacaaagatttcgtccattattgtcgtttttccatatcatagaaattttaattttttcatgcatgatatccattcatccatgatcatcaagattcaaagtcgtgacttcttctcttgtctctggccccacatttgtagacctattattggttcatagttaggttctatttatgactaatatctagtacaatatatcaacttgagaatttatcaactatttgttaggaatgatatatttagctcactttcaattttcttggtgtattatcatttatatatttagcatgccacttactaacgttttattagagttgcaaaaagatcatttaatatttccctcaaataattatgtgaaaacttcaaataaaaacaagaattttaaacatacgagacgaaaatgtaacatggtcattataaattgttcacacacacatattctcttgacattaaaaccaaaaaaaatttgtttacatagaagatttcgaacatcaagacataaaatgaaaaaaggaagtatcaaaaagaggccctttaaagcccaatttatgggaccttaggcccattgtaaaggtatcaacatcctccatttcagaaaacgtaagattttacaaaacagacccaatagtattattttacctgttgccaaggcccatttgttggagaaaccgaccgaaaggagtacgagactaagaaaatctcttgcacatgtctttgtaatggatccgtcctttggactctctcttggatgttgtttctgtctcttcaacaataaatgattaattgtataattaacgaacgatcgttcttagggctaatagggaaatacaccatcaatgcgcatgtacataactctaatttcattttaaaatcacaggaattccatttttatacagagtccaaaattcatactttataaaaaccctttccacatacattaccttaatctagtaggagacggaaacttgaagtcataggaaactaattaaaggggagagtcaaaagaaaaataacaaaaagccgaatccattttacttttttttgtttaatatgttgttgacgtgtaataaaaagtat

SEQ ID NO: 13 - DNA, 103576 bp, Arabidopsis thaliana
gaattcaaaacaaaattttcaaaatagtttgtttgtgtgaggattatataatctttaagagaagtaaggtcacgtcatttaactaaataatagaatacataacccaacatggcaacatctaaataatgatcatatagtaaaacggaataatctgatatataatgttcgtgtgctgatgaaaccgggatctagttatctaaatctatagagttgacgatgaaagggtttgtcagatatgcatgcaaatttatttgaattaaaggttgctagcttaccaatcgtcatttaaagacatcatcaatcttaaattttatttaaatacaatgatgagtgtgttataaatgaacaaagaaacataatcatagtgacttttcatgcgattaataatgaaaagtttgaacttaactcaaagtcgtctcattagctttaatttttttttatcttccacaaatatagggtatcagaatcacttataatagaatgaagtaaggattgacaaaaaaaaaaaaaaaaaaaaaaatagaatgaagtaagagcttctttttaattaaaaagacagcctcatatgtactgtgcatactaattattccattcaactatttgttcacgggctttttcttcatttcctccagctttttatctctgcatgcctttgttttcttattgctttttcaaaatgatatatatttgataagtttcaataaacgggtgcggatgtgaccaaatcgacatttgactacttgagcgtgacacgagtttgttgtattggattatctcaaattttactggatattcagaagaataaagatttcacactgttatgtttactcctccattatacacacaaagtaacgctttaaaattttgaatttgcagcgaaaaacaagttttcattttattgagatatgtacaatgatatacagaattttcatataatcacacgcttttttagagaaaatgaaatcaatgaaagatattgtacgttatgtaaattcgcgtgactgatatagaaaaaaataatcgtgaagaaagaattaccgaagttcatgtatattgaagaaaaacacacacacacaaaacgccaatacattctactacttgaaggtacagtttcatttgatacgaatatttgatttgttactgttaggctgtcttagactgagtctgttgatatgtcgtttctacttcctatttaatgaactcctttatatcttatcaaatatatacatcactaaactttaaaacttataacttggaccgttgttagtgatacggtatattctaattattaattttctgaagaatcgtacgtggtacatgccatccaatttcacaaattcacaatagttaaccccattcataaagacaacaaccaaaattcaaacttagaattggtggagaatcactagagataaaactaatcaattgcctacctgttctacctaacaaattcactgtcaaactcaaatatatactataactttatcaaaacaaagttagaatcaaatcatgtaaacttgaacgtatattagaggcagagctataatagttgataaattttaaaggtatcttcataaatactagagtttctgaaattgaatgaataatacctaataacttggtttaaatggtggtgttaatcgatatatacattattcgtcaatgatataatccatgtttttgaatgttaggaccaagttgtacacataactttaatagtaataatatatcgtaagtaattgtcgaatagcagtaaactaataaataaagaaatggtgaagtatataacgagttggattttcgctctgaagaaaaggaacacgattgggaactgcccgatcttactgtggcagcatagtactagcataacaataggtgatagaaagctagaaaacaatcccaagcttaaaatgcttcaagtaatcatatattatgacactctcattctattgagtccctcggttgatataatagctatttcacaataacaatcactttcgattcacatatttaaaatgcataaatttgttcaatttttttctcgttaaagatttttgttttcaaaatttttaacttgtttatattaaattttttaaagttttatttaaatattttaataaaagataagaagtattttactaaaaaaatttaacgcatgataatatctcataaccacccttttacttattggagctttgcaccttactttaaaggtattaattaaatttaattggtccgatgtttgctttttgtttttttgtcgttgtttgttgtgttcttatttttttctttcggttagttgtgttctttagaaagtgttaaggctaatcgcatttaatatctcgaagactacttattaaactaaaaattaaaagtcaatgttgaatctgcatatctactacaccggggacaaaatggctgtgaattaaatccgattcgaagcacgagagatatctgcccaatcgacctatttattgaccctttcatgtttcctcttttaaagtctgtcatgtaatatacacacacgtattatgttaagatatcaaaggaaaacctatttaattttgttcattttcaaaagaacaaagaaaagagatcagatataatagattgatgtgatcaaaattagtgcttttaaaaattattgaaagttcaacgagtttcaagtaaagtagaaaatccttgtaataatacctgttccaacgggcaaacctgcagctatgctaataacgcttgacgccttttgacctctttttcaatctttttttctccttccatgtttatttattttaaataagattttcgaaaatgatacattttcaagctgtaatgtaagattttattttattctgttaaaaaaaaaattcaccaatgatatttttctaaattatccactttaaatgtttattattgacaaaaactaataattaaattgctactttgatttaatgtaacaataaaatactagtattaaacaaatgaccttgacctggacatatgtgctttgcgtggtgttaacggcgtcagctgccgttatctccatcccaaaatatatacaagggaatctctttctctctctcacaccattcaatcacttccattttttcaaaatctctcttttccctcactcactctcactctctctctctccttctctcgcttgaagaacaagcttggtatatttgttacaacgggctaattaaccaatctcttttttcacaaataaaaagaagaaagagaggagtcattttttggggttgatatcttcgaaatgggaaagaaagagcagaaggatcatcattcagtagtagagagcgacgacaaagtcgaagctgttcttcatctccttcgtaaacattctcctctaactcttaaacaggttgggtggcatattcattattatatatccgttacttgaacatgttttattttttaatagaaaattttgattcattatattgttattgggttaatgaatgttgcaggagaagttctgtaacagagcttgtgtcggtagattcttgagaataaaaggagacaatgtgaagaaagcagctaaacagttaaggtcttgcctttcatggagatcttctcttggcattggtactttctctctcttgatcattacacattctcaatcactatatactgtatatctttatacaagtttgaaatgtatatgtatgtatatatggataaacgtttatatatttacagtctttattttccaagatatgtatacaaatattttggtatgttgatatactatactaaaatacacgtatatatatttgaacacgcgtacgttacatctttagaggtccgaattgctttacttaaaaaacggtctaaatttttaagataatgaaaacgagaggttaaaaacataaagcttaaagtaaagcatgtagtgtgtgtatagatgatagatttggttagctagtggttttcgtatttgtacttctttagaaaaacagacgtttcgttgcttttttctcgggttttgatatgtcccatgtttgaacatcgagcgttaaagtgaatatccactcattatgacacccacttatttttaacctcttctatttaatttttcaagattctgttttccctttttatttttaaaattcttatattatcttttattaatatttataataattacagagagtttgatcgccgatgagttcacggcggagcttgctgaaggtcttgcctacgtcgctggtcttgacgacgagtgtagacccgttttggtaacttaatctcacttttgataattttgttttttgatttatttcataatcaaaacctatcgtttaatacccttttctatattcctcttaggttttccgcattaaacaagattatcagaagctacatacgcagaaacagtaagttaaattactcatacatattaatacatcaaaaacattattcacaaagtttatttatatattcgtttattttcgtaggttgacacgtttggtggtatttacattagaggttgctatctcaaccatgtccagaaacgtcgaacaatttgtcatccttttcgatgctagtaagttctctcttatgttcaatttatcattttatatcactaggaaaaaggttttcaaaataaagggggaaaaggttaaaaatttcaaaatatggcaactatttttattttgtcttcttatctttcaatggaaatattgtcaccgtttacgaataaacataaatgtgatttttacaaaaagagaagttggtaaaaattggggaccggaacatgtcggaactccggcaggaaagtgggagagataacgatcccataatgtccgtagtgtccctgtagagtcacggtcacaaacgaatcacacagcctcaattattgagggtatttttggcatttaattatgttgatcttctacaccagttgcagcagcagtacttctcgtaactctgatagtactctttagcttttcattaaatgttcctcttttgatcctctgcaattccactgcacaccttcctttttttttctttttttttatttataaaacaaacccaaagtttcaacatttgttttcacatgtataatattgtcaactgtgtcaaaatgatataacaattttttgtagactcgttgattaaacctaaagtttcttgcatgttttgaaatcgcaggcttcttcaaatcagcatcagctttcatgaacatacttgtgactacactcaaaatagtcgcagagtattatccttgtcgtcttttcaaaaccttcgtcatcgatcctccttctcttttctcttacctttggaaggtacactcttaatttgtttaacattttcaactatgtacaacttttaattatgcgcaagtcaaaagtcttatttcacctatctaaatgtgactttgaaagcgagatgatatactttttaagttgaagtcaaagatactgatcctctacgctcacgtgtagggtattcgcacattcgtggatctatcaacggctacgatgattgtatcaatgcaagattttcaagactcgtttgactacgacgatttctcgtcatcatacccatcacgagtctcctccctacgattcgacacgtcatcactaaaatcaacggacaagatcggctcatgcgcatcctctaggttcgctttcaccgtatctcgcgacggactcgacacagtcaaaccatggtgtctcacgttgactgacacgtcatcaaccaaactaggacacaacacaggcgcgtacatctcaccgcttaacgcgcgttctttctctttcgcgtcaccggcggctagaagcgagccattcggtggtccaaggaggagcttcttcgcttccactccgatgccagctaggaccaccgaccgtcactctatcggaaccctacgggacccgcggatacctcgcccgtctttcttccaatctccggcgattttcttccggcgagagtcacacgtcagcaaaagtgagaaaccacgagattcgttcgttcagtttctcaagttttatcgtagaccgtacgatgagatgacttataggtcaaagatgaggccaccgctcggtggtcttgtatccattgtttcaactcagattagacgccgtcacgtgtctttatcccaacggttctaactcaaaaactatccacctattaaagtagtatataacttttgccgtgttttttttttttttaacttattgcaatgtttctatcatttttagttcgtcaagtgtatttttctaataattttgattaattgtttatttatcaagcatttttatatggttttgatttcaattatttatctaaattgttcaaagtgaaagtcgtaccgtttgaagtttgaatgctttgtatcaaggttattactatgtgaactaagatttcagatttagtatccgctttttaatagatgatgatttgtaataaccttaattattactatgggcacatttcggaataagcatgccaaaaaaatagtaaaaataaagtcttcgctttgggtaaatcttaatttgaaaagtaagaataaaagaagacaacgtggtcgtgacggagaaagactcattgggaaaattcaaatgagaacatgcgatgttgctgttgtttctttatttgttagaaggattacaagtacctacatgtgaccccattatttcctaatcataaaaataaaaaagcaaaccgttgacaaaacagttgatggcgcaatagaaagaagagaaattttaaatttcttatagtagtaaaaaatatgaaaaagacagtgtaaacagttaaacttttctcatttatttgagctaaaagacaaatagacatttcaagttttttaaatgcattcgctcgcctacttcgttaaatagttagacgtacgtactacgtagtccaatgaccctcataagaaatctttgaattatgtaatctaaatagagatatgtaaacataaccattgtcaaaacagttttagttatgcattagttttggatattcaatttgagtttacactaggggaaaaagacgacatacgtaagggttagagattgacattactttattgagatagtttcagtttatgttaggaatatgtgtcaatttctataaaattgattgaaaaggcagggtggattttttttctgttttgtagtcgttgtgtgtatatgcagattgttacattataatataacatttattgttgtaagcaaattttatactagtattaatcttagtaggaaatattttatgtattgcatggaaatgagtaatatgtcttggagcaattgtcgccattgcctcaaggttaatacaaaaatcacatttctgaagtgagatgacgtaacttgggttaggcattttctatttggaagtttgtccataatttttttccaagtatacttaaatttataaaaagttatatgaaatttcttgcataattttcggggtcttttttatcttttatttatttcgtttaactgttgagatttgtgtcttcttgcatggaaaaaaaatactttaaagacagacaaacagtttaattaagtctctcgacttttattctttgtcagtttctgcggtaatgagttctcatttgtccctttcgtttgttactttttgcggtaagcttcgaaattgatttcgtcttttaagaccatactctatatttttcaagtaaatattgtagccattatacaggatttagctttgggacaaacccctttttttgttttttttttaactcatacatcatatatcgtaggccaaacattgagttcttttcaatagccatgtctacgagataaaaatggtaggttttggatcttgaatcaactagaaacttggatttcaagtaaatttaagaacattaaatgataattatatcgagaccctaaattccacttcgatttaacatgcttatagagtatggatttacttcgtttttatttcctgtactacaaaatcgagtaattaaacatatacaaaagtaacaaacctcggacattgaagatattctttagtatcagaacaaatttcaaaattgattatggaaaattaatcaatttatttcaaccatataacatacatcaagaggtgaaacaaatcacatttataactttagttagaacttcctttcaactttcaattgtttttctatgtttttttgttctttctggacaaatttgttatgttctcagataagacgaaatacagtgataatgtttctatgaaagaaagaaaaaaaaaccaaagttagaaaagataaataaatttctggactacttagatttctttgaggtcagcgacgacttgttggtcaaggcatctagttcttcttcttgttgcttctttaggtatctctgtgcagttgaagtcacaatctggccgaagaaattcaaaagcatcagccacacgactccgttccacacggatgcaaaagaaagatcccatttcttgacctgaaccaagaaaaaaatcatccaaatacctcaaaatgcagaacaatgcaaaacggtaatggactaagtaaagagaaacaaaagatacgttacattgatatcagaagatactggaggcgaagcaatcaagtacttctctttcattaagcggagtttcgctgtgagctcaggcaatgcagaagcaaaaccgggcacaaagctcagaatatatatcagctcattctctacccagtcaagaagctgattattacagacgcatatgatgaaaaccgtctgcaaaagataaaatgttgacaatgagatgaaacccaaagaatgagaacgaaagtgactcaaaacaaatagggtattacagaaacgctcacaaaacctgtatatgtgtcttgatgattgcctttccaatcaaggttgcaaggaaaaactcccaaaacggtttctcgaattgtccacacatgattccagcaaggtcgaataatgggttaggaacctgaatgtaaggcagaacgtaattgtaataagcacatcataagtttcccggaaccttaaacacacacaaaaagtctatgcaagaagcattggattgttcagacgactcatctaaaacataccgaagcaagaatcaggattgtgaagaagttgagatattgtgaatgcgacaataaccagcttttgatctgatttacgcgtttagcaatgaatccgttatcgtcaccagaacatgtctccaattctttcattttgccaccggaaagacttgctgtataaagtcagagcattaataatcaatcttgatgcaaaaactgtttcatctcctgttcatgtactagatttaaactcgacacctctaaaaccatttaattcattcccacttagtcacttagatatagctcaaacatcaagaagcttctaaaactgggcctcaaagtagatatcttaacactaaccatacacattgagttgtcaataaaaaaggtcggcagagtgaattttcacctgctctggagataaagtaaggaggaagttctcccaacgctgttcctagaccccataggatggcttctatctgaacctgtggtagtatactgctaagaggaactccagaagaaaaaactggggagccaaactcgtggcatggtttatcaagccatgaagggcttctcttcaactgaattgtatcatatatagcactctttaaatcgactcgcccgcactgcattacttttatggtaaataaagcaatatggggacccaaataaagaacaaatgtatgcaaaccagatcctggaatcataaataaaagagaaaagagaactatgttagtaacatctcagcaataagataaaccggaaataagaaactgacacagaatgtcctggagggagtaaaacatattcttaccaagaccaattgatgatgcaacacctaagaatatccaccatagtccaaacctggtgtactcagacagttcttcaacatgctgcacgaggagaaaattagaaaattttaccgttttcttcatctaagaaaacaaaagaagctgataaactaagaatgaaacaaatatattgatcatcactcatgtctttcgatatatgctcttatccccaatttcaatagcagtagaaaagccgtagctgtaggatttctcatccagaagctttcggagatttcttataccaagcaaagaaacatcactagctaaacctacagacagcaacagtctgaatctgtttaccttgacgtgaggcccatctagggtcacaagaagagctgcaaatgcaacaaaaatgctacaaaaaagtataagccagccaacatttgcaagaaggtaagaggaccatcttctaacatagagaaaaacagcaacaacaaataatctcaaggttttgaatggttgtgaggtcaatgtcagtttttcaagatcctgttgatgcttttcacgcaaacctgcaaaacccttagacctattagtcgccaatgtaagaagtgctatatcgttaacattaacactcaagtcactttaatttcagattctaagaaattaagggtcggctcatgattcaaccaaagaccgaaaatttctggtctaatcataacaactggataatcatccaagggaatcgcacacagatgtatatttctaaacaatgtatgcatcgattacagaattttcaatgccgcaactataaaccctaaagtttcaaattttaggaacaaaaacagaaaaagaagggcacctgagatcgcaggagttttagaagaagctcgatttccataacccatatctctttcgcatgctacgaatcaataaacccctaatctgaatatgaattttcaggtgcaacttctcgtcgagtctctactgaagaaactggtctctgattctacaagatgtgtccgtcagacaggaaattagatgaagaagagcattgggtctgaagattttggatggattgagaaaggatccatcaatctcgatctcctatgtttaaggtatgcgaccaaaatcaggttcccgttttgttggatgtgatatggcgcattctattggttcttctcttcggtttaccggttatttataaaccggttccaaaagaaccacgtgtcatttcataacgtgacaaggaatcaaaggctataggagatgttagtttttttgttttttgttttgttagtctttatcaacttcgtaacgacccaagcttggcccattgtgatctacaaatattcattttgatctacaaatttttttaaacgggctttctaaagctaccgtggcggtggctcgttcgtcatccgtcatcttaagcgttccctgaagatacgtgacaaaaattctaggagagtgcaaccgtatacgtgaactaatgggctattttgaaggcccagtgtgatccacaatctttaaaacagaccggataaatttatgttccttccttgttattgcggtcaactttttttgtttttttttgtttggtgaaatcaataacgtctttggctttaaacctttgtgactttgtgtacaaattccggagtgtctctctcccaaatcagcatcgcagattcgatttctcatcctaagagagctgaaaaatggaggttggattcaaggcattgctcgatgatcttgacgttctcgagaaatctctctcagatccggctctgatcaacaaggtgtttgggtttttacttccgatctcgtttttcttaacgctgtgaatttgcttagtgaatgatttcttccaatactgttgattcctcgaggaattaatactcaaattgcgtttcatggattatgatttttccgttgggaattttcacatgcattggtgtttacgagtatatctttgtattgatttgaatctggaatctccgaattaatttcacttagccttttgttgtttgcattgcttatgaattctcctgaaaatgtgtttgggctttgcagctgcgatcacatgttgagaatctagccactctgtctaaatgtaatcctcaccggcgttccaaagtcaaggtctttgccttgtattgacaaattctcctcatttaaagttatcttctgtaaaacgtttctgatttcaatctattgcaggaactaagctcggaagtggtagatagtaatccttacagtaggcttatggcacttcagcggatgggcattgtggacaactatgagagaattagagagttttccgtcgccattgttgtacgtatttctctccttgttttttcttttatgatattttccttgtttagctataagtttgttcattaagtaaggaaaggatgatctaaatgacagggaattggtggtgttggaagtgttgcggctgagatgcttaccagatgtggtattggtcgtcttttgttgtatgactatgacactgtcgaactagctaacatgaacagactgttttttagaccggaccaggtactcaattctcatttgagttctgcaatacatattttcgtccctttcgtattgtttctgatctccggataattgtgactataggttggtatgacaaagactgatgctgctgtccaaacccttgcagaaataaaccctgacgtagttcttgaagtaagttttctacatgatgaggttaaaactagttcaatggccatttttacatcatatttactggaaactaaaaagtctatggatttgcccaaacggatgtgttcgatttagactcattacgtattaaatgggaggtctatggtgtatgatgtatgtatgtatccttaggctctttttggttaatttatttatgttgtttactgcggaacattattagcttcccacctacagaattcctgagtcaccaatttatgctatttctatttttcttctgctagagtttcacaatgaacataacaacagtgcaaggctttgaaaccttcacgtccagcttgacaaacaagtcattttgtcctagcaaagagggcggcagtggtgtggatcttgttttgagttgtgtcgataactatgaagcaaggatggctgtcaaccaggtagctgttacttctttctcgaaaaggcttttttgttacaaattccacagttcttacttcaccatcgagcatttttgatcttacattctacataattcaattagttgggaatggaaaatatataaaatattctagattggctctgatttgagtttattcttatgaaatataggcatgcaatgagttacgtcaaacatggatggagtcaggtaaatagtatgctaataattatatgtacttctttttttcatttctcttttggctaacaaaaaaggtgatattttgtgcaggtgtatccgaagatgctgtttcaggtcacatacagctcttggttcccggagaaactgcttgttttgcttgtgcacctcccctggtatgtttttttccttcttatatcactcttacaactctaacctataatgccctgcattaattagtgcttgaggaatgtatcagtggaatatgggtggttttaaggattctgtgatccagggtattgttaatactactttttggattttctctaagcaatctctttactctgtggtaggtcgtggcatctggaattgatgaacggacacttaaacgggaaggggtctgtgctgcatctctgccaactactatggtaaatttcataccaccttacaatacagttcaaaatttggctatgttgactatttatcaagttttctgctattgcttttgtttatttaagcgctatctatatattttaagactcttgtttgattgtcaattcagggtgttgttgcggggcttttggttcaaaactctctcaagttcttactaaattttggtgaagtttctccatacttggtataggctttgcttcctccagctctcctcacagttaacactttatagtttatcacagaatgattataatttgaatcagttaaagcttactagttttatgcccgttacttgatcccacagggttataattcactgaaggattttttcccaaccatgaaaatgagaccaaatccacaatgctcgaatgtagcttgtctagagcggcaggtaacctgattaaatgcaaccacaaaactatctcagcttgtctttgttttgcgccttttgtttccatccatgttctggtgaaaaagttgaaatcccaaaatgcagaaagaatatatgcttgcaaaaccagaaagggatgctgctgctaaagctaagatggaagctgatgcatccacaactatcgatgaaggtccactccatgatgataatgagtggaacataaggtaataactcagtgaattagttaaaaatcaaaatttgtatttttgttatcatattttctcctttccagccatatttgcaacaagaaatctgatgtgtatctcatgtctttttatcagtgttgtcgatgatgaaaatgagaaggatactacaaaagctgcctcaagttcaggttacttaaacttgggactctatgtgctatccatgtgaaaatgtatcaaatataagtcctgttcttctgactgttatctaaattgatcctgtgttatgtgtagatacattacccgaagggcttactcgggagcttccagttgcagatgagtatgagaaagcaatagccatagcctcagggtcaggagaaacagaggaggaagatgaccttgaagatctgaagaaacagctcgaagctctcaacgctgcttgagtctttatgagggagaaaaaatagttgttttagcatatttatacatgaaagaggctacaagtgcaattgtgtatgcaaaaagagtgtgttaggattggtaaattggatctcatggacatataaacgtttttgatgatgacttctcccgtttttttagttgttaccaaagacaaaaagatacaattttgaagatgtttcatggatttattgtcataatcatccgaactagaacttagaaattcaaattagaaaaagattttgtccaatgatgatgatccaagtttggtttgtaatgtgtaaaccagcttttttggaggtaagatattaattgcgcggggaaatcaactagatgacgtgtgaatcgcgaattacaattacgtttttggatggagaactgtcttttttttcctttttatatccctaaaatacttttttgtacattcatttatatcaggaaaaacagagttgtaaccaaattattacagagatattcaaagatatttcaacctatcaactaaagatgacgtgtatattgagaatggcaattgcgtttatgagtgggaaaccaaattatttcattaacatgatctttaggaataccgctaataagagattactaatcactatttgaggttttaatttaaatctttgtagtcctgattttgaatatttcgttttagctaaatcagctccaatttttcccagttatcgtttgtcgaattcatattactgttaatttagttaacttccgaagactattagtacatgattcttcaacaaagcaaataaagaaaagaatcttgatgtcgttctctcaacaattcaacaaaacttggtctcgacgactcgaccgtgtgagatgtttgagaagtcagaacaccacacgtgtcgacataaagcccgcaccacgcacgcttttcgtctggatatatccaaattactttacagaaatcatttgtattgtttgttaataaaaactttgaaccactttgattactatattatttttttggaatttattctggtgacattaatgttctatcctccacgcggttctcataaaccgacttggcttctttatttttcctttatctttctctatatatttacacacacacgcatttgtgcagagatattcaaagattagaaacattcttgatagatacaaaaaacatttttcagacacaaaatcataaaatctttgcctttagtagatcaaagttctttacattaatcgttagaagatgagccagtacgatcacaaccagtctgcaggtaagaaaattttctctgtttttattttttgttgcctttaaccattaacgttatcttaagaatatttgtaaactctttatgtatattatgtaacgtaggagctaacccaccgccaccgatgtctacctgtacatcaccaccaccgccgattggttacccgactaaccaaccgagtcatggttcggtagctcagggtaaagtggaaaccaagtctaagggtgacggattcttcaaaggctggtaagtacttatcatgaaattatgcaactttatgcttcatcataattatccttaatgggccaatatattaaagcccaaaaagcttattttttatttttaaaaaatttgcgatcttatcatgaaattatgcaacttcataattcaacataatttatgcttaatgggccgatatattcagcccaaataggttatttctttttctaattttgatatatctgatttgttttttttaatggaatctttgcttgtagtcttgcggccatgtgttgctgttgtgccctggacatttgcttctaagccatttgggaattgggatggtctatttatgacgagtttatgtgaatgtgatgtgaattattattattctctccagccttattgtataaattctctattttttgtttattattttcttgtaatactttgtgagacgaacatattatggtttgtatttggatctctactctctagtacttaaattaatttgtcttgctcttggattggtatagttaatagctttaatctcacagaattgcgcgtttttctaatgattttctgcaattataacaatagatgaatctaattattacaactcatatagaaatctctaaatcatcaaataccaattgttgcctctgctttacgaaatactttttattattagggttaacacaatttgaagctcagagatatctttaatcgaattgaaaagacaaatccaaatttttttggttgaaaaaaaaggaaaaacataaaactaaaagtctatgattttcttccaagtaacaagccctacggttgttgggattcggttttctgtgaaccggcatggttaagctggaccggttttaacgtaacttcggccatcaacttgaaaactccagtgaagtcctcatcaagcggtcgtgtcgtcttattaacgtacaaaatcaagtcattgaccaagaactgagcctcgaatgcatctattccagcatcctcggtaaagaattcgtagagttcaactaactcataacaatcttcgtcttcccagacgaattcatagaccgaagttgagaaggagatctctaacggagaagatccttttccgagaaccttgacctcgacatgaacaaaaaaatcttcagcttcttctcgtggttggtatttgatgtaatggtcgagtttcgttaggtcaaagggaggagtgttgttgtgatcagccatggttagttttactttcagaaagaaataaaacagagagctgtgatttgtttgcgtgtgtggtgtgaattgtgaaattgaggtgtctactgtgtctattatatataaccaaaacatttaatccttttttttggattgaaattggactctctttttccttttttttttacttccttatttatcttttaagtttcctttttccttaaaacccttaaggacctgcaaatcatatcaaacaatatctcgctaaaatctaaaaataactgaaaatcggaaataaagtatagatttccgtaagacacgtgataatattcgcataaatctaatggctttatcatttttcaattcaatttcgatgaacggtttccaaattccaacgatattgttagaatgaatcagattctagtgtggtcttgcttggtcaataagaaataaaagtatggtagaagcaaaaattcttagaaccacgaaacaatcaaacaaacaaatctttcataaatataacaaaaagaaatcaataatttttcccaacaatgatacctagaatgacagagacaagagccactccaagtgcgatcttcaatgtcatgagatgccatgtttcagctttctgaatcataacgtgccctgaagacgaagcagcatccaagttcttcttgatcttagtttgctttggatttgaaaaagataagtcactgtctcgagatttcacttctacttcttcctcttttcccgtagactcagtttcctgcaaatttggtttctacatcaacagagcattctttcgacattttgtatagaaaagaaatttaacgaagatgtggttatgttttatatggctaaccttagatttagcatctgcaagcttcactttctgttcaagctcattcaacttcgattcgagatgaacgatcacagattttttagcatcaagctcttcttgtgatttctttaaagtagcttccaactctgaatgcttatgagacaaggcttctttctgtttcccccacagaagaaagtatcataactcaagaatatatactaagcacaattagatataaagttagaagaagctaaagaaatatttattaacctgttcagaaatggctgtgtgagaagcttgaagctctttatgaagctgaattgctttctcttcaagcacatctcggtcactcgccttatgtttatgttcctgcaattttgaggtcaattctgctactttttccacctgagataaaaaaagacagaaaacatcatcaattagtgaccaagtaagtattcaaaatgttgtccaaaaagtattacctcttctttcaaatgtatttctacttgttcaaattttgactccaacaccgacttttcagcaaccaaggcactgagcttctcgatttgggataccatatcatcggatttagacttgtctacttggagttgtgcttgaagctttacgagctcattctttgtgctctgatatatctcattgacttggtttttctcttcttcaagggaagagatctacaacagaacaaagtgtcattctttcatgatatcagatggtttattagtacctaaaatgtattgtttacctgtgatcgtagtctttctctttcagaagtaagctgttttgttagatcttctatggttatctgaagttctttagcttgttgatatttctcagcctctaaaacagagagcttagcctgaaaatcgtcggtctctgacccttgatttgctagtttctggttcagctttatattcacttcagccaaatctccattctctttctcaagctcttcgattgtagactcaagagtgttaagtttcaacaaagcctcttctacctccacttttctagtatcagcaactccagatgcttcaagaacctgccttttgtgctcctcgattacgttttcatgggatttcaactttgtaatcaagtctttagcttctgtgtctttctggtttaacttttcgattgcggtttccttctcagaatccagatatccttcaagttcttgaatcttgatcttgagctggttgtttgtatctgctagtaactcattctccgcagacgactgatcaagttcttcttgcaaagacagtgattgaccacatgcttcagccaatttcccttcatatactcttattttctcctcgagatcttttgatttctcagtcaaagacttggcctctgtatctctgctactaaaatcctccattgtcttttgaactttaagctctgagtgtttatgcaaagcttcaagctctatgcttcttgtggtagcttcgtctatttctcttgcttgcttctcaagtctctcttcagaggatttcagcttctccatcacagcattaagattttctgacaagtccctctctttctccattgcaacgcttaaagtagcttcaaggctcgagtttttcacttgtattgcttccaagtctttcaatttttcctctgctttctctagttttaactgagatgtttggaatagaccttgtagttcaacgctgcgcttagtactcacatttccaatatcttcatgctctgcacctttctgcaaagcaattctcaaatcttcttcaagctctgagtttctcgccgatgattggttcaaagatgactccaatttacttaccttttcttggtattcctgcatctgaatgctcgacttctttccttcctcttcagccactatcaaagcagattttaattcagatactttctcggataattcctccaaagatttcagtttctgctcaagaacagagttttgggacaaagcttgagataaaagagcatctgttttggagtatctttcatctgaaatctttagtttctcttcaagttctgatgcactttgcttttgaagctcttcaagtttctctgcctctaaagcagaaattcttatcctgtcctccaactctatcatcttctttctcgagttctcaagctcgagacctaacccatcaaaagcttccttaacttcagttagttccttatgtttaacatcatgtaactgcaaagcatcttctaaagacttcaactgcttctctgctttctcatcatcatcatcatcatactttttgttgatcccttctttctcaacttttacaaatccaccatcaaatattgtatcctcctcttctttctccatgacagtatcttcctttgtcacttcctgtaacaaatcgtcacaatacttaatcttctccaagaactttaagcaaaattttcatctgagttacaagaaacaaagatcattcattaccttagcttgagggacgtctgaactcacttttgttgcttcttccatagctataatcaagcaattcctcttattttgtgttctgcaaccgctgagaatttaaggctttaaattggtgttaaagagtatactttttgtatatatgaatgaaatgtcacacgttaaagtctcaataatcaacaagaaatatgatcaagttcagttgaacaatccaaccgcaacaatttcattgtttaaagcgaaaaataaagccctaacttgcaagaaaaccatttccccagagattatataaaataactaacaagataagataatctccttgtgacgacagagagcatatatatacattgtttatattcaataatacgatattcaatggtggatttattattgccaacaacattctttcaaatataataagagaaaacagaattgagaaggtttggaagatctccaaataaaggtcaacgtctgtattttcacaagtttttaatctggctaataggtttatgatcatctaaattacaatgtgatcaaactttatgatgtcaataaataaaaactacccaacaaataaaaaaaaaacacatattaaatgctcaccaaactagtagctctcttataagaacatgtggaattctaaccaaaaatttgattaaaaaaaaaacattatcataaattaaaaaaaatgaacactatattaaagcacttgaatgatcttgcaggcgaataaaattcaaaaataaaaataaattcgactaagctaaaagactcacaaaaccagttacatcaataaagacatctcttgaaagttgcacctaaatcttgaaagaaatcaaatcaaagatttaccacataccattaaatttttaatagtacaatccaatatggaaaactaacggcgattaatataaacaaagaatttgagtttctcaaagagacgttgagttttaccactaatacttgaaaagatgatcgatcgaaatctgaaattcggaattgtcacgatcctacaatatatagttccaaatcccgaaattgaaaaacagagacaacttggatcaaagatcaattatataagtttttttaaaaaaagataagaaaaaatatcataaaagaccagaagaggtgtggatatgcttacttgaaggtgctgaatcgaatgtactaatctgtttcttttccggtatttttctaataagatttcatatttttcggagatcggaacaaatttagtcacaaaatgcagaaagagaagaagatgaagagatgtaaatgggagagagagagtctttttatttgaaaaagaaaatgtggagagggagtgggtctctttgtatatcattgaaggatagttatctaaatttccattatgccccttcttttattcatagggttcatttgctaacaagttttttgggtgttttattcagtaattaatgatccatattcggtgatacatatgcgttattgactaagacaatcaatagactaataaatagaccataatggttctacgtaattacaaaatttggatcggggtatcaaaaagaaactacataactagtgaaacgataaaaacacaatatatacttgcaaatattgggacctttaatttcacttcttatattcattagcttacaatcttatatggtgaacgtgtatgcgagataaaatttcacacaagatttattttcacatgggatgttagatgcttcatttctatttatcttagttatcataaggctgtggacactggacggtatatatatatagtcagataatcaatcaacaaagttaaatgcatgtgtactcaacttccaaataatgaggtttattgaattatagttgtatagactcagtaataacgaatcatttctaacttacgttttttttgctgtatttctttttgcatagtgaaacattataacaacaaaacatcagagctgaacagattttgtttgataaatgattagtatggcattctataaaattgctttaagtagatgactattttttttctcttaattttttgttgcacattatacatatagctagcataatcactttattagttagaaacatgaaaaatgatatatcatttatcaccttctttgtttacatgtgagataaagtactcagagtatatatattgacaatgggttctcaaatatattatacaaacgaaattgatattcacttttttttattctagtaaaggctatgagcctttttggtaggtggatcgagatagtttaatatttgtaagaaagcaaacattagcaaagggtaatttgcaaggcattccaacaaatccttacacttcatgcaatttcatatttcatatttgttcgtataaataactctcttatgcatcatcttattcattaagttccttttatcctttccctctcaaacccctaaatcaaccaatcaaagtttcacagaattatcttctattattcaggtatgaaaataatctcattatccatatccataggtatcgcaataattgccgttctggcatctaaaactctctttaaaacacatcctgaagcttttggtatcaaagcaatatcatattcattcaagaaatccttatgtgatcaccatcaccatcatcatcatcatcatcatcaccaccaccggcataaaccttcggataccaaaagaaaggtatcaatatgcgacgatttccctaaaaatatacctccattggacaccgacacaacatcctatctctgcgtggataagaacggttgctgcaatttcacgacggtgcaatcggccgtggacgcagtggggaatttcagtcaaagaaggaacgtgatttggataaactccggcatgtactagtatgttgtcgatttagttactacaataacaattaagaaatctatataagtaaatgatatataagtattgcatggcagtgaaaaagtggtgattccgaagactaaaccaaacataacgttgcaaggacaaggcttcgacattacagccattgcgtggaacgacactgcctactcagctaatggcacattttattgtgccacggtccaagtctttggttctcagttcgtcgctaagaacatcagtttcatggtaatttcattaatttatcaattaacatatgtacttaaatagaaactaatcaagggataaaatcaaacatgatatgaaatggttactataaacagaaaccggtaatcaattgtttcgatttagtacagttttgatttcaatttcttataaaactatagctttagtttgaagtatatttttgaaagatgttgctttaatcggtttgatatttcctctctcggctttttctcggtttggttaccatatggtcgaattagtgttctcttctttactcggttttctcataatttttttggtacgctttcctttaatttaaccggataaggttaactagtatcaacaaattaaagataactttaccgtgatatatattgtgatagaacgtggcaccgataccaaagccaggagacgtaggagctcaggcggtggcaataagaatcgccggagatgaatcagcgtttgtgggatgcggtttcttcggagcacaagacactcttcatgacgatagaggtcgtcattacttcaaggattgttacattcaaggatccattgatttcatcttcggcaacgctaagtctctctatcaggtaatttatatattttttattaggttactttttgtgttttggtttaatggctccaatataattaagttccatgttgtattgtgatgtgtaggactgtcgaataatatcaatggctaatcaattgagcccaggttcaaaagcagttaacggagccgtgactgcaaatgggcgtagctccaaggacgagaacagtggcttctccttcgtcaactgcacaatcggtggaactggtcacgtgtggctaggtcgtgcatggcggccttactcacgtgtggttttcgtttccactactatgaccgatgttatcgcacccgaaggctggaacaacttcaacgatccctctagggacgcgtaagtacaaaacacaatttttctataaatttgtttttttgttataaggaaggttgattaatactaagtgacattgtttttgtttacaggactatattttatggagagtataattgttcgggtccaggagcagatatgtcaaagagagcaccatatgttcaaaaacttaatgagactcaagttgctctattaattaacacgtcttttattgatggagatcaatggttacagttttctgacctttaaaggaaatatatcaaccaaaactcgttggaatatactctttttatatatcttgaatcggaacattatgattggagaaagtgcaatttttaccaatgatttaaactgaatcattgcaggttaaagttcaaaatggttaaaaaattatttatatatatatgatacataacctccaaattataaagattacaatcgaattgaaaagtctctaggaacaaattagaaataggtacattaattgttgacgacaacgacgactatccaattgtgactacattaattttactaaaccgataaaatagatccgggttcggactttaccggttcggttcaatatatcaacatacgacatgcgatcacaacggagagcaccgccgccggagtattcgcctccgatatacgatctgttccacttagattcacactcgatctctcgaacagacgaagaaatcgtctatctctcttctcaacagatttcctaatttttgtctctatggattttgtttccgtaaagaagatacatctttttgtgtaaattgtcttgtagaaagaaacattgattcagtagagaaataggataaatcaatctctgtacttaaaacaaaagtatcatatatcattcgtcacaaccacacaaagttgttgaaactcagtttcaaagtttgaacgattaattatgcagtcttcaactgctgacttttgagaagattattgatttgtctcaggaatacaaaattgtcaaagtgattcattataaatggccccattcattaatcatccgacggctttcacgttatatagggtttggcactcatatatcgatgggctatatgctacttgtctcgtctaacttggaagaagaaaaaaaaagttttatcttctaatgaaccaatggatatcaaaacttggattttgaatacatgcaaacattacttgagtaaagtatcaaaaacttcattaccgaagcttatgatatagtaattgaattcgtactattgccataataataataaaaaattcatgtactaccacaattcaaagtagagacaaattactatattaaactctgaaggtatttgtgtgccgttgacacaaataaaattatcttagtatgtttttattttgaggcacaaattaatgatcaaatcgttaaaagatgaattctgggaagtatatactgagtggatattttcatttttgttggtagataatatccctcaaatcaaatcagcagtatttcttttcttgtaaaaggttttcagcatattagatgagatccacaaaaacaaatatctacacatcataaagcaataattctttgccaaaaaacaaaaaagcaataattaatttcgctaaaaaaagcaataattaaagaagttagaaattcctgagttttggggaaaacaaaactcgtgatttttaaagctcttccaggttggacgagatatatagtactgtagtctcttgtgattttttgtgctatatttttgtgtattgcgtcgcatatgtatgaccatgccgcatggtatgcagcaactacaaaacattcaattttaatttgtacgaagtccgaatgcagtaaacatatgtactatgtagtaatgtcacacgattctgaaataaaacatatcatggtcaataatcaagatgacatcgatgccattttagatgattttagctctggtttattaagacttgcatcttttcaaaaaaagcaaaatatctatgcgtagacctaaaggtaacaggatagagatttagatagaattattaaataatacgtaagacatacatgttaaagtccaaatcgaggaaagggaaattgggaaaatagagtcataatatcgacataatcagacgtttgagtcggttgacttcacatgtgcttaagtaaagagagaagggaaattgtgttttagatagttccgtacaatttatgtcgacattctctcgacatatagttaagctctttattttagtgtttgttaagatataatcgtattttttaaagtattcacgagaaaaacagtttcatagttacacgtagcatgtatgaacgtagtagaggatctttctcacttttaaaaatctattccctaaagattcgatttttcttttatttcatcccctcaaagtagctctcaactatctataatttaatttttaacaaaaaaaaataaaaaattagtagctccaagactaactatttgtagttttgtaccatggctaaaatttttaaaacaacatgttcgatggccgcatacgcatttcccttttcttatcaatttaaaattaattattgtttagattcttcgcgaatttgattacacagatcacatgggccatttgatcatcatgaccaaaatgattgcgaataatcgattattatttgtttatgttcgaatgaggatagacaaaaaattctgctcagtttttgacaacctcgagtaagttattttagaatcattttcttgaatcacatctattacaaattatttatgaaatatacaactaacgttcattcgtttttatttaaaatttaaatgttttaatttatttcgagggacaaaaacaaatacgggcctagtgatttttcatgtattttcttctttgaattatggagtcaaacttgtttgagttctacagagaaaaaaaagcaaattaaaataaatattgaatgtcatattaaagtatataatataacaaaaaattaaagaaataagtcttctcttagaacagcacctgttaaaatataactatataactgtgtaacacacactttgagataaatacatcgatcactcccaatctccccccgtattttgtcctttattcttccattcttcgcgtcgtcatcatttatcattatcatcgagaagagattcaaattcaaaccctaatcgataagatgagaatcacacaaaacgtcaagctcttactcttcttcttcttcttcatctccttcctcttcatcgccgtatccgccggcgagtctaaatgcgagtgttcacacgaagacgacgaggcaaacaaagccggagcaaaaaaatacaagatcgccgcaattccttccgttctggccgccggagttatcggcgttatgtttccgttactaggcaagttcttcccgtcgcttaaaccggagacgactttcttcttcgtgacgaaagccttcgccgccggcgtaatcctcgcaacggggtttatgcatgtgttgcctgaaggttacgagaagctgacgtcaccgtgtctgaaaggagaagcctgggagtttccgttcacaggctttatcgcgatggtcgctgcgattttgactctttccgttgactcttttgccacgtcgtatttccataaagcgcattttaaaacgtctaagaggattggtgacggtgaggaacaagacgctggcggtggcggtggcggtggagacgagctcgggttgcacgtgcatgctcacggtcacacgcacgggattgttggcgtggaatctggtgaatcccaggttcagcttcaccggactcgagttgttgcacaggtaattaactaatttattaattaattactttaattgacctctgttttctaaactttcttaaaggaaaaaaagttaaatatatatgaccatgttgagaatatgtcactgaattttcatttgcctattgtttatttttttcttcgtcaacttgtttttgtttttcttaagtaattttgtcgtcaacttccatatttagcattttgtagattatatactcttattttttttggttgattatgtactagtctggtttgacataataaaaagaactatattttttaattgaattatataaaacttacatatatcattaatatatatatcatatagtttttctttatgtaaattaaaattttaaggtccatggttttttggtcctggcgggtaaaagattcttgggagaaatttgtccacatattaattatagggtccccaaaagataaagccagaaaaaccaactcttgctcttaatagagttactggtaatagtcatacgggttgtatcatataagtataagtttgaagtgaaagtgagtcaacaaaatgtcggaaaacctaaaattagatcaagatgaaatcttttcttgtgtatgaaactgtgcataaaaatagagatacaataataagtgatgggtccatatgaggccacatgagtttgcatgtagattccatagaatcctaatccttttagctttatgtaaaaagtgaagctaattacttaataattttgataactataaaataggtgttggaagtgggaataatagtacattcagtggtaataggaatatcactgggagcatcacaaagtccagacactgccaaagctctctttgctgctttaatgtttcatcaatgcttcgagggtcttggtcttggtggttgcatcgcccaggtaattatatcctctcttttttcataattttcttttaatagaagaatcataattaagatcaatatacacaaaacaggtatagttttcattgatatttatctattgatttttgcgtccatcttttcggctttctttgacttatctctactctctaccacttgcaaatttcaaacagtgacttattttttcaacatatacatttaacctttttttgtcagatatttatatatcttcactaaattacaaaaaaaaaacactataaagtttaaaatgaattagaccagacagagttattaaaaatttttttggtagaatgcatccaagagttgaatatatgctctgaatgcatgtttgacaaaagatgtatagacaatctattgttttgtcaaacatttgacataatcagataaataatctgacacactctaaattataacatcggacctggcttacttatatgtgtcttctaaaccaaaatctaaagttattttggatgtaaacgaattcctttataacaaaataagtgcattcaaggaaaattaatctacgaatttagctgattaattcataaagttactctcaattgtgtgtgtctctgatctttttaactcatatctttcgcagggaaatttcaattgtatgtcaattacaataatgtcgatctttttctctgtaacgacgccggtaggaatcgcggttggaatggcaatttcaagctcttatgatgattcgagtccaacggctctgatcgtacagggagtccttaacgctgcatctgcaggcatcctcatctatatgtctctagtggactttctcgcagcagattttatgcaccctaagatgcagtctaacactagacttcaaatcatggctcatatctctcttcttgttggagcaggggttatgtcacttttagctaaatgggcttaaatgggcctaccattatgcaatatggaattcaaaatgactctactacaaccaattcactaatagatgacacgttatatgattcacttatagtttatagtctttgtttttttttgacacaaacttatagtttatagtcttgtttcatacaaattatatacccttctcgtttcttgacaattattggtttcaaaattttgttttttgtttcattttatcgttttatgtttttagtgtaaacttgtaaacaaaattcaagttttagtttcctatagttaaagagaaaaatttaaagtgtattaataaaatgtatggtcaaatatataaatcccttattggagtgaattttattttcaagatgacggttacactgccaagtgccaacgaaatgttagtagttcgattcttctaagtaggtgaacagaaagttggaaaaatgttccggtgtgaactttactgatactgataaaaaaaaaaaaaaaaaaaatctttactgataaagatctcaaaaaaaaataaaaaaaattgaacgttgactgtttgttgacaaagtaaacgttggccgtatctagatatcaaaattataagatatcatacgtgtttagatgaaatttgacaaatagatggagattagtatcttactgacttttacagttactgaaaaagaaaagagtgaaataggatagtttttagagtatctttttaaaaaatatttttacattctagagatcctaacattactaattagctatgatttttttaatcactttggacaaattcagaaaaaaaccattatccttttcttttgtcatccgaaaataatccattatccttgttaatcgcaatggataatgtaagaaaagaaaagaaaacataatatttgttgcaaaaaatagaattaaatacgttttgtgactgacaaaatactgttagaaaagcttaacagactgtggataaaacacaacttaaccaaaactgaaacgttttatctattacaaacaaaggaaataaaaataaaaatcatatggaaaagaatcgaaaatcaagcaaataaaatccatttgcattaaatgaaatcgaaattaagcaaattataaataatatgtaaaatccagtcagaaatataattaaaaaataaaaagagtaattaattaaaatgtttttcatctccggcagaacgagaggaatcatcttcttcttcttcaaccgcgattgattctcacgcgcgcatgaagacgacgatctctccaagtgttaaccgccgcgcgccgctttttccggagcggagaaggatcgacggaacccaacggtggcggccgtctctttctgccatttccgaagacggatccaccaccgtattcgccggagaaactcatcgctcttttggtaaatttgtagccagagaaacgacgtcgttttcccgcagatatacgacactgaagagcgcctggtataattcatgatttttctattttccaattcattttatttgctgatgttttgtagatgatgatgacattatcataaaatatttgtttgatagtatatatgagaaatatgaattttggttgaatgcgcgcaggagaaacgcaatcacataccatatagcatcgccagggtttgctccttctccgttcatgtattaaaaggtatagtgtgtattcttcttcaccttctgtaacgtcaaaaggtttttacgtagaaccctaatttaaacgaattaatttcttgtaattgtttcgggagccttaattgttatatttaaaaaaaaaactgttttatatttagcggacccatatgtaaatagtgctttttttttgaacaattcatgatttttcatatggttttaagttttaacgttagagaagtttatgtagtgttatgtagaggctatgttgttgaacttttctacagtttcgatcttatctacaaattatattgatccaagttaatcttaccccaaaaagatagttcaaagatgttggtggacatttcatcacgatagatgtcttattttgtgtgtttggattttgggggttgtttcatgtgaaattctcctctctgcatacaaatatcatcacataatggttaggaaagggctcaaaaagccaaagaaataacttgtctgaaaattatcaagcattatctgatttaaaatgcttgaggctctaaatccttcaagtgttgttttgcttgcctgatcctccgtgtcagtttatttttaagttccacatgtttgatactgaagctaataatttatcgctgttagggtaacatgtgtaaatgatacattatcatcatagatattatgattctatatattacaaatgatgattattctgataaatatgtgtattgttagaagtagaatatttcacaaattttgaattgctaaattgattttagatattattatgaattcataacgtttgtgtatttattttgtatttttcatttttgtattgatttatatatataatttttaaaagactacactaataataataactttgttaacaagagtgaaaatttattttggattgattgttttttgtaattttatcttctataactactgtgaaatagatatctataggtatttaaatagattttggtgaaagatattattgttttgttactttaattatatctacttatttctattggacaagtgtgacgatttgattagtattagatccatgtaaacatgtataagaatcttataacttataaattaccccacatgtcataatactgtaaaacaacaattaaaataggtttgtttagataatatttctatttaaacttaaaaaaaaaacctttcacacaagattctcaatttaacaaggaatctgatcgcttcttcttgattaaccctttttctttaacctcttaaaacaagaaaacaagaagacaaaacttgttttataatagagaatggaagaggggaaaggaacggagaagaaaggatgcataattaccgtcatcattgtttgcattgttttgactgtaggcttagatatcgtcgctggtttcgtcggattacaagcccaagccgcccaacaatatgtaaaatatatatatcttaatcaagaaatgtgattatgatgatgatgacgttgatggttgaattgtgtttttggcaggtgaagcacgataagctcgagtgtaaagctccaagcaaaacagctttcgtgttagggataattgcagtgtcatgtttggcaacagctcatgtcagtgccaatgtgatcggatgctctatctccaatctattccaagcactcggcgccttacctaagaataagatcactacatacttcaacatggcatgcctttttctcatttggtaataactttaatcgattctctgtatatatgatctgtatcgtgtttaaatggataaatatcatgatttataaaagtaagtagtaaacttaagtagatttcacaaaaataataatcagtatttaaacattccaccatattgttttaagattaacgttttatcacgtattcaaaccaataacatttgttatttatttattttattttttaagaaaaacatttgttaaaagctcttgattggattatggtttaaagtttgacacgatgatggttaattgataacagggtcgtaggaatctttggagcattgatccttgcgaatgggatatggtcgaacacagagtcaagaataagatgtagattcacaaacaaccatgtgttctctattggaggcaaagtgtgtttccttcatgccattgtttctggcatatattacatatcgtctattgtagcaagggctcggcattttcaccgaaccaaaccaaacaaaactaaaccatctgaactcaaaccgatcccaactgaaccaaacgaagctgaaccaaactctacacccaacccataaacttttctacaacccgaatggttcgggtcggtttggtttaactaatattataactctaaattctaaagtcatgcttaatatcatatttaatatacaattatttagtataagtttactaattcttctaatctcaaaatatttaattcgtttaataattaattctaagcttagatgaaggccactctctgatggcgtggcaatgatttagtcacagtaaaatttcatgtgggaaatattataaactgtgaattttggtgaaatttcttcaacaatgttcatgcaatctgcaagggaaatataacagatggatatagatgaaaatcaaggataaaacgttataacagtgagattcaaaactgttaaattatatttagactcgaaaggttaagaactttctaaccaatcttaatctaaattctctgttatatttttttcttattctaaattataaacttgaaaattcgaaattttcgctgattgatttgattttttcgtcatatttctaacaaagctgtctttaacggtttcgtccaaaaagtttcctactatttaccaatctgccaccccaaaaaccctatcaagcaaacggaatccgatcaatatgcttttattaattcataacacagcatcgatatttaccacgtgtaaaaagtaactcttaattagtataaaagaagcacaagcttgagatctcatatctacaatgcctttctttctttcaaatctatagatctcaaattttacactgttcgtatcttttttttttcttttttttttttgtttttaaattaagtgtaaaaaatgggatcaccattgtgcgagcatttggctaggctttgtcttcaatgtgatttgaagttacactctaagagtagtgtaaacaattacaactattcgcggattccgttgtgtaataattgcgtttcgcagaccgctcttgtagaatcccttgaacaagggttgtgcctatgccaatcatgcttttcaaatcccaatgtaatctcgcgttttcttcttcttcttagaaacgatgctagtgattattcggcatataattttccactggatcttgattcctcttcttcgtcttgttcatcttcttttatcgatcgcaattgggaattttcccttggttccttacctctcaataatgaggactcatcatcatcttttgaaatccttcaaatatttgaagatcatacaaagaattatagtgatcaacaagtgttgacgcttcagcccgattatttggacataattcctaaggtatatacttatttatttttattttgttaaagaggggttttgttcattgttatgagatatatatgtttgcttaactcgttccattgtttcctgtgtgtcacttttacgcaggatagttcatgctcaggcttcaaaagctacgaaactaaagaagatatagagaatgttttgatgaacacttttgatggcgccgaggcagcagtattagacctaaaacaatataaccccgaggaagatttgatcctcacggagctaatcgatgaattagcaagagacaattcagagaccacgccgaccaatgtaaacatcagctttaattctgtcgcatattaattatctttaattatggttgacttatttatatatttttgtttcattgtgtaatagactttaccaacttcagcatctggtatgtcatcggatatacataaagattacaacactgaagctttggctaatgcaagttctcaagattattttataaaccaaatgattggctcaaaagcaaaggaagagaccaatgatcttgcaatactccctaacgctcttgttcaacttgactgtggacaatcgcagttgatacttaccgatgagatgttaccatgggagaatcaaacatttgtacctgttaagggatttagtccgaaagatcgagaagaggccaagaaaagatatttcgaaaagaagaagaaacgcaagtaggtattacacctcattatacttataggtagataactccatgcaagtgtatacgtacttacaagttcaaatttataacaatgcaggtttgggaaacaaattagatatgaatctcgaaaatctacagcagatacgaagaaaagaatgaaaggaagatttacaaaagctggtgctgattatgactatgacccacgagctaatgatattaacaaagggaaaatacaaacatgagctaatgataaccaagctcaattgtgatatccaaataaggaaaataaaaagatggttgcaataatatatatgatgatcatcatcattatggttccatgattttttggactttgttttgccaagggtgttttgtagttcagtggttttgtctgattggtcgagatatcgatatccactggatgcacacgcttaaaggactgcaaaggttcacagagaggtcaaaacgatctctagttctctactatagtgttttgattccactctatagatttttttccaaaattatttttttcttttattatttacatttatttatttcttaaaggagctttattgcagttactgtcaaattattttaccaaaaacaataactaaatttttcggtaagactctaaccgaaagttaattcggttcgtttgatttggtttttgttcggttaaatttggtttggtttggtttttgtttgatcgattaagttttgaatgaatttctgtgggagttgcttctcaaagacttaaacctgcaacttggcaagttttttttcttcttctcaaaccattgtcttcatcatatagctcttttaaaaataaatgtgacaataatcgattggtggacatacagtagaatgctaagaaaaaaatagccgattggagaagaagcaagaatatataaaccacctcttttgcaaattaaagatacgtgtttgtcatggccttttaatttttcctaataacaagttctttaatcatttctcacgaaacaaaactcaactgtcttagaaatatattaatattccctgcggctcggatcttgtgacactgcacatgttgaggacagctaaatttacgttactaaacgttgcttgtttcgtctcgtctcaatattttagtgtgtaataagtaataactatatatggaatataatatatgagcatttaaaaaaccatcgaacaataataaataaaaaccaagccttaattggacaagtccgatttaaaatcttacaattgaccaaaataaagttaggaacgagatctagccatcatttactaaacattaaattaatgatttacttttgtcatttattatataataattatatcatcataaatctagcagatggagtatttgatactcgttatacaaaacataacatgtatcttgcattcttgctaattaatgaccaaaagtagaaaagaattctatattgttatggcaaaattaaaatttaaaaaacgatctctattgtttctttttgttaagtaaaaatgtctctattgttaataaaaaaaaactcgctttttcgtttaagaattttttttattgttgtatggaactaagtgaattgagaataatttgacatgtgtcgagtaatagattcctttaccaaatatataagcatctccaattaattaagatgtacattactttaatttgaaaaaatacaaagtacaagaaacgtattactagtataatttattagactccttctttatttacgccttagcttccgtgcctaatcacaatactagttatttacatatagtttagtcagcattaattccttacactaaaaccatttttaacatgactccattgctctccctctgatcaaccctcctcctccgccgctgctacaaacactttaatatatattgccaccgtcctaccatatatatatagtccacttaagatctttccactcatttataacccaaatttgttctgtttcataaatatgtgtcttccatttcgacccgtctcgaaaacatattattcgtcttcttcttcgactatcgtgacgcgtatggtaaactgcatactactttttgtattcattttgttggtctacctcctcatctcggcctcaagacttcaatctaaaaactctattcatgcatacttctcatcttctgatcaagatcaatctcagagcccgacaaaaatcgagcacatcgtctttgggataggctcaagcgcgatctcgtggcgtgcacgtagagaatacgttaagctttggtgggatgctcagaaaatgagaggctgcgtctttgttgagcgtcccttgccgtcttctcaaaaccacacagattcatatctccttcctccggtttgtgtttcccaagatacttcccggttcaggtaatttagttcaatttgtttattgttttttagtcagaaaaaagtttcaacttctgtttcatcataaattaaaaataagtatagtttgcgatttattagtttaacgtctattaaagatttaaagtataggatatataaatttaaaatattgaattgtgacatttttttgtaattttatatatgaaaacaatttaaagacagaaattaattagttgatattcctactttattccttaatcaatttaacttgcaaattagggtacagttaaatcgaatcggcctaatgagacaagcgtctacaggtacacttggagaggcggtgacagaaacgcgatccgaatcgcgcggtgcgttctagaaactgtcaggctattcaacacctcctcagaagaagtaagatggtacgtatttggagacgacgacacgattttcattcctgaaaacctcgctcgaactctctccaaatacgaccacacatcatggtattacataggatcaacctcggagatttatcaccagaactctatgttcggacacgacatggcgttcgggggtggtgggtacgctttaagcagctcattggctaatgttttagctagaaatttcgattcttgtatcgaacgatatccacatttgtacggaggagactctagggtttatgcttgtgtgcttgagcttggggttggattgtctaaagagcctggcttccatcaggttttaaagtctatatgtacgtaattaatagttattagtaaaaaaaaaaactgattagagatatttgtttttatttttgaagcagtttgatgtgagaggaaatgcattgggaatattgacatcacattcaacgagaccgttggtgtcactacaccacatggctcacattgacccaatctttccaaactcaaccactttctccgcggtccgccaccttttctccgccgtacaactcgaccctctccgtatttttcaactatccgtttgctacgaccgttggtactcttggaccatctccgtctcttggggatatactgttcaggttaatacttttttacccttttttgttcaggactccaataacgtaatgttattaattcaaaatttaaatgtttgtttcaattgttagattgatggcaggcatttgtttctacgggatgttttgcgggcacaagagacgttccgaccatggcaaaaatcaggcggattagcaagtgtttacacattcaacacaagagagattcatcgtgatccttgccaacgacctgtcactttctacatgcaacatgtttcttctagtagccatgatggaaccattaaaagtgtttataagcaagcttacgagaattgcacctacgatcctgttacatcgcctcgcaaaattcatgagattagagtgttttcaagaagactcgatcccaatatcagacaagtacttcattctatcttttctatttttttatttttttttaaataacaaaatataggatagattagtagaattttttggccatagtgaaaatcttttttttttttttgacagcaaagtccattagagaaaatcattttctagattagtatatatttgttaaaatatcaattactatggtttctttacgtatagatacttcctttcgattttcgtatagaccaacaaaattaggaatattggggttagtagtggtcaaagttgctatattgagtgaactttttaaagtagcaccctaaaaatatagtatttcgtaagaaaatttgcttcttacttattagatttaagtttgttttatcataacaaaataaatgttttgaatgcggtagttgaaggctcccagaaggcagtgttgtgatatattaccaacttcttcaactggtggcaacataatggaaattggactgcgagagtgcaaagaggatgagctcatctatattcatccctaatttcaccgtaactaattatattatacctttacaatattgccatccattaattttgaacctaaaaatagtttttttttctttcctttttgtaaatttaacattaagttgttaattggctggttgcctttcaacatttggagcatttgagattactttgtgacaaaaaactgaacatgacatgaatataatctagggtggaccttcactgaaattgatgaaaatgacattatacttaaaattaggctacctaccaaattcaccctagatttaatatatttctattggttacatctttactttaagatataaaaactaagaatgataatttacttctattacaagctaagaatcctagatatctcagtcgctcacttttgcagttgattccctttacgattagcgtgctacaatcgtatcaagtcacattcacacactcttgtttattttgttcaaaaaatgaagaagaacaaaatagtaaaccgaaaataatgctatttgaaatataaatgcgaccgtattgatgcgggccaaatacaaatccggttaaaccagttaaagcgaaattggaaagtaataggaagtgattaaggtaaattaattaagtagtattaattagcgtaacattagctgggggattagacgactttgccaccgttgttaataccttccttgccttctttctttcgttaccatttgcgtgatccctatcttctttatcttcgccctccggattcttcaatattactaaatctgccatcatctcctcgatttcgatgacgatagagccgacgcaatcgccgtcttcggagccggaggttcactctggagaggacttcgttcacatcgatgaccctaggcctaccggcgatatctctttaagcgacagcatagttaatgtggagaaggatgaactgctcgacgaagcggcggaggaagaatttagaggctccgattctgtgtttagcggcggcgatggcggtggagcggatgatgatggcggcgagtgttcatcggaggctactaaagtggagctaccggaggaattggcgaaaagtgttgtgattctgacgtgcgagtcaacagcggatggtggatcttgcgatgtgtacttggttggtactgctcatgtatcaaaggtaatcctcgttcttcgatttcatttggttctaagtttgcaaaggagctgtcttggaattgaactaatattttggtaactagtgaacggttcagagagtctcgttcttggaatctttggagaaagctgaaaattgcatgtggaattcaagaaatttatcaaacctttttggggaaataacgtgtttttggctgtgtcagaacagttgccagaaatggagttagggtttttgatttagtaataatctttattttctggaaacaaaattgctaaattcagcaagattgggttttgtttgattgtataggctagaaaaagaaatgcttagctctttgttttagattagcattcagtctttcatagtggaataatcctgtatatccttgcttgcagcaatcctgtcttgaagttgaagcaataatcagcatcttgaaaccagaggttcttctctttagatgtgttcattgaggactgaggtttgatatctttatcttgtctatgttcaggtctaagcaagttgttgatatcacaggttgtcttcgttgaattgtgttcgagccgattgtctgttctcaaacctcaaacattgaaggtttgcctttcacaattgtgattctgcttcttctttccaatttggttttcttctttgtatattgtgaagatctatcattgtgagtgattttggaaaaaatgcatatcattgtgtgatgattagttttgttagtgtctctttctatctttagaatgattagtgttgccaaaatttcttcactaaatcacaaagcagaggctgcctatatcttagaggaaatttctatgatgcttgtacatcacttgctctatatgctatggctttggtgatgagatttcacagatctaagtacttatacacggttctagcccttttgcttattctgaaatggtaatatatttgcttttctagattccaaccatgtcggacatgatagaaagttggaagcagaaacagaacacattcggaatactttatggatggtttcttgcaaaggcaggttttccttaatcaagaaactttttgatggaagctttaagtctctgaaccaaaaatttacatcctttccttctgttagatcgccagtcatcttgaggtttttcctggtgctgagtttcgtgtggcgtatgaagaggcgattaaatatggcggcaaggtgatacttggtgatcgtcctgtacaggtgataatgatatgtttgtccgtagtttcaaaacagtcttttaataatgttatgcatttcatgagcgtatattctttcaaaagcgttcctcaatcctcagtatactcattaattttgtatttctcgaagcagattacgttaaagagaacatgggccaagatgcctctatggcacaaggttaagtttttatactccatactgtttcaagctgtcttcttgccgggcgctgaggaactcgagaaaatggtaagtcttactgtattattttttttccttttccgcacatctaataattaagtgtgatttgtcctaacaaatatacattgattctaactatcgatcaatggtaaattggactggttcagctgaaagatatggacaatgtggatatggtgactttggtgattcaagaaatgagcaaggaatttccaactctcatggatacaattgtgcatgagcgagaccagttagtattctctattccctctatgtagtttatcagattcgtaaactaaaaatagaaatgctggtagtagcaaatatagagaagaattaacaaattatcatcgacttcacatcctgataaatgaaatgcgcaggtacatggcatcctctttgctgagagttgcaagtgaccatagttcggttgtagcagttatcggaaaaggacatattaatggaatcaagaagaattggaagcaacctattacggtttgttgtcgtttcaatatctgaatgaaggagcttatttttgtttcggattgtgatttatgttcgttttcacggaaattgcagatgaatgatctaatggagataccaagcgacaagtcagtgtttacgttaaagagaataatatcatcagtggcagttgcagttgcagggacagctatagtttcgggtatacttctttcaagaagaaagtgaaaaaggattgtaattggggcagagtttttctcttctttctcctgagccatacgaaggaatgatacaaactcaaataacttttacactcgtttactctttcttttttttcttttttttcacttctgtacgtttattgatgaaaataataaagctttttttttggtctttcggtattttctttagatagttggaagtaatccgagtttgagctaggggtaggtgaaaatactcgtttcaaaactgccactaaaagcaattaaacaatctggatcctctatccagattgcatataactctatctacaaaatgacagtgttactactcaaaccaactaaaatgtcatgattcatacacgacaagccaaatatgttaaaaaaaaagcagtaaaatctttttatttctttattgacgaagtctgtaacaaaatccatacacacaaatcccaaaaggccacatcataaattcacaatcatccttattaattattatcacaactacccccacaagctcccaaatcttttacatttccaccccttaactatttgcaacggaacattgcctcctaaccactccagctgaaccagtcttgacattgatccgacccattttctccattgacttggcaaactcagagaagaaactccccaccgaacccgtcaagatccggtttatgtttgaaagtgttgtggggttagtggtgagagcagagtctgattgaaacagacctctacgcttgagtacgagctggtaataacttagatcaaatgttttgcggctccctggatccatctctacgatggtcttgttatcgttgaggctaggacattttctagacttgagattggctgcgtactcgctgtccaaagccggatcttggcctccacgacccgtaaaattgtagagacggtttgtgaaagacgagcagtgagatacaccaatagtgtgagcccctgtttataacacatatatttcttgtaaatatatcttgaaactctaggttgaaatgttctctatatcataaaaacagtactttctaattttctttattgaaatcataataagtattacttttcggttattgtgaaaccatcataatagtcgttttttgtgtgtatgattaacacatgttttataaatcttaaacgcaaatattttcttctaaaacactcaataattttttattcttagagtgtggaatgagtttaggctttaccggatagtaaaacgaggtccttaagatcaagtccttggtttgcaaagagtgtctgaagattggtgatattactggttggaggaggaatgttggctaatgcctccgctgcgtttgatatcctcccgtctcttcttccggtcggtacactccaattcggtcctccctacaacataccaaaggtcagaatttatgatgagaaatactaattaagattttttaatttagagtaatgttatgtgatgaatatgatgcttacggtgaaaacgacagcgtcgcgagaagctagagcgataatatcagcgcaagagacaattccagggcattgagcttcaagcacagatttaattgcgtcgatgaagccaaaccctcgaaccgttaggttaggagtcgcgtctctctctgcgtttcctgacgttgagtttataagcactgatccatcacaaccctacatgtacatgtatatatatccgtcattaattagtttcgtagttattcagaatgttccactatataaagaaaaaaagaaaaaaaaagagggaaaagaagagtttactcggacaaaacagtcatggaaatgcattctaatgagagcagcagcaagagaaggagcattagaaacgtggtttgaaacaaaatcttgaacaatcttttcagcattaggacaagaattggcatagaaattcatctgcaattgagcttggatcggtccaacaattcccacaagaaagaaagagactgaaagagctatagctatcaagcaattcatctttaaatttgttggtttaatttttgagactctctctgtttgggaggattatgttgtgtgatgtattgagacgttaacataggtttatatagaagagtttgcatgtttggtagtagaagtgggtccatctaagctaactaacatgtgctctttttctactttatttttctggctcataatcagcgccacaataaaaatttgagaaatttttattcataattacaaaatggttttttaatactcttactaatgaagagataatgttacacttcaatgaggcaatttggaagagtttttttataaaaaaaagttaattaaagtttacgtctttccacttatatttattttcctgtaatttgtaaaactaatttgtaatttgtatgttctaaaacacgtagcgaatttgttttctaatatatattaaccaaaatatcaaaaatatactctgatactaaaaatatcaaaagtattagatatggtaaaagatggtgaatgtttggtccataaatcaagctatagtaagttagtaacatagaaagtcttgattttaatgaccgttatgatgtcataatcaacgatttttgtttttttatataccaaaacgcaatagattgtgttgagcgttatgatgtcataatcatcgatacaaaaagtcaagccaacagtagattttagtgagttagtaacatagaaagattagctgaatgtaattaaaagtatcgagtgttctgatgtcataatcaacaactgtaattttttttataacataattgagattatatggaatcttattttggattcatttattttagtcgcgatcgagtactagaatattggtaatcttgaatactctaaatttttggatgatcaatcacctcaagacataacgtactttgatttttcactgaagaacaactcgtttttgccgacatcttcccatccaaaaaaaaaaaaaaaactcgtttcgagagtgatattttttttaattccaaaactacaatacgtactcgacctaatccgcagtagtacaactaaaagaaccgcaaaagaacaactgctaatgagcaagagagtattccaagattattaaccttgttttatattcttaagatcttcttttttttttaagttctttaatgtataatagaagtatataggattaactgcgacttggtagatagactaatttcagatgctaagatataccatatggtaatgatcctagtaaaattacttttgttaaacatatatgtacgaacagtaggacacgtatagtcatgttttctgatagacgattagtgttgccgttatatcattatccgaattaatcttgtaatgcatgtttttaagtgaaataaaatttcaaattacaacgtagtttaataatataagtcataaccgatacaatagtcactagaacataaaactaatatatatgtccaactttacaacgtatactctttttttggaatttttgttttgtcctaaattggtgtttcttatatcttgatgcctaatctttgttttgtaacatgcgcaatgatattaaaacattatattatactaggggaggagaacaaattaaaatttcacacaactactctatagaactgaattattcataaacggacgagagcatttcaactgctcgaaatattttcctatcatcaggagtggcgtttcgtcagattaccacgccaatttatttctttaagtctgtcaaacgttggcatcttctaataaactgatatatatatatgtggattctaaacaaacaaaaaaaaaacttgagaggatatttttagattttcatcctggaaaaataagtgaggctagagaagattttgatgaaagaaatctttaaattttaaactcttttggaaatatcttgaaaaaggattttccctgtaatttataagcggaaacaattcggaccggggccaaaacatgttagaaatatgtggatttgcagatttctgttcgggtcggccggttctgcctagttgtctagttgactaaggttttgtggacgggttcgttatttttctagcgactaagtaaacatgccctcttccatgacctggcgtctagaagaatagtcacggaacgtgtgttccacactcgttatagaccgtattcaactattcaatttttcccaaagaaattacttaagaatttaattagcaagttgggtcttagtaactgaaaacagatacatatttctaatgttattttatgagttgtcgtttgaacaatgtccactaaatgataacgtgcaagacattcgtgaatgtctaatgtgaaaaattccgttttataaggcgaaatgaccattattttatcttataaacaatagtcaattgtgtttcataggaaatttaatatattcaattgaaacaccagcagagatcaagaagatagtggaaggccatgcaatgtcctcctcgagctcctcttgtatttcaaccctcattaagaaacagaggaaaaatgcaaatgggattatctaaatcttgtttggcatttctccatggactatttcaaagccgctgggtgatctataaaaggcctgagaatgtctccttcatcttcatctccaaagctcgttctcaccttacttggcaaacactcaacgaagaaaggagagagagacggtaatggcgatcaagaacattctcgcccttgtggttcttcttagcgtggttggagtttctgtcgccattccacagttgcttgacctcgactactaccggtctaagtgtcccaaggcagaggaaattgttcgtggtgtcacagtacaatatgtttctcgccagaaaacccttgccgctaaacttctaaggatgcatttccatgattgtttcgtcagagtaagcttggttcacttgttcgagactgttaaccaagggatatgaaaaaactagctagtcctaacactcttttgtaatgattcatgtagggatgtgatggttccgttcttctgaaatctgcaaagaatgatgcggaaagagacgctgtccccaacctgaccctgaaaggttatgaagtggtggatgcggccaagacagcgctggagaggaagtgtcctaatctcatttcttgcgctgatgttcttgccttggtcgccagagatgccgtggcagtggtaacattccattttcgcaatggactagtgattttgtcattccaaaactgaagactatagtatgtatataacttattaattgtctttgaacagatcgggggaccatggtggccggttccattgggccgcagggatggacgcatctcgaaattgaacgatgcattgctaaatttaccatctcctttcgccgacataaagacgctgaagaagaactttgccaacaagggtcttaacgctaaagaccttgtggttctctcaggtatgtctgcagctggcaccttatgatgtgcaattctcaaaagagttatcaatttgaaagctgaacaaaaatggtttcttgagtagggggtcacaccattggaatctctagttgcgctctcgtcaacagtcgtctctacaacttcacaggaaagggcgattctgacccatccatgaaccctagctacgtgagggaattgaagagaaagtgcccgcctacagatttcagaacctcactgaacatggacccaggcagtgcgttgacattcgacactcactacttcaaggtcgtggctcagaagaaagggctcttcacatctgactctacgcttctcgatgacattgagaccaaaaactacgttcagactcaggccattctccctcctgtgttttcttctttcaataaagatttctccgattccatggtcaaacttggtttcgtccaaattcttaccggcaaaaatggtgagatcaggaagagatgcgccttccctaactaatttggatcgatcagaccgggtttcggatgattttgagtctacacgtttttctctgcttattttctttctttttcttttttctttcacggaagtttgagctttggtgttgtcttcttctgtttcttccatgaataattgttttttgttgagtaactttacatttgtattctttacggtgactgtgttttgtaatggaaaaagtttgtttcgaattcatccgttaaacgtaaacctaaattaaacaaaaattataattggaaagcaaaacattttgtaagcttcgtggtgtttttactatgaattaatatttatgtttgtttttcacggttaaaaaatttatttatgtttttatgtcaaggagttttcatttttattgataattttaggatcataggtgggaaacaaacacattggactttggccttacatatgataacattggactttggccttacatattaaatttcgtatgttttactttggccttaacattggccttatcataggtgtgttttatttttgttattgatgaatgttaaggccgaagtaaaacatactaaagttaaggccatcaataacaaaaatattaattcatagttaaaacggttaaagaagagaaaatcacagtcgaatcggattcggatcttctctggactatatccatcaagaaaacagaactttcatacaagaccttacaccttaggcccggtaacaaaacacacttattatacgctactatgatgttcctgatgcaacgaactagttcaacattattgtgttgatttgttgttcactgtactagctaataatacgtgtaccattactgtcgtttacctttattatgagattaaaatttctttgattgtttgtttatgtggggcttcgttgatttgtcgtattcaaaattgtgactggatgttggttagatattggaatctacttgtgcggtatatgagaaaagacaaaattcaaaaggtgaatgactacgattgagcatatgtcatcaaacatagttcagacattaggcaccatgcttgacacggttgttgtttagggatggagctcttctcattgtctctgcttcaaatgatacttgcaatttgttcttttaaatctctcttctttatgttggatgagctctttagatctaaattcgccttccatattataacaatacccatggctttactaatggtcaacgaccactggcactaaagagtgtatacattactaacatcaaagaagacaatgtggtttcctctgagggaactgaacatagccatggagttgtagaatgtaggggtaagaatcaagattgaggatatggtagcgttcctcgctggttcaaaaccaaagcaatcaatcattcatggctcctgacacatagactagcattggtagcctgatgtcaatcaagtcctcagaatctagcttctgctccaaaaacaaacattgcctgtaccagcacaacatgttaggaacggaaattgtttttctgtatacaacaaataaacctgatcctaaaagaaagcataaaaccatttagaatgaaattagtaagcaaataatattgacaaaaggaagttacatacttataaaaccatctattcttgatcaaaaagatgattcttctaaccgttatatcacaagaaggaaataaccaaaggcatcgaaaaaaggaaacaactaaaacgaaatttcctcttgtttaaattgatattagtaaaatggaaatcggatctaagtttagatttcctctataatcccaacggttagattaataaatataatcccaacggttagaaccaagaaccttgtttgcttattataaatacactctcacgcattctcttcttcctcttcttcttcatacttgagaaatcaaaattctctattcacctctacttctttcttattttttcttcttcgagaaacgaaaaccaaaatctatcatcattctcatttttttctcttcgccgatcgacattgaagtaagccgtgagttcgagttcatcatcattgattgaataaccctctccaatcgagatcgatttcagttgaactggatttgattttagaatctgaagatgaaaatcaaactatcaatcgccaagctaatgtcgacgccaacactccgatgaacgtacgtttgcttcttcgccttcgccgtcagatctgatcgtgtgagaggatgaacaagaggaagatcggaaaaaattctcagagtttcgtctaagggtttcgaatggacttttcgagcggaagatcagaaaaaattctcacgagagaagacaaccacaagagaacggtggacccacattacgctttcgaatggactttgctgtttgggccctttttgcttcccaagcccaacaaggtattttactttcctccttccttatttttgtttttcttcctttttttattttcttactaaaactataaggttttttcttataagtgttaaatatttaaattttgtgttaactaattggacacaacgtccaaacccctaagaggcgtcatcggttcaatatggtttatacctaatttaactttttaacacttatttttattttatttaaaaatgtttttaaaactatattttgtattaatactattaaaactataaggtttttaaactttaaagttttttcttatatgtgttaaatttttaaattttgtgtaaactaattggacacaacgtccaaacccctaagaggcgtcatcggttcaatatagtttacacctaatttaactttttaacacttatttttattttatttaaaaatgtttttaaaacaatatttttattttatttaaaaatgttttttaaacaatatttttatattactactattaaaactaaaaggttttttcttataagtgttaaattttcaattttttgtaaactaattggacacaacatccaaacccctaaaaggtgtcatcaaagtatgaccaaattctaaccgtaaccgtattttggatcgtaaccagaccgtttattaaccataccccgaccgtaatcataaccgtataaaacggttaataaccgtaaccattaaccgtgaaaatagatcatttattattgtaaccattaaccgtgaaaataaattattaaaacggttaataaccataaccattaaccgtgaaaaacaaacataaatattaattcatagtaaaaacaccacgaagcttacaaaatgttttgctttccaattataatttttgtttaatttaggtttacgtttaacggatgaattcgaaacaaactttttccattacaaaacacagtcaccgtaaagaatacaaatgtaaagttactcaacaaaaaacaattattcatggaagaaacagaagaagacaacaccaaagctcaaacttccgtgaaagaaaaaagaaaaagaaagaaaataagcagagaaaaacgtgtagactcaaaatcatccgaaacccggtctgatcgatccaaattagttagggaaggcgcatctcttcctgatctcaccatttttgccggtaagaatttggacgaaaccaagtttgaccatggaatcggagaaatctttattgaaagaagaaaacacaggagggagaatggcctgagtctgaacgtagtttttggtctcaatgtcatcgagaagcgtagagtcagatgtgaagagccctttcttctgagccacgaccttgaagtagtgagtgtcgaatgtcaacgcactgcctgggtccatgttcagtgaggttctgaaatctgtaggcgggcactttctcttcaattccctcacgtagctagggttcatggatgggtcagaatcgccctttcctgtgaagttgtagagacgactgttgacgagagcgcaactagagattccaatggtgtgaccccctactcaagaaaccatttttgttcagctttcaaattgataactcttttgagaattgcacatcataaggtgccagctgcagacatacctgagagaaccacaaggtctttagcgttaagacccttgttggcaaagttcttcttcagcgtctttatgtcggcgaaaggagatggtaaatttagcaatgcatcgttcaatttcgagatgcgtccatccctgcggcccaatggaaccggccaccatggtcccccgatctgttcaaagacaattaataagttatatacatactatagtcttcagttttggaatgacaaaatcactagtccattgcgaaaatggaatgttaccactgccacggcatctctggcgaccaaggcaagaacatcagcgcaagaaatgagattaggacacttcctctccagcgctgtcttggccgcatccaccacttcataacctttcagggtcaggttggggacagcgtctctttccgcatcattctttgcagatttcagaagaacggaaccatcacatccctacatgaatcattacaaaagagtgttaggactagctagttttttcatatcccttggttaacagtctcgaacaagtgaaccaagcttactctgacgaaacaatcatggaaatgcatccttagaagtttagcggcaagggttttctggcgagaaacatattgtactgtgacaccacgaacaatttcctctgccttgggacacttagaccggtagtagtcgaggtcaagcaactgtggaatggcgacagaaactccaaccacgctaagaagaaccacaagggcgagaatgttcttgatcgccattaccgtctctctctcctttcttcgttgagtgtttgccaagtaaggtgagaacgagctttggagatgaagatgaaggagacattctcaggccttttatagatcacccagcggctttgaaatagtccatggagaaatgccaaacaagatttagataatcccatttgcatttttcctctgtttcttaatgagggttgaaatacaagaggagctcgaggaggacattgcatggcctccactatcttcttgatctctgctggtgctgcaattaaatatattaaatttccacaattagaagaaatcgaaatcatgcaacgattaagaaagcttcaaatcatcttttgcgctttgaaaagctattgactttggagaagatgtagtttggggaatttttttattagtccttagctctcaaaagttaaaaactataataaactgttatagtttgtggaatccacgttcctgcattctcaatgtaaactatccaagttgctcaattcagtgattggatattacaatatacggctagtttcttgtgaaacaagtcgtcctatagactaatgcaaaacaaaacaaaaaaatcaatcattttccttaactaactttccactctcggagaatgagactttcggccttgccattctcgttggggataaaatatataatgggccaaaagtttacttccgtcttatggcccatatacgaagcccagaaacaaaaaaaaactacgatcttgaatttattacaaaagcatccattttttcaacagaagaattccattttgaatctcagatttgatcatattggcagaaaaaacactaattgaaataaactaaaagtttgacaaaaaaaagaaataaactaaaaataaatatttgagacttacgaggatgaaacaaacttaaaatgtgaatagtattgtagcaattcttttttgaaataattaacttttagtgatgtagcaggaaaaaagaaaaaactaaaaaaaaaaaaaaaaaaaaaagaaaaaactaaaatgttaggcgttgaattactagttttttttagtaggagagtacgaagaaggaagaggaggttaaagtgcaagagaggcatgagagcagtaaatggcctaaagcccatgcagcctctgtgtacacatttaatgcgtcgaaactattcgccaccctatcgcatacgtacgtacgtataactccatctatatatctgtacctacatatatacagtaaaaatcagaaataagttgggttattgtttttttatatatagttattttaaagaatctaggtaaagtataaacttactgaaaagaaaaacttgagtgttaaagctatagctataaggactttaaaaaaaaaaacaaagcttaagaactaggtaattaaatacgcagtatatttctctatatattcgcgtgataaattaagatgaatgcatggcttttacaaattatcacctttttaatgggtgatccgtattttaaatagcttaattgcacgttatagttataaatgcttgggccacaaagtaattaatatttctaggcatgtaaaatgaagtcttactgtgaaaaaagtgatatttcattgacttccttaaattgaaaaaacaattgtttcgtaaacaaaactcaaaattaaggtgatgatttttagattttcttcttttaaatgaaataaaataaatacatcactcaatcaacttctgtctgactaacaataatacaacctaaacttctataatatttaagaaaatgccatgtggaagaagaatcatgaaattttccttctttacaattaaatttataacaaagatatgaaataataataaaataaaatagttaaaaatataatagtcatattttttgaaagtaaaaattaaatttatatctcataaagataaatattaactataacaagtcattgaattttagttaaaaaactatataatttttttccatattataaataatctaagagtattaaaatttcagaaaattacttttaaaattgtatccttgacaaatggggactattgtctaactttttctgtaaatggagaactgtattaaagcaaatttcaatatagttaaatctttttttaatatagttaattttgttaagtggtgatttattgcatatgcataagttatgaataatgctaatgattttttaaaaataactacatatctaatagataaatgtaagtctcataggctcatagaccgttagccgtcattcctcaccacattataatattttaaataaataaaaaataaaattattttaggttgacattgtatataagatgaaaaacaacacataattttgtaacataaataaaataaattgtaacatatctctctctctctatatatatataagcgtgtaggataattaagtgtccctctcgcaccatttaatttcattgcaccctctcaattctctctgtcattactctctcatctctcttcctccaagatttgcacctacctttcaaaccttttgctcgccaacaaaaccgcgcttcacaaaaccatcagcggttttccgagaaacaaatctcagaccagacaccgctctactcttctctctctctccctctagggtttcgtcgcttcttcctatatcccagtgtatgtctcgaaaacctcatcatttctgctgttttctttattttatccattaattcatgtacacaaatttatttgtttaaagtatcattggatccattacacttcagttttcttagcatctttataaaactctcactttcatgatgttttttttttataatttaatatatcctgtatgttgaattttcagttagtcatctatattttgtcttaaattttgccttctttagcattaattaattgatttcttgcctctaatatctttcattcctctcctaatttgctttctgactttctgatttattgtattcttctttaaataatcttatcaatttctgcatagtcagagatgaaaccttcaagaaaacaataaagaggaaagattaaaggttagtattcccttgcctaccaaaaaaaacagaaaggtttgtattctcttcgtatatccttattttcattatacgtttggttttatatataaacacgtgtatatactttatagtagtagtatacatttacatattaatgtgtgtaataaaaacgtttaaatacgatgatgatgataagaaatagctggaaaaaattaatacatcacccaggccttatgtcacgttggttgtaagttgtataataactatatgttggtccgtcgcacaggtgcacagatataatactatttttttcatttcaatttttttttctttcttaatcgccaaatagtagtttacactttttcctgaagagtttttattttttgaaaatctactaatgattatatttaattaaattttgttttgttctcacgaaaatattgtttttttaataaacaggatagagttgggaatttatttgtacctactttttcccattttatttgctttgaacaaatgagtccaacatttctcttttcgtcttctctttcctatcccatctaaatcaaaactgatcaaaatacctcgaaattttaaattaaatcaccatccatcaaagctattatagtgtagaaattttaaagttttttctttggacaacaattgatttccatctacactacatatgatatgactcttgaatcaatcatagtttttatttcagtctgctgattagtttttttcttttcttttaaaagggtaaaaaatcggtagtttcgaataattttgagtatgtgaaaattcattatttttgggttggttattcaataacaaattaatttgtgattgtgatgtcttttttatgcaaggctcttttttcttgctttcaattagtgggtcctttgtttcctacaatcatctccaattcttctgtttgcttatatcattttgtatgatcttcaagaagaaagataaacgactccgaagaaagatttaagttattgttgttcatacaaaaagaaggttgtaaagttgttgacgtggacaaaagtattgccatatttttccagcctcgaagaaatttcccttcttcttcaaaccctaaattttgacaaaactctctacttttttttgcttctagggtttgctttcagtttccggagtataagaaaagatgttcgagccaaatatgctgcttgcggctatgaacaacgcagacagcaataaccacaactacaaccatgaagacaacaataatgaaggatttcttcgggacgatgaattcgacagtccgaatactaaatcgggaagtgagaatcaagaaggaggatcaggaaacgaccaagatcctcttcatcctaacaagaagaaacgatatcatcgacacacccaacttcagatccaggagatggaagcgtatgtgtttaacttactcacttacttcaattttcttgtgtgttttttgacaattcttttgttttggttgttaaataggttcttcaaagagtgtcctcacccagatgacaagcaaaggaaacagctaagccgtgaattgaatttggaacctcttcaggtcaaattctggttccaaaacaaacgtacccaaatgaaggtatactttttatattatgaacatatatacattagttaatggatctatatatattagagaaaatatatatacttgttaattaaattgttatttcattcatattaagtcttgtatatatacattgaagggcttatctttatacttaagaacattttgggtggctggtgttttctttcagaatgaattcattgacttttggcagattttagatctagttgagacactttgacttaaaatttcttacttattttttttttcaattgaaaagttgttcctttggcagaactatatatttggcggatcaagctatagaaaattgtttggttgtaacaacattgcctatttattatcttagttagagccatatataatctatagattgaaacgttttggacacatatgcttacgttatgcaaatacggtgaaacacataacgtgtacacgagtgttttatttgaaacatacacttttcctctttttaagtaaaatcctttgttccttcgttttacccaaattagaaataaatcacttgtataaaactttagagataaccggaatataagttttatttgcgcagaatcatcacgagcggcatgagaactcacatcttcgggcggagaacgaaaagcttcgaaacgacaacctaagatatcgagaggctcttgcaaatgcttcgtgtcctaattgtggtggtccaacagctatcggagaaatgtcattcgacgaacaccaactccgtctcgaaaatgctcgattaagggaagaggtatgagaatcaactattttaaatgttcaaataatgttaagagttttacacttaaatgttgtcaagaagataaaataaaaaattagaatttgtttttataccactaatgttatatcgctttcacaataatcatttctttcttcataaaataaaaacttttatagatttgtattgaaattagagaatttaaacatttttttttcattgaagaatagaaaaaattatgatattaaattgagatactaaaacgatatttttggaactgtaaggagtagtagtacataataacaacattactcaacgtttcttcttgtgaccaaactttgaaaaccacaaggatcaataatctttcttatttgtctgttttagatcgaccgtatatccgcaatcgcagctaaatacgtaggcaagccagtctcaaactatccacttatgtctcctcctcctcttcctccacgtccactagaactcgccatgggaaatattggaggagaagcttatggaaacaatccaaacgatctccttaagtccatcactgcaccaacagaatctgacaaacctgtcatcatcgacttatccgtggctgcaatggaagagctcatgaggatggttcaagtagacgagcctctgtggaagagtttggttttagacgaagaagaatatgcaaggacctttcctagagggatcggacctagaccggctggatatagatcagaagcttcgcgagaaagcgcggttgtgatcatgaatcatgttaacatcgttgagattctcatggatgtggtaattaacattttcattttacttaaaagcaatcttctctgtttagtttcaacaacattgatatgatgttgcagaatcaatggtcgacgattttcgcggggatggtttctagagcaatgacattagcggttttatcgacaggagttgcaggaaactataatggagctcttcaagtggtaattttttttgcttttattctgtaaaaattaaatttcaaactgaaataaccactctgttttgcttgcagatgagtgcagagtttcaagttccatctccattagtcccaacacgtgaaacctatttcgcacgttactgtaaacaacaaggagatggttcgtgggcggttgtcgatatttcgttggatagtctccaaccaaatcccccggctagatgcaggcggcgagcttcaggatgtttgattcaagaattgccaaatggatattctaaggtaatataataaaaacattaggttatacaaaatgtttacttaagtagagagaattaatgtaacaggtgacttgggtggagcatgtggaagttgatgacagaggagttcataacttatacaaacacatggttagtactggtcatgcctttggtgctaaacgctgggtagccattcttgaccgccaatgcgagcggttagctagtgtcatggctacaaacatttcctctggagaagttggcggtataacctactgtttgtttcataaacagttttcataatcagagtcagagtcagaatcacagttctatattaatgaatatgcagtgataaccaaccaagaagggaggaggagtatgctgaaattggcagagcggatggttataagcttttgtgcaggagtgagtgcttcaaccgctcacacgtggactacattgtccggtacaggagctgaagatgttagagtgatgactaggaagagtgtggatgatccaggaaggcctcctggtattgttcttagtgcagccacttctttttggatccctgttcctccaaagcgagtctttgacttcctcagagacgagaattcaagaaatgaggtaactattttagttactacgctctcttgttctgttttggacagagttttgatgtttttgtgagattttgcagtgggatattctgtctaatggaggagttgtgcaagaaatggcacatattgctaacgggagggataccggaaactgtgtttctcttcttcgggtaaatgtgagttacaccgggttttgaactattgttataatcatctgatcctagctaagagttttcaatctttctttatgtcacagagtgcaaactctagccagagcaatatgctgatcctacaagagagctgcactgatcctacagcttcctttgtgatctatgctccagtcgatattgtagctatgaacatagtgcttaatggaggtgatccagactatgtggctctgcttccatcaggttttgctattcttcctgatggtaatgccaatagtggagcccctggaggagatggagggtcgctcttgactgttgcttttcagattctggttgactcagttcctacggctaagctgtctcttggctctgttgcaactgtcaacaatctaatagcttgcactgttgagagaatcaaagcttcaatgtcttgtgagactgcttgaaaaccatccattaggtactactttcactaaatatattcttctcgcttttacgccattatatgatgtaatcatatttttcttcttctttctgcaggaaataacaaaatggtgatgatggaaaaaagagagagatttcagtttgagaaaagcggaggagtcaagatcgaacctcacaagagaataccattgagtgtttgttagtgttaagttttggtctgcttatttgatgaaactaagcagtgaaaaactttttacttgaaagtgaatatgtagatggttttacgaggttcgggaatttgacttcccctgtcacatactgaattagacaaaaacaaaaactaggttagaaagaatgctttcggatttctttttgtgttacagttactgtttttctttccttcttgtggttagatggaccatcatcaggaatttggagtttgtctttcttttgtataaatatcttatacaagtattttggtacttttgtaagcttatgtgagtttgtctaggggaaagctcacacttttttttaccagacaatgagtgtctctcaaaagggccattgccaagtaaatttaccttttggttctgtttaggttaagttcaaccaaggaattgttgctgagttaatacttgaacaaaatttctagaagggataatgttttcacattgaacattcataccatgtgataaagtaaagttttcaaatgagaaattaccctggtttatcctcaagcaagctttctcctggctaaaacagttgatcttttggtcgaacaagtcaccagaccacgaagcattgccagaattgcaagacccacgaaaggcaaatacgccaatagcaatttgttagtcaccttctctgaacctatcatgtctccaagtatagcagcctagagattcacaaaacacacaaaaacaaaacgtgaaagaaacttacaaacaaagcggtacaatctagccttctcagagaagcagagcaatcacatatactaaaatatagaactccaaaagaattttcgtttccaaatcaagaaagttgtaacatttacagatcaacaacatcaaaaacaaatatacatagactgagccaaatgaaaatgaagagaaagaagaaaatgtaccatggaagtgaggaaagaagctccatacaacaaagaagtggtaccaaaccacgacttgctggtaagaatggcgtagatgttgacaatggagagaggcaataggaatatgatctcatgccagacgagtccaacgaagaaaagaggcttctctatgaagaggtaatcgttgaactcagagctgtaccagtctttcagatcggtgaggagcttcgggtagattccaggaaatagtatttgaccgttgagaagcggtacattgatagccatcagtgcgaagaagaaaaacagagagatgttgatcagcttccccaaagctcccatctttttttgcctctctcccgagtcgttgaccacaaaaatgaaacagaagaagaagaagagacgaattcttgagattcacgcacggtttatttaattgttggttttacttaaccgaaccaacagacccgagctatttctctctttctaatttttataactaattgctggtttaattacaccgaaccaattcaaacaagactcaaagaggaccaagttaagaccctagtccagtggcgcggaactggaagagcacaggcagtagtgtcaagaatgaattttatatcaaccaagtaaacatttcattgttgctgagtcaacaaacaagaattccacataaatcagaaagcaataaagttttcacaaggaaaaataaacacctctttctaggcatatacagaaaaaggatgagtaagtcttccagagagaaaaatcaactgcttttttttttttttgaatctcaggccagctttcttctgggcatgatagtggatctcttgccagaagatccagtgtttttggtggatcgataaactaagccacgaagaacagccagaatcccaaaacccatgaaaggcacatacatcattagcaatcgatcagatgccttccctgaacctatcatatctcctaggattgcagcctaaacatttacaggaagaaaaaggtaagaagatgagaagcaaaaaacaaataggcacatagtcaagcagaatatagccaatgcataaaccataggtccacaagaacgcagaccagcatattgcacttcaaggtttttcattgcagggaaagatatatatttccaccaagaaacactaataatctacaaataacattgagaatatatagaaaagttaagaactttaactaataagtcactgcagataagaaaataacaccattccgccaagaaacagtgacagatatataattcacattgaaaaggagaacgctaagcaaagttgagaactttaacttattttcagcaaaccgttaaccaacattagctctaatgatgcttgcaggacaaagttataaacttgaacataatcagcttgcagataatctcctaagatcaacactaaacaaagtctcccaagttcagaccaataattcagtaaatgtagagacaaaatagaaaccactgtaccatggaagtgacgagggaagctccatacaacaagcaggtggtaccaaaccacgactttccggcaagaatggcgtagacgttagcaatggagagcggccataagaacagaagctcatgccaaacgagtccaactaggaaatgcggcttctccatgagcaagtaatctccaaaatcggcaatgtacttgcttttcagatcggtgagaaacgctggatatattcctgaaggaagtgaggtttgcccgtcgatgagcggcgcaattatcgccattgaaacaaagtatacgaagagagctacgtcgattagcttccctaaagctcccatcttttctttcttccttctccgattgatgttttgcttcaaatctgagttctgagagtcgttgactggaaaaacctagaagaagaagaagatcaaattattggtttattcaaaccgaaataacaaaccggaaagaatacgccggttcaatcaagtggttaagttaaggtgtgatttcaatttttcaactgcgtttgagatttcaccaggagcaagagaaagatgagcgagacgagaccagtgccgaggagagagagtccatggggtttaccggaaggtcaccgtgagcccaaagctcaccgctgcaacgatcgtgttgaagacgttatccaggttctcaccatttccttccttgtttcaatttaaaaagttccattttttttccttctgataaacctttggagagatctctcttagataacagcagagattcagtgaaatcaatttagggtttttcgagggttctgttacttttcataatgtggggaggatgatggttaatggcatttgatcatgaacgattaatacctaaattcattggcttttatgaatctattcttcaattttgtttgttgaagcgtgtatcagcttattgactttgtttcaatggaagaactaaaattgcttggtttgggccatgattgtttgaaaagtatcctcttgatctattcatatcatagtattttagtaactttttcaggcgttattcgagggaaacccattcaagacagttccaggacctttcaaactcttctaccgatgtatgcgctctaagccagggtatgtgcaatttcatactttatcataccatcaagtgttgtttgatactaagctgcagaatctttgctgcttgttccattgccactgaatgaatggttcttaattctttgtccaccagctattgttcccgctaaaccagtttctcgtcttttttatttaacaatagacagacgtttagccttttctgctttcttgttgtttggtttattattcatactagatctggaggctgaaccattcacctttttatttcagagaggagccaacagagccattcaaatacctcgacctggaacctccaaagagagaagttaaacttgaagaagcaaagcttgagtaaagtgatattcactcccttttttattcctgcatactttttagctgagcgtgtaagcgccatcactgtgattttaagtttaccttcaatatgtgtcaacaacatcttattttctcttaataaaattgatactcggagtttcatttcagttttatctattgcttaatctgttcacttgcaagcttctctctgaatgtgaactctgatgaagatgcttttttcattacgactcagaaaaaagatttacaatttagctttgctttgtggttccttgaactttcctattacaaaatcttctgacaagtttatttaccctctaagtatgttaatagtcatttaaactcttatctgattaagtaatttcgccatgttgtgattgtgaagtcccagctgcactttgggtacttttgagtttcttgctactcttctgcttaagtatctccttgatctctgcttccctcttatccacaacttttatcaattccttgaaactcggtgctcgtgaacctctccctgatcgagatggctcagacacttcgcctgccctttcctcgtccgcactttctggtagcaacctctggtattgccagaaaaccctccagaagaagacagtgagtgccatgaagcaagtgatgccacagataaggaagagtccccagaaactctttagtgaaagctgagagtcctcactgtttgagatctgcatcgagcattcatgcttgtagttaagccatttcctatggattttctcgagctcgccttcttcagatagttgcaagatagccgttgacatgtctacagctaaaggggaatctctctggaatgcctgcaacatcggtttcaagattctaagaaaagttgtagagaaggagcaaagataatatatttgaaggtaagtttctcaaaaccgattttacatacgaaaccccagcctgtgcgtgtgaactcttgccctactgtacggaatttgcagttgctatttgtcaaaagaacttcgatgtaaggaagctcatctacaatggctgccacaccgccagcgttgggaccgcgttgcagagcagaaaggtactgttcttcgtctttcagaggaacaatccttgaaggtagtatgttaagctcgttgattagatagttccgagcaaaggtaccgtcttgaactccaattggttcattgctcgttaccaagctatctattccttcaatccgagatgtcagctgtcgaatggttaggatcgaagtgagactggccgtgtagctcgagttgatgatcagaaccacgaataaccaaatgatcagcacaaacctccccagtgaactcaccgtgttctcccctgaaagattcaaaagttataaagtaaaaacactttacttccctccaacattctgtaagccctggtgtgaaaatctaccaggttactcgaattatagcgtacttactatgagagaagaacattgttgagaagctaaacctgtaacagtgaagaggagaaggaaaataaggtttaaaaggtaaactcgggctctagtgttaagaactgggaaactaaccagaagatggtaatgagttgacgcctaggagggccacggaattcttggttgaagcggtgttcgagaatccagaccatggctcccacaaagagaaagaagcctccagtgacagcccacatctctatagtgaatggtttcaggaatgaccaaggactagacttggcctccttaaccggagccaccaccacaagccctgattctataaacggttgtgtgaaatctacatatcttgttctgtttgtgacgattgtgatatctcctacagctacatcaaaattctgaagaggaaacatgagaaaagacaggttagcatcttctgaaagttgtgaacttgattgagtaatgtagctactcacatccgcaacaacttcattgacgaggttatcataagaaggatttctcttcccgtctccatatagtatataagtacgtggaacaggatatggaagcaattcaatagcggcttcaaagacatcaatgcagtagcctctaacgccaggcgggtttttatccttagaaacgtaatctgtatagctcacacggttaggcaccccgattctgagcggttttccattattaggaaacacccaaccacgaggaggcttagttacttctcctggatatatgattcctttaagacgctggtttgctgtagatgtgtttggaggcctagagtacaaggtctctggatggaccacagagagacccgaatgatttgaccagtacccgactgtgcgtggagctgtaccttctaagtttagaacttcataagccggattaacccggtttctatctgaatcaaactggattggacccgtcacaccagtatgattcatcccaagaatgatcttcataaacttctctccttcattgaaaacacttagtgctgatagctgaatagtgctaccatttgttttgtgcagatttggatcgttggagaaagttatgttattgttttctctgaagaaaacatcgagggcacgagcaactaaccaaacagaatcataagcatacatcgcataagagttaaagccatcatttggtctaagattcttccatctcgccataaactgtcttttgacactactctcgattgtgtagtggcgaaaagcaaccactccttgcaagagatccatcgtgtctgaatccacgtgctccatggaatccatagctgtaggaagccagtctgttgcgatccaaacataaccacttgccatcattccaagagatttagccacagaaaaaacgtttaaaccagagtcaggattcacatggacaacaaaaacccgagattccatcagattaacagaaaccaacaagtctctgatggagctagaatctgcaccaggagtaattgcagccttgtaagagatcctcgagcgtttcttggctaatacatcgccaaggacagatatcccgttcctgccacactcatcatcaacgaatatcgcaatgacttgtctccatccggaatatgatagaaaatctgcgatcgcatgcatttggaagtaatcattctgcgtggtgcggaggaaataaggaaattgcagagaggagagagtcggatccgttgctccaaatgacaagagaggtacatgaagctcattagctacataggagatcatgtgagcaatccctgaagattgtggaccaatggctgcaaccactttgttttccatcagctgcaaagctacaccataagatgaaacataatcatcactcattctttgggggcattttcacaaactagttctgagttaaaaagttggccacagtagtaagagagaagaagaaggagaagcagtatatatacctcccatggtgccgataaatccactgcaatttgagtcttgaaagatgatattaagcttgatgcccttaagaacactttggtcagcattaacatcatccatagctgctttaaccgcgggtttagccgctcttccgataaaagaatcataagtaaacagagctccaacattcacagagcttggcctctgtcttaatggccgcaaagaagaagaagaagaagaagacgagtttctagagaaattacttctacaagcacattcctttggaacaacccacaagacagaaacacataacaacacaactctgattgctttcgccatggaaacttctcttatcatcaccaaaaatcccatctttatcacaatttccagcaaaagcactagtttttctttgtcctggtctcatataaccatttgatttatttggagtaacacctgcgaaataaacaatgcccaacctgaatcaaaattgagattataacaaaagacaaaaaagatggtccagaaatctggtgaaagaaggcaaaaccaaccaagaaatcgggagttagattctgtagagagattggtgtatacagatttttgtgtctgtatatttatttatagtgtataaaataatgtatttatatgaggccctttgattctagaaactggtgctttacatgtgcaagtaagaactgaaaataatgaagtgtaagagggccgtcttaaagatggttcgcagagaaagaagcaaaaagtgtaataaataattcaatgaacaaataactaaagattatatatgtaagaacataaagaaaaacaaaaattaaaagatccaattgagaaaaagaagaagcaaccttggaataaatacgagaaacaaactttaatcagagatccataatcttcacaagtaaacgagtgatttagcactaagcataaagaagaaagacagagaaaagaagtcgaagaagcagaagaagaactgtttctgagctcaagcaaagaataattcataatattctctctccttttttttccctattttcttccttatcattacttatttttttggtattttatgaaattttgtaaattttgttttggagtgctatttctggagtggtcagtgaagacgtaggccaaggtgtggggtagtatgatcgatgctttacttgtgtcctcatactattcgataaatcaaatttttacgttggctcttattggtaactatcatttattaaggtagttgatgcatttttctttttggttacaacggatatagttaaatggtaattagggtaactacgtatgacatgaggcaaaataataattgaaaatgtgaatgtgaggagtgacgacctaattgctccaaggccgccttcgtcaaagaataagtctcctcaacggttgtcaaatcaatttcacacaaaaaaaaaagaaaagaaaaagatattttcagacataaatagtaaagtaattgtactattgatttcatatgataaaaggtgcatgaaacacatggtcgactattttttgtctttagagtgttcattaaggaatgttattaaaaaaaacttataagagctgcatttgttattacatagttccttattgaaattttcatttgttaattgttaacacaaaataaaatatgccactgaatccacaaatatcttgtcggtatcgaactttttatttatttagaacaagaatatcttgaccaaatgaaatgtgaaccaggaaaataaatatacagttcatcttttttttctttgaatcttctcaatttgttgtttggatttttctgagggtaagggcccatttcatttttaaatttgtctgttaagagtagtttaaaatccatgcctttaaaagattcgacttgaaaacatacttaatcgggaaagatgcacaattttgatccaaacgcatctactaataatctattgacttcattaatctaatccaaactccacgttcattgggtaaattttgtgaacagttattataataatgggcctagaaacagtgagataataggccatgatcaatatagataaatgggttacacaaataatgaattgtcccacagaaggatggttaaaagtaatgggccgaaaatagtgagctaatgggccgtgaaagtaatgatttgaaagaggggattacagaagctgacgatggataagtcttttctggataaaacgctcttcttcttctcttcatcctccttctggagcagagcttagagctccatcatcaaatcttatcaatggcttcctcactcgtctcatcttttcaacccaggtacttttcatatactacaaaccatagagcttcttcattccgctagggtttcgttttctttacttggcattttctactcaaaaatctctataaactgtgttcatgagcctcccaagtataaggaatctctttgaatgggttatttttatctttttaaatcgatggcaatgttgaattggttatggactcttgaaattgtggatttttattttgggaatttgaatgtgttatgcggaactcactgtgtaaaaagcaggattctagaggggtttttagccatggaaactgaaagttctacaagaatgtttctcttccttaatctaacgttatctttgttccaataacagtttctgtgtattggtttagatatatatctggtagagttttactttcttgacatgttttatctgaagatagatagataacttcccctttgttttaggtcagcatttttgggagatagaaatgtgttcaaggtctcaagcacaccttttgctcaagtgggttactccagtaagaccattgagtgcaaagaatcaaggataggaaagcaaccgatcgctgtaccttccaatgtaaccattgcattggaaggtcaagacttgaaagtgaagggtccattaggagagctggctttaacttacccacgcgaagttgagcttacaaaggaagaatccggtttcttaagggtcaaaaaaaccgtcgaaactagaagagccaaccaaatgcacggccttttcaggttacaaacttctcatcttttcttgtcatccaatgaagtccttaacttttttgaggttaaaagatcgtttgttctctaatctttttttttaacttctgtgtgacttttaggacgcttaccgataacatggttgtgggagtatcaaagggatttgagaaaaagcttatacttgtgggtgttggttatcgtgcaacagtagacggaaaggagctggtgctaaatctcgggttttcacacccggtgaagatgcagataccggatagtctgaaagtgaaagtggaagagaacacaagaatcactgtgagtggatacgacaagagcgaaatcgggcagtttgctgcaacggttaggaagtggaggccaccagagccatacaaggggaaaggagtcaagtattccgatgagatagttcggaggaaggaaggaaaagctggaaagaagaaatgatcttcatttttcattattatctacttacttatctcttcctttcaatgtttatgtgtatttgctcaaatttgtttagaaatgaagatgtttgtgttgggattcttgagtaagtttttaaaggaacccattaattgtttttgatgctctgacaaaaatttctttagtgctttgattgaacaagaacttgggcacaaagtgcctcatcggtgtgattctattgttatgtttccttattgaaccaaaccaatccaaatcggacaaaaatcatggtagataaactttttaaaacaattttttaatctattcttcttttttttaattacaaattttcttattttcttatatctaaaaaatcgtaacagtaagatattaatatctgtattcttaatttggtagataactttttaaaaaacgaaaatttcctataagaataataatagtcggaaataaaacaaaaaacaatatcatggtgattattcttatttgcttatatcttcttctttttcacaatttttttttaaaaaaaatatttacaaaattttcttatttgcttatatatataaaaaatcagtaagatattaatatcgattttttaatttggtagataacttttttcaaacgataaatttcctaaaaacaataaaatattcggaaataaacaaaaaccctgattgaagaaaagtctttttgtttatcagttcaccggaggcaaaaatcgtctctcgcttgagctgcgaagatgcaagcagtaaaaagatccaggagacatgttgaagaagagccaacaatggtagaacctaaaaccaagtacgatcgtcagctcaggtatacatactctttttccttaaactctacttcgaactactcttgtcgggaggaaaattgatgaagtagtaatcgttgggttgactgattaggatttggggggaggtaggtcaagcggccttggaagaagcgagtatctgtttactcaattgtggccctactggttccgaggctttgaagaatctcgtacttggtggtgttggtagcatcaccgttgttgatggatctaaggttcaatttggtgaccttgggaacaatttcatgggtactgactaattttgaaactttttgattgtgtttcttctgggggttttgggggacttgcttgcgttatgatgatttttttttttcatgtgaagtcgatgcgaagagtgttggccaatcaaaagccaaatctgtttgtgcgtttctccaagagcttaatgattctgttaacgccaagtttattgaggagaatccagacacgttgattactactaacccatctttcttctctcagttcactctcgttatagccactcaggtaccattgtttttctatttgtaatcttctctaatgatttgtgtgttacaatttttcaaagttctaatctttgcttacacagtcactcaccatggatcatgataccttctattcaatgttctttagttagtttctcatatgtacttttcctcgtcctcttcacgggatattgctttattaggcttctttttcctgtgttattgttatttaagttcgttatttcatccccttttcgacattgattggttgcagctggtggaagattcaatgttgaaacttgatagaatctgtcgagatgcaaacgttaagttggttttggttcgctcttatggccttgctgggtttgttcgcatctctgtaaaggtaattaataccacctgtctagacccaatttgtgataaagtttagattactttgtggtatgccgtggttaggatattggccaatgagaatatatgctaagctctcttcttttcttttttatcaggagcaccccataattgactcaaaacctgatcattttcttgacgacctccgcctgaataatccatggcctgaactcaagaggtccactgctctcatatcctctcactttatgttgttctggcatcctttaacattatggttgtggatggacgactgagtacttactgatattcttaattatttaatgaacggcagttttgtggagaccattgatctgaatgtatcagagccggccgctgcacataagcacataccttacgtcgtcattcttgtaaagatggctgaggagtgggctcaatcccatagtggtaatcttccctcaaccagggaagagaaaaaagagtttaaggtttagttcttttttgtaacttataaaatttattagcgagcttgctttcttgttttaattatctatatccttgaattcttaggatttggttaagtccaagatggtatctacggatgaagataactacaaagaagccattgaagccgctttcaaagtttttgctcctcgaggaatcagtaagtagatatcttgtttggtctaggtagaaacttgacttagaatgtttactgtttccatggttgagttaataggtgtagcgattgttgatattggagctaaactaacagaaagctctgtcacgggtcaaatcacagtattcttcatgttgaaccaaacctgttttctcttccaggctcagaggttcaaaaattaattaatgatagttgtgctgaagtgaattcaaactcctcagctttttgggtgatggtagcggctctgaaggtttgaaacttgaaacctgctctgccagaactcataattttatgttcatttaggaagtgcaaactgcaactcattttgattgaaatcataatcgtacataaccacctgcaggagtttgttttaaatgaaggtggtggagaggcaccccttgaaggttctataccagatatgacctcttcaacagagttagtgcacttgcctctatggcactgaaattcaccctcagtctatttttcacattggttatgtagctgtatggtttctctttgcagacactatatcaatttgcagaaaatctatttagccaaagccgaggctgattttcttgtcattgaggaacgagttaaaaacattttaaagaaaatcggtcgagatccgagcagcatcccaaaaccaacaatcaagagcttctgcaagaatgcaaggaaacttaaagtgagtatactaaacttcctaacatgtttaatttgttttctaatgtcaacgttttacctattgcttgtttactttttcttcggagcattatcagaaacatatgatttgagtaaagcataaaccataatccgtcctttgtagttgtgcagatatcgtatggtagaggacgagttcagaaatccttctgtaactgaaattcaaaagtatttagcggacgaggattacaggtgcgaattttcccttttcatatgagtacaaaaacatcagatgatttgaaagatgacctttctacaaaatgttcactcttttgtctgtctcatacatgccataagatgttgtgattgaatattgcaggagcattttttcaaaactgcataatttactgtataagctattcatttagttgacctgagctaaccaaactttttagttcatcttaggcttacacagcagaaaaaatagattctggatttagttcaaaatttttctaggcttgcatgtttagctcttatacttaaatattgttactgtcgcagtggtgcaatgggattttatattcttcttagagctgcggacagatttgctgccaactataacaagtttcctgggcagtttgatgggtaagaaattcattatggcactaagcttaatctttatttttgaacaatgggtccttgtttggctattaacatgcaatacattttggtagaggaatggatgaggacatttctcgattaaaaactactgccttgagtcttcttaccgacttgggctgtaacggctcagtactcccagatgaccttatccatgagatgtgtcgctttggtgcctcagagattcatgtggtttctgcctttgttggaggaatcgcatctcaagaagtcatcaaggttcgattcatatttctttctcattgtttcaaattcagttagtcttatggggaagtcgctagcttctggacatgcttaacgaggtaattgaatatgtagttgtctctttctatctttgtttgcagcttgtcacaaagcagtttgttccgatgttggggacttacatcttcaatggcattgatcacaagtctcagttattgaaattgtagaagatctttccttaacacattggcttgaaacagagagaaagagctctatcatatattattcttctgattaaaagataatctttttgctactactgagaaacaaaattttcaatgacagttcagctgagaccatccgactcagaatcttcgaaaatcttgctttgctttgtccttgaggttagaaatatttgaaggttaaatgaagctaatctcataaaatgggccactgtaagcccattctacacgggagtcacataaaatgggccacagttagctcattctccatgagtctcataaaaagggacacagtaagcccattctccacatgattctagtcggcaaaaggtttaatgagatgatttctgcaaatcatacaaacgacaagaatttgcattacgttaacatcaaagctcaaaagttactctcaataaaatggggtccaagaataagatcaatcaaaatataatattaaaattgtctaaaaagttaatgggcatcaaagaattaataacatcaagaaccacaaatccaatttagggatttggggcaataaagacaatttgaattgggtggtgtagggttattatggcaaatgcatgaataatagaggccattgaagctcggtgggtttcacttgttactaccatgacatttcgttttcgatataaaagtatcaattataccctttttcttatgcatttgtttaaatatgtactgtagtatataaatatatataatgtataaacacatgagaggtaatatagtcttgtgaactgctaatgtcgaacgcagccgacatagcgtatgtcgtttccatctacattacgtttgaattttgtgaacagcatttgacaaaagaaaagcactaatgatgcgaaacgaatcttttaatatcatatctaaatcaatcatcacccttaaaacatagtctgagatagaactttggtaacgcattatgctaatgacacacactagcggtatgaacttaatttaaaagttaagatttgctagttttaagttttacttaaatacaacttgaatacgtgacacacacacacaaaaaaaaaaaaaaaactttaagtaagatgaacgtagaagtttccttaatcatgtttcaatcatgagatttgactaaacacttttttcttgggaagattctagttccaatgttaaaattcattcggcatccaattttgataagtttgacccgatttgttacttttgtttttccttctggtatttatctacatagtatgtgtaaatttgataggaaaaagacaattattaaaaaagaaaaggtctgagaaaggagttagcaacaagaaacagatggatggatggaaattgggatgtcagctttaaaggggttttgcttgaagaagagatcgactgaccaaacttagacattgaattaggtaaagtgacagtctcctctttcaagcaaagcacctaacttctaccatcctctcctctctcacactaccaattcattgattctccaatataccaaattaaaccaaacataaccgaccggtcggaagatttgggttagtgattgaactaaaaaggtaaaactcaggtaacacgacccgtacctttcattatgattatatggagagcttcaatgtccatcggttgccaacggtgaatacttaaattaaatgacactctctcatttctctaaattattggtggccatacatctgtgtgtataataatgtacaagtatattaaagcatgtgtctacttcactttgatggttatggaaaatttaagtcttgtggcttcctctttggtacaccaaaaatcattatatcaatcggttggctaacgtaagagacatgaaaattgcatcttcttctttttaaaaaacaaaattgactccattttttttttctttttgcaaaaaaatgaaaactatctttaaaaaaaaattgctaaaattactgccatataatttgttacacattgatctaccacctattaaaaaattatagcttttttaggcattgcttttgagaggaaataatgtgcaagtgcaacatatctataacataaaaatctgaaatatatgtgtgtatatatagacaaacatgtttgaaataaaccatgtggtttgattaacagctaataatgacacaccatacacgttatacttgaccatcacccccattctcaatttataagaccataaaatagttttccgtatgcaatgaataaaaaaaaatcaatgatagatctgaagcttattaacataaaatagaagtggataacattgatccaatcaattcattgcagtctctctgtttgttattcaaaacagcaccgaccttttgattgctcacatgccatgagcacagccatcgatggaatattacgtgaaggaaacaaaaacttgaatatatatttttcctcacgattgagttcagaaacctggttgagaaaaagaattagagtccacctaaacatatacaaaattcagtattatatagtatatttaataaaaatagatatgtgcgtttcagttacaacatatatatgtgttccctaggagtgaaaagatgtcttttgaattgattttcataataattctacgacatagggaattgaaaatttgtagtggcatcaaccgataaactgacttttatataatctaacgtaaattggttaaacacagagagcatctttacactttttttttttttttaaaccaaataaattaacaatgaccagtattgtcggaaaaaataaaactatccattaaaattaagatgcagaaacccccaaaactaaacctagggacagaacatattatatatatgtcaaagggggattattaaaactcaagaacaaatcgatggccaaagtcatgcatgtggcatcattatggacagaagttacacaaaactctcaaacatacatcaatggattgtaaaacgttaatgatgacacgtggaagaagctcgtgaggtgagacccactatagtcattatattttgggatactgattttgcagtgagccttgtgatgcaaaacagaaagcatcacatgatcgttagtatgtacagtcgcagaatgtctaatgaattaaaatgcatttatttattttttaagtgatcatttgaaatttaaacgtgtttgacgtaaaacatcctagttgtgactaaagacaaaaacacaaaacaaaaataaagtgatagttttgcataaataatcgatttcttttgttggaataacacgatagacatacaaaagtggagtcaatgggtcgaaaaatggacgtgaagccataaacgatggccatcaaaacataaaatagttgcgttaaactaaatctaaacgaatgtgatgaagcattattgatgggttacactatacatgaaagatcataaaactaacggtgttggttcgtaaagtgcacgtgaaaatgaatgtatacccttatttatatttcaacgattgaattttcaattactatttaccaaccaatttaactcaccacctattatgaccatgtggcgaggaccagctctataagctaaaagtcagagtcaaccaattaaagtgcctctaatttcaatatctcaaaatccctacgcatagcaatagacataccgtatgtgacatacctattaacgtatatatatatatagctaggctatttacatatcacaagctggaagataaattaatttcatctgatatgttgttttatatcaacaagttttatctaatctattatagagacctagatttttttttttttttaatctattatagagaccaaaaaccgtgatgccatgcttcattttgtttgtaatggtgatatagtaagtaaaaaaaaactccaaatataaagcgaattttgttttgtttttagtgacataatgcgttttgtttttatcatagttatgtttaatttactagcattattaatcggtaacggtcacaaataaagagatggtggtaactaggtaaattatatttggtgaaatactatatgacaaaaaaaaaaggttaatacatagtagtatttgataagagggacattttggtaaatatctcaaaatattggtcagtttattaaataggaactagagagacggttaagaagtcgttctgatttcgtctttcttctctgtaaagtcgtttctctctccaatttttttgttttcctgcgaaaatcaaagagactaacacagagagcttattcaattttctttcgatctgtgaaatctcagattttgatttggaaagttgtggagatttcagctgttcttctttgttgttgggtctatttctgggtttcttcgagctgatttatagagtttggttctccgatgatagagctaatctgcttgagatagctactgtattgagagttcttctgaggatctttatttttctttacatcttgtgaggaaaatgtctgcgaagatcaaaggagagtattcttctagaagcttcgtatcgagaaaatggacgatattactctgcttaggaagcttctgcgtcggaatgttcttcaccaatcggtaaattaccgaaattttttaaaaattgattctttctttctttcgtcttcttctcgttactctgtttcctgagtttctaattgtgtttttttgtgtgtgtgtaatcaacagatttaattactcttttaatagacataattaacaaaacttaaatttgatggctttgcctactaattcactatctttgagatttcaaagacatgattttgttcttgttgttgttgttgcaggatgtggaatattccggaatctaaaggcatgtctcatccatctgtaaccgaagctgagagattgaagctggtctctgaaggctgcaatccaaaagctgtgagtcaacatggattcttcttaactggtttcattatttgatttatgaaacttgtgttttatataatccaatctgattggtttctccattagctttaccagaaagaagtcaaaagagatcctcaggctttgtttggagaagtagccaatacacatattgcattacagtaaagtttcaatcttttgctgtgtcatttcaaatataacatagaagttttgatgtttaataatttgttttgtgttgttacctgcaggacattggataagaccatttcaagcttagagatggagttagctgcagcaaggtcagttcaggaatctttacaaaacggtgctcctttatcagatgatatggggaagaagcaacctcaggaacagagacggtttttgatggtcgttgggattaatacagcttttagtagcagaaagagaagagattctattcgagcaacttggatgcctcaaggtttttattacacttttatctttgatcaactatgttccttgatggttgtatctgattgaaatgttgttgttttcaggtgaaaaaaggaagagactagaagaggagaaggggattatcatccggtttgtcattggtcacaggtgaagttttgttttctttagtttctgatgtgagtttcattttggttctctgtatactgatgatgtgtgtcattgttctatagtgccacgaccgggggaattctagatcgagctatagaagctgaggacaggaagcatggagatttcttgagactggtatagttctgaatatagttcactgtttaacaagtctaaggctagctcttatcttcattctcattactcacttgttttttataggaccatgttgaagggtacctagagttgtcaggcaagacgaaaacttacttttctacagcattttcgatgtgggatgcagatttctatgtcaaagtagatgatgatgttcatgtcaatataggtaagttctaaaatcaacgaattgaattggttttctttatgtcattttgcataccttatactggcaatactaatgggttcaatgtttcactgaaatgtctgcagcaactcttggggaaactcttgttagacaccggaaaaaaccacgggtctatattggttgcatgaaatctggccctgtcctctctcaaaagtaaagcatcttccagtttcctccttcatatcaattttgtattcttgttaagtcatctttgttttatggagcagaggggtgaggtaccatgagccagagtactggaagtttggtgaaaatgggaacaaatacttccgtcatgctactggacagttatacgccatttcaagggacttggcttcttatatatcaatcaatcagtaagatgaagatgagattacattgtatcatagctcatttgttaactcatgtaactcttcgttcttatacatgttaaatgtttcaggcatgttcttcacaagtatgcgaacgaagatgtttcgctaggagcttggtttatcgggattgatgttaaacacattgatgatagaagattatgctgcggaactcctcctggtaagtcttaagctcttttcatctcctgcttgctgtgataccttttaagatgcttcaaaaatcaatgtacatattttgattacttagacagaaaaaacgtcaacatctttggtgttggggacctaactacaataatatctgctttaaagcaaaaggcttaaaaatgaagagaccttaacctatctaaagagatgactcgtccctatcaaaatctctactgatacaaagtcttaccaagaacctaaatgatttaagtttgacaataacatcaaatctttcaacctgaaacatactgaaaatatgttaaaagattcagttttggtatttgcagattgcgaatggaaagcacaagctggaaacatctgtgtagcatcattcgactggagctgcagcggaatctgcagatccgcagatcgcatcaaagaggttcatagacgttgcggtgaaggtgaaaaggctctttggagtgccacgttttgacatataaacagaggaatggtaaaaacataacggttttgctcagcccccaaaaacagctcaaagatcagaggaaggtcgtccagatatacaattccaagagatatccacttttgtattcataggtacatagaatagaagaggcaggaaggattagagataagtgtgaaaacctctggcaagaatcgcaattgcgtattgtgattgtggcgtttccattttggtataaggaaactgaacactacagtgaacacccctgctgctttgttcgttttgggtggcttgaaaatgaagcaacttgtggatttttacatcaaatacaaaacactatgccctgattcttttggatccataaaactattgcatagacagaaatcggatactgtgtaataacctctctggaaatcattaggcgcagtaaactgtaaaacttaacaatgtctctaaaattactttgaaaagtataaaacttgggaaagtaggataaagttagagacttttatttgttggtcttggtcacatgtcaaaacagacactttggttctattggtttgggtttcggtcgtctgaggcccgaaagctgcttcttactcgaaagtcgaaacccttgtgagagaacttggtgatgccgaagatggtaactccgacgagtactggaaccagtttattgagccattcgcagaatctgagggtcaagtggtctcttctctctcattgctttatcttaattaaggtctggttctcttttactttatcgattcctctccatgtgtgtctaccaaagttttgattttttgttgttgttggtgtctgaatccgagtgtgaagtagtcgtacaccctaatcgaaatttccaggatcaaacttagtgaaattcacttgttgatctacgtattgaaaattacgttcagagaggtcgaatcaacggattttttagttgtaattaagctttaactgatcaaaattaaacaacttgaagaagaatgtggacaaaaaaaaagaagagaaattgataagaaaaagtttagtattaattttagactaattaatcttcttggagtgttttgtttctctgttgtttaacgaatgtgttcactgttttgcatttggatctacatttgctacttagttttagtatcaacgggatcttatcgatgaattagtatactcatgctcgacacatgtagagatgatagtactggttttggtgaattaacttattttcttgaagaagaatatacagagaggcatttgccatatagagaacccaaaatggaagtaatttcggttaatccttaggagctagccgtgtgtccctttgtatcttcccaccacaaattagataggaacactcgttttggttagaaatctctttcataaataaattctatcccgctaagattctctcttgttctttagaaacaaaaataagatataatattactaccaggaattgcatggacaagattttttccagattaaaagatattttaccagttttacttgtagactttccaggtattgagtaatgtaatacacgtatctacatgaagatgaggatataaatatccatttatgagaaaagaaaaaaagggacaaacaaaagttggcaagtttaactaagtgaaaagtctatggcggagacaacgagttggatcccagtatggtttcctctgatggtgttgggatgttttggtctgaattggttggtcaggaaggtgaatgtgtggctctatgagtccagccttggggagaacaggcactatctgccaccaggtgatttgggttggcctttcattggcaacatgttgtcttttctcagagctttcaagacttctgaccctgactccttcactcgcactttaatcaaaaggtaaagacctttagtcactcgtaatctctatctcccagttttcttgtagtggagggatctatgttatgcattggctttgttttcatcacttttatttcgttcaagctccacttctagtccctaggtcgcaaaattcttgtagtgatccatgttataccttgattttgattttgggacttaattttgttgtcaatgatgtgaaggtatggacctaaaggtatatataaagcacacatgttcgggaacccaagtataatagtaacaacatcagacacttgccggcgtgtgctgacagacgatgatgcgttcaagccaggttggccaacatctacaatggaactcattggaaggaagtcattcgttggtatctctttcgaggaacacaagcgtctcaggcgtttgactgctgctccagtcaatggccatgaagccctctctacttatataccgtacattgaagaaaacgttattactgttctggacaagtggaccaaaatgggagagttcgagttcttgactcatctgcgtaagctcacctttaggatcatcatgtacatctttctcagctctgagagtgagaatgtaatggatgcattggaacgagaatatacagctcttaactatggggttcgagcaatggcagtcaatattcctggatttgcttatcatagagcactcaaggtctaaattaaaccacccttttttactaaattcaatattctttcttttggaagattttgaagatcattattatttattttgcaggcgaggaaaacacttgtagctgcctttcagtccatagtgactgagcgcagaaatcaaaggaagcagaacattttatcaaataagaaagatatgttagacaatcttcttaatgttaaagatgaagatggaaaaactttggatgacgaagagattatcgatgttcttctgatgtatcttaatgccggtcatgaatcctctggccacaccattatgtgggctaccgtttttctacaagaacaccctgaggttctacaaagagcaaaggtaagtggagagaaaaaaacgatttcatttccttatcatcatcttatactttcttgtgttttgcatatgatggtacaataggctgaacaagaaatgatcctgaaaagtaggcctgaaggtcaaaaaggtctatctctaaaagaaacccggaaaatggaattcttatcgcaggttagattctggtcacctatgagtatagcgcaacagagattttgtatgcgatttgtttttggtgattttgaaagaggtgtttcttcactaggttgtcgatgagacacttcgagtcataacattctcactcactgcttttcgagaggcaaagactgacgttgaaatgaatggttagtatacatgtaaacacatgacttatatgaaatacaaaacaccttcttaaagtgcacctaaatatttagcatgatttgataaatcttgcaggctatttgatcccaaaaggttggaaggttttgacatggtttagggatgtccacatcgaccctgaagtctttccagatccaagaaaatttgatcctgctagatgggatgtaagttaagtgttatatcatcttacattgttcgaaccatagaaatctgaattcattttgaatgtttggagaaaattttcagaatggtttcgtaccaaaagctggtgcgttccttccttttggtgctggaagccatctatgcccgggaaatgatctggctaagctcgagatttcaatttttcttcatcatttcctcctcaaatatcagtaagacttacaaagtttgaatctttaaatcaaaatatttctgtgttatgttgacatattcattgagattcatattggcagggtgaaacggagcaaccccgaatgtccagtgatgtatctgcctcataccagaccaactgataattgcttggcaagaattagttatcagtaaaacatggttttcatcttctccgttaagttctagtgaaatgccgtcaagtttggtttatcagttataggagttcgttaactcttaagtaaatcaatcattgtcaaaaaaaaaagaaaagttaaacggtcttgagactgtctttttttttctcgttctgaaacttcatcagacttacatactctgttccatgaaacagagctttgttgtgttcatttgctataatacatatcgtttgccaaaaaaaaaaaagcttcataggtctactaaatacattttctttaaggtgctttgataagctaaatatgggactttgataacaatcacttgtttccaaagattaggctcatatcattcacacaactttactcttaaacattctttttagcaaatcatataggtattggactttgagctggatcgtggttataaatcaaccaaacaaaggttatagtatgtcccaaaatgtaaatcaaaatagataagaaaaaagaaaaatgaaaaaagaaaatgtgttataaaggagagaataagcccacacaggcacacaccacaccctgacagtagtgtccactatctgctttgatacaaagacacacagacaaaaaaaaaacagcttggagtccttttgtgtatggaccgttgtctgatgataataataataatactattaagagactttggttgctgttttttttctgttcttccttaaagaaacagtatagaagaaactttacagatcagaggatccaatgtcgagattctcgctactaagcgctgaatttgatcaatctctgttctctttttccttcatttgattcccttttctgggtctctctaatttattggcgtcgttgtttccttatcctgaatccttatcttcaatcctctgttctgtttctcaaacctaaaaaagtttgaaactttcctgaaaaaatggcgactagaggaagcagatcggagaaagttaagagaattttccagcaattcgacgggaatcatgatggtgggcttaaccgtgaagagatggcggctcttgtcgtagctgttaaccctagggttaaattcagtgacgagcagatcaacgccattctcgatgaagtttttcgaacttacgctgaattcatcgatccaaacaagggtttgacctacgacggtctcctacgtacttacgacgacggtgccggagatgttgacagagatttcgacgcattggggcttgagttaaacgctgatgagacgacgattaaagggtctgaggcggcttcgtcttcttcgattactgatgagagagctgttgaagcgcagaagaaacagagaacagctgcttgggctgtttcgccgaatcacggaatcgtttttgacgagacgtggaagttagttgatgatttggagattctggtgaagagattgaagtcgaaacaggagaaagatggaaaattgaaagctgataataacaataacaatgttgatgcgttttctgatgctggatggtctagagagttaggtccgtcttctgagatctctgagaagagaatctattgggaagaatcgagtcatgattatggagtgtttgtgaaggaattaggtgttttgagaagtaaagctgatggagctaggtctagagaagaagcttttgatggacatatggctattggtagggttttatatgagcatcagttgtttaaagaagctcttgttagcttcaagagagcttgtgaattgcaaccgactgatgtgagacctcatttcaaagctgggaactgtctttacgttttggggaaatgcaaagagtcgaaagatgagtttttgttggcgttggaagctgctgagtcgggcgggaaccaatgggcttatttgcttcctcagatttatgtcaatctcggtatcgcgcttgaaggcgaaggtatggttttgagtgcttgtgagtattatagagaagctgcgattctatgtcctacgcattttagagccttgaagcttctaggtagtgcgttgttcggtgtaggagagtatagagcagcggttaaggccttagaggaagctatatacttgaaaccggattacgcagatgctcattgtgatttagcttcgtctttgcattcaatgggtgaagatgagagagctatcgaggttttccagagagctatagacttgaaacctggccatgttgatgctctgtataatcttggtgggctttacatggatttaggtaggtttcagagagcttcggagatgtacactagggtcttaacggtatggcctaaccattggcgtgctcagcttaacaaggcggtttctttgttaggtgctggagagaccgaagaagctaaacgagcgcttaaggaagcactcaaactgacaaaccgggttgaattgcatgatgcaatatctcatttgaaacatttgcagaagaaaaagggtaaaaacaatggaaatggtaatggtggagaaggtccgttcatcgtcgtggaaccttccaagttcaagactgtgggtgagaagacgactttgaggccggatttagccacagcccttcaaattagagcctttcagagggttacaaggcttgggaaatgcgatgtggaggctgtacgaaaggagatgagagacaatgatgttcctgtatcgtattccggtagtggtggaccgacgaaatctattcggaaacctaatttagaggagattctacggcgtctgctcagctccttgaaacctgacacttttcaaggagccatcaaggctataaacgagaaaatcctcgcgcttctcgatgattcagggtcgggaagagttgatatgggtatgttttacgctgtgattgctcctttatgcggtggacattccgacaaaaggaaaagagttgcttttgatgcgcttctttggagacctgtaaacgaaggaagctctcagattacaaaaacggatgcagtcaaatacattaaactgttgagagctatttacattccatcacatggaatgagtgaaatgttagaagttcacggagaagaagaagctgaatcctcagtgacagtgacatttaatcagtttttagccatgttcgacgatccagattggggatttggtataatgtctacgatccttaaactggaggcaaacgatagaaaccgtcatggaaaccaagtttgctcggtttgtcggtacccggtaatcggatcccggtttaaggaagtgaaagcccggtttagtttgtgtaaccagtgttacggtgaagggaaggttcctccttcgtttaaacaagaggaatacaagttccgagaatatgagagtgaagctgaagccatgaaagctaagtgtgtatgtttctcgatgcaatctcataaaaaagcgattgccacttgatagaaggaacaaagaaactaactcatcaagtgtctgtctactccaatctttgtgtctaatttgaaaattgtaacactttctttttaacttgtgtgcatagtttcagtttaagtgtatgatgatgattgatgagactgcacaatgttgttttggtaaatcacgcaattgcgttttagaccaatttcagtttgcaaatttagaatttgattttatatatcactggttttataactctcaaaatacttttttgtttcttctatatacctcaatagcttacaacatttctttgatgaaatcaagattaagtgtgtcctttacgatgagaaataaaccgagaaataatacaagcatgattccagaagacataatcccttgctccacctctaacggtaatttcctcccgcctcgaaccgcttccaataagatcagagccaaagttccaccatcgagagccggtaaaggcaacagattgatcacagcaaggtttagattcagcaatgctgcaaactggtaaagcccgtccgcgtttgatctcgctacttctgctccaaccgcaataatcgccactggaccagcgactttactagcggtttgagagaagttcaagaaagtctgtttcaaactatccaatacattgtaagagagcccaaagaattctctaccggcgaaactaaaagtttccggtatgttcttcggtctcaccttaccgaatctaacattcggtgataactgaacaccgattttccccgttccatcgaaactcttatccggcgtgatccggatttcgaaactctccttccctctttcgatcctgagcaagacattgtgctccggattcctcttcacaacatcaacaactttagaaaccgaatcagaaccggaattagatagctcagtaccatcaacggctaagataacatctcccggaagcaatccatcacgagaagcagcagagaaagacttaacatcaggaacaagaactccaggaaaagattcttgaactggtaatccaacagataccacttgagtaaagattatagcgtaagcgaagataacgttagcgacaattccagctgaaacaacaatcactctatccaaaatcggtcgattcttgagaagatttctgtcgtctacagggatatcactgtcgggatcattatcagggaatccaacaaatccacctaatggaaaggccctaagagagtattcgacattgttggaattgaatttagctagaatcggaccaaaccctatcgcgaatttactcacacggataccttgaagagaagcagctaaaaagtgaccggtctcgtgtacgacgatgatcgcagtgagaacagcggaagcttcgagaactgattcgagacttccgaaatcgaatcgaccgagagcttgtgttctgttataagggtttctcttgtttttatagaaagctctgttcttggtgccgtagaggctatggttcgataaagtggagagattagattttgggagatgggttttggatttcggagggaaatttgaagtgggattgttaaaatcagagaggaaatgaggaattcgatgagaaattggagaagaagaaatgtttaaaagcatgatttcgtgaggttttgaaagttaagagagtacggagaagaggaactatagaagccattgaaaaacagagcagataaagaaaaaacattaaccatctgtggataggattgagaccacaacaacaacagtctcgttccaattttttattttatttttctctgttatttgaaatttgttaagtagagaaattcatagcttatatatgggctcctatgaaatcacttaggcccaatttgaacctccaagcccagtaagaatgtgatactttttagggaagctcacaaattcgaactagccacataaccccatttgacaaatatactgatgataggatcgttttcacttttcacttttcactatccacttggttgacaaaaacaacagaatcgttcatagattcatcttttagccaagtggaaatgccgtggtacaggcgatacatccactagtaattgacaacatccgaacgtttgtgtagacatactcaaagaaataaaatataagtcaatgcttgctaggtctatcttatccaagaaaatagtatatacatttttaaaaaaaattagcatatacattaccaaaaaagagtgtattttattcatatatatatatatgaaattaaactttttttatcgtacaaaagttatgacaatgcgttatacaaataagaaccattaggccgttaggctataagtcttagtcaaattaattaaatcaagttttatcaccgttgatttattatgtattgttatatcatatggtcaatgatataaggaatgtattaattctggttttgaaatttcgagagatctatcaaaatgcggagaaaagaaaacgaatggttgaattcttttatcagaaagagtggagaatctaattggctatcacattttagggtttaggatgacaattgctcaaatcaaaatatccggacacagtttctctactttactcaaaaggtttttggagtcaagagagagtttaccgtacattgaaagcgcaaaattcgagtggatcatagccaattattctttcttttgccgacatacgacaattctctactgaaacaaattaatatagaactccctaactaagtagtgtgtcatggacaaaacctgcaacgtggccattagtttctcttaatctttatacttaatggaaaatgattgtatttaggctaataattaacgaaaatgatttgtcttttaggttgtcatttccaataatttcttgttatatgattttattattttcattttactatgaattaatcagatttgtcaccagccacactaataatgaagcgtgaaatgccaaattagtatttaaattttctttagaaaactgtaacatccactgttatatacaaaaattcaccctatcactaacccaagacagttagcatgttaaagtttaacgatttggatatatgcatgtgtctttcagatccagtaaaagatggtcattaaaatttcgaaacaaaagaaaagttaccgattagttaactacttaacgggagccctaattaattgcacttggttgctttttccaatcctcaaacgaaaaggggaccaggttcagtgaacctgtaaatttcaatctctatgtttttggttttttatttatatggattgtcaccatgaattttcaaacgtaagcatgcttaaaagcaataatatattatataaatactcctattattatataatatgaaaattaccaaattataagtagtcatctttagctttccatctactttcttataattgaaaaagaagttggtgaaacatatgctcattattaagagttgtatcacaccatatatatgcataaggtttgggcagagacttaaagtagagatacagagtcagagagcaatgatccttatgccttctcaggcgactcatcatcacttcatcatccatcgtatgtctctctaatctttatcatactcgcacatatgttttaaaccgcaaatatacaatcaaattattcgtacatatgtatacaatacatgagcatgttatcaaatgattcgtacatgtgcatgtatacatgatcatgtgtgtgtgcttggaatcattacgatttttattgactatacacattgtcaggatcaaaggtcgaagaagaagtgaagatatatcaactgattatatgtttggagatgattaataagaatcatagaaaatgatcagcgatatggagtaatcctataacaactggttcgagtttgatcgaatcgatatttcttttctttcgattgcttcgaataaaaagttggatcatggtttgaggcaagtaaaagatcaccagttccccctttcacaacttcaatctcttttgtcaaggattatattattacatactctatgttttaattttcaaccaaattcaggttcttattttgtcagattatatgaactaatattcaattctataattgttatttttgtatgaccattacgtggtataaaatctctttagctagtattcactgatactcgattaaaaattccgtatgtatcaaacaacatattattgctccattgaagcggatgattagggcacctgatatatgtcatgtacccatgttttcttaatttcttttatgtatgtaacttggatatgttcaatccggattggctaagtattatgttcatacatcctaaaatccggtgggtttcgcccatggtgacactgacccagacagacgaaaccaaaagcccatctggaacttacacaagcacctaattgttaaatattgattggaataaagatttgtctctgactagtgtagaatttaaatatttagaaaatttgtcattgtatttgatgattttcacttccggataatcggttgagctaaaccatcacgtcctatatgttttatatatttattttgtaaaccaagtcctaaatgtttctttattattcaagtatcattggaatttaagcatatcaatattcaagcatgcatgtatagtttatgcaattagatataattaactggaagtggatattgattggtggttttagttggggagatagtagatattaaaaaggtatagtaaggtttagacaatgtacttacaattgcatgtgagccaaatttattttctctctacattttttccgttgactattgtcggtaccgttgactctcactagttgttctaaagttaatatttccatgtccatagccttcacaatcatagattcataggtgtaatatttcttttaaccatggacatgtgaaatgtgagtgacaaactgaaaacaaattaaagcaccatataaagaagatataagtaaaaaaacactggaaattatccaataaactggttccagtttctaatcctttcaatgggaaagcatgcattagtaattttcgaatattagggtcaacgactctagtagtggtacgactagaacaaatacatatcggtaaaactcggtttaatcattaatggtgataatatatatgatgtgatcagactggatgtgatgatttgaaatgtcaacgagtttggataataaaggatagtagttaatgttcaaaactagaaagatagaaagctactaaaaatctaaacaaagtgtagatctattttgacttagtcgaagaaaacgttcattaaatggttcccgccaatggcccaacggccccaaacgcgtagaacgtaacatgcatggggatccatattaatggcttcttcatcccacttgcttatttctttcgactttggaggtttcatttacctattatataagggaatgttcagttccagtgactgagatatcacaagcaaacaagagaagacattttattgttatttctctctctctctccttgtagatggaacttaagggcgttacttgtttgcttctttctttggttttgcttaattcgtgtgtggaatgtgttttgggggatggatctgtggtgggtcctgcgaggtttagagacgatgattgtaggtggggccggaggtgtgctggacgtggccggtttggacgcggtggtggtggagggttcggcggtgggagaggaagtggtggcggtataggcggtggtggtggacaaggtggagggtttggagccggaggaggagttggtggcggagctggaggaggacttggtggtggaggcggagctggtggtggtggtggaggaggtattggtggtggttccggtcatggtggtgggtttggagccggcggaggagttggtgggggtgctggtggaggaattggtgggggaggcggagctggtggaggcggaggaggaggtgttggcggtggttctggtcacggtggtgggtttggagccggaggaggtgtaggcggcggtgctggaggaattggtggtggagggggagctggtgggggcggagggggaggtgttggcggtggttccggtcatggcagtgggtttggagccggaggagggattggtggtggagctggcggaggagttggcggtggaggtggaggtggaggtgggggcggcggaggcggtggtgccaatggtggatccggtcacggtagtggttttggtgctggaggtggagtaggaggtggagtaggaggaggtgctggtggaggcggtggaggtgggggcggcggaggcggtggtgctaatggtggatccggtcatggtagtggttttggtgctggaggtggagtaggaggtggagtaggaggaggtgctggtggaggcggtggaggaggcggtggcggaggaggtggtgtgggtggtggatccggacatggtggcggatttggtgctggaggaggactcggcggtggtgccggaggaggactcggtggcggtggtggtgctggaggtggaggaggaggaggtttggggcacggtggtggtgttggtggagggcatggaggaggcgtcggcattgggattggaattggaataggtgttggggtaggtggaggctctggtcaaggttccggcagcggaagcggtagtggtggcggcggcggtcgccattaatcaaagctcttattaccaatctcacgtttagtgtcttgacaatactacttcttgtcattctatttctcttgtattgtttcaagactaaacaaaaaaatatgtatgatacatttttcacttcaagatgtgatttcttctatttttgtgtaagaatgttttcaaaaaaaaaaaatctaataagaaaatattgaatacggattgatcttaattttggacttaatccgttttctttctttttctctgaagacatctagtcagttttctaagaggaacacataaccaacattgtttcaacaatatatctttctttttgcaaaatacaaatttcaattgaattaacttgtgtaacatatgtacgacccatatttcagttttgaggtcctatcgtcagatatttctctacgaaagcaacataataatagttttagcttttattgctgtattggctacgttgacttatttaaaatttgagtttgcataaacaataactttctacaatgattttgcataaacaataactttctacaatggattttgcataaacaataactttctacaatgattttgctatagctatcgtcattttgtgtcaaccgcttgtgtctactttcaatattgattcttgaaacttgcctaatccttaagaaccttaacaaacacatgaaataacatctcatggtcacggtcacttccgacctttaaatagaacaacaaccaaatctcgtcatggactcatggaacattcgaaattttgccaatgatgaaggagactgacgtcgataaagccgtcatctaaatgtctaaagactctaaactcaacatgcatgttatagtgcttttctatctacgcaccaatgtctatttcatttttttttctttttttcagtttttagtttaatgatcgaaactatatggtattttaagttttttttttctttgaaatataccatatactccctccgtcccactaagatgaaatttttagaaatttcacattctttaagaaatattgtataaagacaattttaacctcttaatatactttaaaaacaataataaatatttatctaattatttagtaagggtaaaacgggaaaacagttttaaaatttgcattggaaatataaaacttctatctttgtgggacaaatatttttcctagaaaatttatctttatcggacagaaggataaagtcaaatagatcataaagctatagtttccatcattaattaagccattattataatacagtatctactaaaagttttggtagttatgtagagattgtgattttgcgtctcacattacacatgtatcggtttcacataatgtctataatatacgatacctaagttaattttccatttagcattgcttctccaatttaatttgatacaagatcttttggttagattgctgcagtcacaatttgctaatcgaaccgataggttagttgacacgtctgtataatgtcgtgtttcccgccgttctggacaatcaacaaaaaatggaaaaatagaaccgaccactttatagaacatagtaaccctaaacttaaaattttccaattatcctcaattttgcgaattaggacagagatggagcttcggtcccgcaataaggcgattcgtccatcgactgaaggtaatcttcacacgaccctttcgtgatttctcgctgttgattttgggtttgatccctaatcgtcccattgtacccgagaaattgcggatcatagtgaacttgttagtgtctctgtttcagtgcgatctgaactctattaattgatttttttgggtattgtgctctgatgatctctgttaatttgatgatatagttttggtattgtgccctgatgtctttgtgagggtagaaattgaaactttagggccttagatacggtcgagagattaatttataatcttttcttcttctcaagtagttgtggatctcgaggaaggaactggtatcaaccctgatgaagaaccttatgctatatcttcagatgacgattcaatcggctctgaatttcaaggtattatgattcgtcactaaaggtgtctgttttaaagttgattctctttgggttaagctctgactttctcacgattcgtatttgaacataggtgacgaggaggaggaggaggagttagaggaggttgttgctaatgatgatttaccaaatcctgtacctgttttggcaattgtaaacctaccaagagcaagcaagaaaaggaaaaaacctgatgcacgcaaagagaaagtagtgctattgtgggagacttgggaaaaagagcagaatagctggattgatgaacatatgtcagaggatgttgatttagatcagcacaatgctgtgattgctgaaactgctgagccgccttcagatttgattatgccgctattaaggtaccaaaaggaatttttggcctgggcaacaaaacaggaacaatctgttgcaggagggattctcgcggatgagatgggaatgggaaaaacaatacaagccatctctcttgttcttgccagacgagaagttgacagggcacagtttggggaagctgcgggttgtactctggttctttgtcctcttgttgctgtttctcagtggttaaatgagattgctcggtttacatccccgggaagcactaaggtccttgtataccatggggcaaagagagcgaagaatattaaagagtttatgaactacgactttgttttgacaacatattccactgttgagagtgaatataggagaaacataatgccgtcgaaggtgcaatgtgcatattgcagcaagtcattttacccgaagaagcttgtgatccacctgcgatatttttgtggaccttcggctgtcaaaacggcaaaacaatctaagcagaaaaggaagaagacttcagattcatcctcacagcaaggcaaggaggctgatgcaggagaggataagaaattaaagaaatctaagaagaagaccaaacaaacagtagaaaaagatcagttaggttcagatgacaaagagaagtctcttttgcactctgttaagtggaatcggatcatcttggatgaggtcagaaccaaaacttactgtctgttgttggtgttaacctttttcacaattttcgttgaaattcaagcatgtgagatacacataggaaaccatagtaaacttattgtcaccaaccatagaataactttaagggcgtcttttctttcatattgttttgggagactagatttatggatctgacattgattactagagctcaatttacatttcttcataccaggctcattacatcaaagaaagacgtagcaatactgcaagagctgtttttgctttggaggctacctatagatgggctttgagtggcactcctctccaaaatcgtgttggagagctttactcactggtttgttaacttttcctgaattttgtatatagcacttgaacattactatcgacatggctgatgtgcatatttttttttccccagatccgcttcttgcaaattcgcccatactcgtattacttttgcaaggattgtgactgtagaattcttgattacgtgtaaatttttatcacacttaattttccagtcatttttcgtatttctcatagttttgtttaatagttaataacaatttatgcggttctgttttctctggtggtgtttgcagtgctcatcaaagctgccctcactgtcctcataatgcagttcgacatttctgttggtggaacaaggtaactttggggtgacactttttttatatcaccaaattttttaaagcaggattaccattttatatcttttccttctggttttttgttttcctattcttgttagtatgtggccaagccaataacagtatatggaagctttggactgggaaaaagagccatgatattgcttaaacacaaagttctgaaggacatccttttaagacgtactaaattgggccgggcagctgatcttgctcttcctcctagaattgtatgttcctttctctcctttgtttgatgtaaatgaagtttggtatagttgcttctgagtttcatctctacctataaatttagcttcttacagatttctttaaggcgtgatactctagatataaatggggctgattaataagaatcgctaaacaaagctttacctcaactttttaatttgacttcttgtagatcactttgaggcgggatacactagatgtaaaggagtttgattactatgaatcactatacaaaaacagccaggcggaatttaatacgtaagttacttctactagatggatttccactggtttgcgtaacagaattttattgtcgactatgctatgtacatttttgtgtgcaggtatattgaggctgggacattaatgaataactatgcacatatatttgatcttctcacccgcctgagacaggtgagtggcatctacagtttttttggttcaactaaccagccaatgcacttttttgacgatatagatatattggtttgtgatttatttgctctgcaatttgttccaggccgttgatcatccataccttgtggtgtattccaattctagtggcgctaatgctaacttggttgatgagaacaaaagtgagcaagaatgtggtctctgccacgatccggccgaggactacgttgtaagtattttaagtcaatctattgctatttcgtaatatcttgactcttgtttctcagtaactgtatcttctggaaacagctgctttcatttgacactgtttaagaatcgtcagattactattgttggacttacttttccctttaatattcttctctggttcttttactttgaaggtgacttcttgtgcacatgtgttctgtaaagcttgtttgattggtttctccgcgtccctgggaaaagtcacctgcccgacatgctcgaaactactgactgtggattggactaccaaagctgacacagagcataaggcgagcaagacaacacttaaaggatttagagcctcaagcattttaaatcgtataaagcttgatgattttcagacaagtacaaagattgaggctttggtatgtgctctttaatatctacagcctctgtctccccccccaaatagtacctcttaaagtttctttgtagttttgagtcttttccttcctttctctaaccagtttgtgatgatttttgtatgcagagagaagaaattaggttcatggttgaaagagatgggtctgccaaagcaatagttttcagccagttcacatcatttttggaccttataaattatacccttgggaaggtaatttcaggagaaactcactagaacactactagttttggtttttatcagaatgagacgagcagaaaatgacttttgtttacaacacagtgtggggttagttgtgttcaactggtgggaagcatgaccatggcagctagagatactgccatcaacaaattcaaagaagacccagattgcagagttttcttaatgagcttgaaagccggaggggttgctcttaatttaactgttgcttcacatgtaagtgtttagttagcaactctggtctggagagtgatgtatgtgtattcaaacatgttctcacattggttgtttgtggaaaaattctattaggtttttatgatggacccgtggtggaacccagcggttgagaggcaagcacaagacagaattc

SEQ ID NO: 14 - DNA, 84203 bp, Arabidopsis thaliana
aagcttaccgcaaaaagtaacaaacgaaagggacaaatgagaactcattaccgcagaaactgacaaagaataaaagtcgagagacttaattaaactgtttgtctgtctttaaagtattttttttccatgcaagaagacacaaatctcaacagttaaacgaaataaataaaagataaaaaagaccccgaaaattatgcaagaaatttcatataactttttataaatttaagtatacttggaaaaaaattatggacaaacttccaaatagaaaatgcctaacccaagttacgtcatctcacttcagaaatgtgatttttgtattaaccttgaggcaatggcgacaattgctccaagacatattactcatttccatgcaatacataaaatatttcctactaagattaatactagtataaaatttgcttacaacaataaatgttatattataatgtaacaatctgcatatacacacaacgactacaaaacagaaaaaaaatccaccctgccttttcaatcaattttatagaaattgacacatattcctaacataaactgaaactatctcaataaagtaatgtcaatctctaacccttacgtatgtcgtctttttcccctagtgtaaactcaaattgaatatccaaaactaatgcataactaaaactgttttgacaatggttatgtttacatatctctatttagattacataattcaaagatttcttatgagggtcattggactacgtagtacgtacgtctaactatttaacgaagtaggcgagcgaatgcatttaaaaaacttgaaatgtctatttgtcttttagctcaaataaatgagaaaagtttaactgtttacactgtctttttcatattttttactactataagaaatttaaaatttctcttctttctattgcgccatcaactgttttgtcaacggtttgcttttttatttttatgattaggaaataatggggtcacatgtaggtacttgtaatccttctaacaaataaagaaacaacagcaacatcgcatgttctcatttgaattttcccaatgagtctttctccgtcacgaccacgttgtcttcttttattcttacttttcaaattaagatttacccaaagcgaagactttatttttactatttttttggcatgcttattccgaaatgtgcccatagtaataattaaggttattacaaatcatcatctattaaaaagcggatactaaatctgaaatcttagttcacatagtaataaccttgatacaaagcattcaaacttcaaacggtacgactttcactttgaacaatttagataaataattgaaatcaaaaccatataaaaatgcttgataaataaacaattaatcaaaattattagaaaaatacacttgacgaactaaaaatgatagaaacattgcaataagttaaaaaaaaaaaaaacacggcaaaagttatatactactttaataggtggatagtttttgagttagaaccgttgggataaagacacgtgacggcgtctaatctgagttgaaacaatggatacaagaccaccgagcggtggcctcatctttgacctataagtcatctcatcgtacggtctacgataaaacttgagaaactgaacgaacgaatctcgtggtttctcacttttgctgacgtgtgactctcgccggaagaaaatcgccggagattggaagaaagacgggcgaggtatccgcgggtcccgtagggttccgatagagtgacggtcggtggtcctagctggcatcggagtggaagcgaagaagctcctccttggaccaccgaatggctcgcttctagccgccggtgacgcgaaagagaaagaacgcgcgttaagcggtgagatgtacgcgcctgtgttgtgtcctagtttggttgatgacgtgtcagtcaacgtgagacaccatggtttgactgtgtcgagtccgtcgcgagatacggtgaaagcgaacctagaggatgcgcatgagccgatcttgtccgttgattttagtgatgacgtgtcgaatcgtagggaggagactcgtgatgggtatgatgacgagaaatcgtcgtagtcaaacgagtcttgaaaatcttgcattgatacaatcatcgtagccgttgatagatccacgaatgtgcgaataccctacacgtgagcgtagaggatcagtatctttgacttcaacttaaaaagtatatcatctcgctttcaaagtcacatttagataggtgaaataagacttttgacttgcgcataattaaaagttgtacatagttgaaaatgttaaacaaattaagagtgtaccttccaaaggtaagagaaaagagaaggaggatcgatgacgaaggttttgaaaagacgacaaggataatactctgcgactattttgagtgtagtcacaagtatgttcatgaaagctgatgctgatttgaagaagcctgcgatttcaaaacatgcaagaaactttaggtttaatcaacgagtctacaaaaaattgttatatcattttgacacagttgacaatattatacatgtgaaaacaaatgttgaaactttgggtttgttttataaataaaaaaaaagaaaaaaaaaggaaggtgtgcagtggaattgcagaggatcaaaagaggaacatttaatgaaaagctaaagagtactatcagagttacgagaagtactgctgctgcaactggtgtagaagatcaacataattaaatgccaaaaataccctcaataattgaggctgtgtgattcgtttgtgaccgtgactctacagggacactacggacattatgggatcgttatctctcccactttcctgccggagttccgacatgttccggtccccaatttttaccaacttctctttttgtaaaaatcacatttatgtttattcgtaaacggtgacaatatttccattgaaagataagaagacaaaataaaaatagttgccatattttgaaatttttaaccttttccccctttattttgaaaacctttttcctagtgatataaaatgataaattgaacataagagagaacttactagcatcgaaaaggatgacaaattgttcgacgtttctggacatggttgagatagcaacctctaatgtaaataccaccaaacgtgtcaacctacgaaaataaacgaatatataaataaactttgtgaataatgtttttgatgtattaatatgtatgagtaatttaacttactgtttctgcgtatgtagcttctgataatcttgtttaatgcggaaaacctaagaggaatatagaaaagggtattaaacgataggttttgattatgaaataaatcaaaaaacaaaattatcaaaagtgagattaagttaccaaaacgggtctacactcgtcgtcaagaccagcgacgtaggcaagaccttcagcaagctccgccgtgaactcatcggcgatcaaactctctgtaattattataaatattaataaaagataatataagaattttaaaaataaaaagggaaaacagaatcttgaaaaattaaatagaagaggttaaaaataagtgggtgtcataatgagtggatattcactttaacgctcgatgttcaaacatgggacatatcaaaacccgagaaaaaagcaacgaaacgtctgtttttctaaagaagtacaaatacgaaaaccactagctaaccaaatctatcatctatacacacactacatgctttactttaagctttatgtttttaacctctcgttttcattatcttaaaaatttagaccgttttttaagtaaagcaattcggacctctaaagatgtaacgtacgcgtgttcaaatatatatacgtgtattttagtatagtatatcaacataccaaaatatttgtatacatatcttggaaaataaagactgtaaatatataaacgtttatccatatatacatacatatacatttcaaacttgtataaagatatacagtatatagtgattgagaatgtgtaatgatcaagagagagaaagtaccaatgccaagagaagatctccatgaaaggcaagaccttaactgtttagctgctttcttcacattgtctccttttattctcaagaatctaccgacacaagctctgttacagaacttctcctgcaacattcattaacccaataacaatataatgaatcaaaattttctattaaaaaataaaacatgttcaagtaacggatatataataatgaatatgccacccaacctgtttaagagttagaggagaatgtttacgaaggagatgaagaacagcttcgactttgtcgtcgctctctactactgaatgatgatccttctgctctttctttcccatttcgaagatatcaaccccaaaaaatgactcctctctttcttctttttatttgtgaaaaaagagattggttaattagcccgttgtaacaaatataccaagcttgttcttcaagcgagagaaggagagagagagagtgagagtgagtgagggaaaagagagattttgaaaaaatggaagtgattgaatggtgtgagagagagaaagagattcccttgtatatattttgggatggagataacggcagctgacgccgttaacaccacgcaaagcacatatgtccaggtcaaggtcatttgtttaatactagtattttattgttacattaaatcaaagtagcaatttaattattagtttttgtcaataataaacatttaaagtggataatttagaaaaatatcattggtgaattttttttttaacagaataaaataaaatcttacattacagcttgaaaatgtatcattttcgaaaatcttatttaaaataaataaacatggaaggagaaaaaaagattgaaaaagaggtcaaaaggcgtcaagcgttattagcatagctgcaggtttgcccgttggaacaggtattattacaaggattttctactttacttgaaactcgttgaactttcaataatttttaaaagcactaattttgatcacatcaatctattatatctgatctcttttctttgttcttttgaaaatgaacaaaattaaataggttttcctttgatatcttaacataatacgtgtgtgtatattacatgacagactttaaaagaggaaacatgaaagggtcaataaataggtcgattgggcagatatctctcgtgcttcgaatcggatttaattcacagccattttgtccccggtgtagtagatatgcagattcaacattgacttttaatttttagtttaataagtagtcttcgagatattaaatgcgattagccttaacactttctaaagaacacaactaaccgaaagaaaaaaataagaacacaacaaacaacgacaaaaaaacaaaaagcaaacatcggaccaattaaatttaattaatacctttaaagtaaggtgcaaagctccaataagtaaaagggtggttatgagatattatcatgcgttaaatttttttagtaaaatacttcttatcttttattaaaatatttaaataaaactttaaaaaatttaatataaacaagttaaaaattttgaaaacaaaaatctttaacgagaaaaaaattgaacaaatttatgcattttaaatatgtgaatcgaaagtgattgttattgtgaaatagctattatatcaaccgagggactcaatagaatgagagtgtcataatatatgattacttgaagcattttaagcttgggattgttttctagctttctatcacctattggtatgctagtactatgctgccacagtaagatcgggcagttcccaatcgtgttccttttcttcagagcgaaaatccaactcgttatatacttcaccatttctttatttattagtttactgctattcgacaattacttacgatatattattactattaaagttatgtgtacaacttggtcctaacattcaaaaacatggattatatcattgacgaataatgtatatatcgattaacaccaccatttaaaccaagttattaggtattattcattcaatttcagaaactctagtatttatgaagatacctttaaaatttatcaactattatagctctgcctctaatatacgttcaagtttacatgatttgattctaactttgttttgataaagttatagtatatatttgagtttgacagtgaatttgttaggtagaacaggtaggcaattgattagttttatctctagtgattctccaccaattctaagtttgaattttggttgttgtctttatgaatggggttaactattgtgaatttgtgaaattggatggcatgtaccacgtacgattcttcagaaaattaataattagaatataccgtatcactaacaacggtccaagttataagttttaaagtttagtgatgtatatatttgataagatataaaggagttcattaaataggaagtagaaacgacatatcaacagactcagtctaagacagcctaacagtaacaaatcaaatattcgtatcaaatgaaactgtaccttcaagtagtagaatgtattggcgttttgtgtgtgtgtgtttttcttcaatatacatgaacttcggtaattctttcttcacgattatttttttctatatcagtcacgcgaatttacataacgtacaatatctttcattgatttcattttctctaaaaaagcgtgtgattatatgaaaattctgtatatcattgtacatatctcaataaaatgaaaacttgtttttcgctgcaaattcaaaattttaaagcgttactttgtgtgtataatggaggagtaaacataacagtgtgaaatctttattcttctgaatatccagtaaaatttgagataatccaatacaacaaactcgtgtcacgctcaagtagtcaaatgtcgatttggtcacatccgcacccgtttattgaaacttatcaaatatatatcattttgaaaaagcaataagaaaacaaaggcatgcagagataaaaagctggaggaaatgaagaaaaagcccgtgaacaaatagttgaatggaataattagtatgcacagtacatatgaggctgtctttttaattaaaaagaagctcttacttcattctatttttttttttttttttttttttgtcaatccttacttcattctattataagtgattctgataccctatatttgtggaagataaaaaaaaattaaagctaatgagacgactttgagttaagttcaaacttttcattattaatcgcatgaaaagtcactatgattatgtttctttgttcatttataacacactcatcattgtatttaaataaaatttaagattgatgatgtctttaaatgacgattggtaagctagcaacctttaattcaaataaatttgcatgcatatctgacaaaccctttcatcgtcaactctatagatttagataactagatcccggtttcatcagcacacgaacattatatatcagattattccgttttactatatgatcattatttagatgttgccatgttgggttatgtattctattatttagttaaatgacgtgaccttacttctcttaaagattatataatcctcacacaaacaaactattttgaaaattttgttttgaattccaatccatccaataattcaaatgtggattaacgttaatattttgaatgttaatgcaataataatacgatgaacctaacaccacgttgacctctaacacctaacatgttgatctctagtgtgccaaaggaaaaaaaaaaaacacgacaaccaaaagctaaaacaagttatccaaaaaccagtaaacagaattcagaatttaaagttgctaattatatatcggcttagaaataatatttgtcttggtaacgaagtccgacaaatattcctgaattctgattttctgataagaaattgacaatagatagcataaggtataagaaacagtggtgacattattattacagtaataattgacttagcgacttttggaaatactatagttttgttgctctgacgcaccatgtcaacaacaactcactcacgtgacccctcctcaagttctcacttattcttaaaatctttctaagcttttctatcacattttaccaaacctcctgaaaaaatcgatttcatcctttccctttttcttgttctcatatctaatttcaaattttgaaatatggccaatgacgttagtggcgtttgattacgaattttccatcatttcacatttttatatctcgttgattgtaaacaaatttgcttgcttccatcaaagactctagtatacatacatactattgtgattatgtccttgagatttcgagccaaagtcaaaatactaatctctgaaattaacgaagcgccaagactgcttgttattttattgaaacatcagcattggttaactatgattgaaatcacatttgaaaaactccaaatctcccaacaccttgatgagtcattcgactattttaaatttagttggtctcttaaaatattcataataacatttacaatatctaacattactttttttttttgttcttaaagctgttttggagaggtaaacctctaataattttacagacagaattttggtagaatatagcaaaaaagagggtttgatggtacttttgcactgaaatactgaaatcatagttaggtataagccaaggttgacccaaaaaaaagaattaactataagcccatatcttattcatgggctttgatgttggcccatcaaattattaattctctgtgattatttgccacttttaaccattgcccaattaggcgaaaatattaatgagatcgatttctcacaatagagagggggctaattgatcaaatcaaaaactaaaggggtgaaattttaataaggatggattactataaataaatccgggatggaaaaataaaaaaaagttccgttttggtttcctcatctttttgtaccgctccgttgcgcctctctcttcttcccttcctctctctagcggcggagttacattgtcggccgccggggaaaccggcgacagtggattctctaaactcttaaactcgctacgtcgattcttaaaggattcatcgccgataacttttatacctccttcttttccgataggatcgggactcattttgtttccaacaccccggatccggtgatttagggcgctttttgatgcttatcgagtaaaggatttatcgatttaggtatttcgttattgatttgatctcggattttgacgggattaagattaaaggtccttactttgattttgtgtagtgatcgtttatggaaggaggtggtggttctggtgagcgttcacggattgcttcgaatactcctcgaagcttgaaggagaagagcgatggggttggtaggactgtgtcttctactgaaactaggcagaattatcagaagagatccagaatggttgttagtgattcggaatcaagtgatgagtttatgaaaccacctccacgtagaagtggcgttgaccgcaaaacccttggagcaaaagagaagtttgttcggaagagggatagggttgagcatgatcgaaatgggtatgtgaggaggaacaacgaggcgtcaggaagttttatgaagatgaacaagttagatatttttgagtttgatgaatacgatgggtttgatagcgccaatttgatgaggaaacgctttgataatggcagtgttggtgttagaggaagaagctcttttgcatccagaagggttgatagtagtgtgggaaggtctggatcaggcagggagggtctatttgatagaagaagaaacacatttgtaaatggcacatgtagtgcgagctcacaggaagattcgagtagtgaatctgattctgatgaaccaatgagggtgcaagggataaacggtgttctgaaggtgaaggtcaacaataagacaaacactcttgctgcctcaatcaacccccgggatgcagagatatatgagagaccgccttcctccaggaaggcacaaaggcgtgagaatgttgtagttaaaccaccctttaggaaatcaaataatgtagacaataattcagagtcagaagagagcgacatgtcgaggaagtcaaaaaggaagaaatcagagtatagtaagcccaaaaaggagttcaataccaaatcaaaatcaacctttcctgaattggtgaatcctgatgtgagagaggaaagaagaggaaggcgtggtggtggaacagacaagcaaagattacgtgagcgaattaagggaatgctaactgatgcaggatggacgatagactataaacctaggagaaatcaaagttatctggatgctgtatatgtaaacccctcaggaacagcatattggtcaataattaaggcatatgatgcacttctaaagcagttaaaagacgagggagttgatgccaggcctaggaaagatactgctgccgttgcttcagtatctgaggaaattgtgaacaagttagcaaggaaggcaaagaagacccggtctgagatgacaaagaaatggaaacaaaattccagtggtagtgatagtgaaaacaaaagtgagggaggagcctacactgatacctctgaagagaggatacgttcatccataaagctgggtgggaaatccaccaaaaagggaagaaatggagccgattgggatgagttacacaagaaaagtaaaagatcattatattataataatgcaaggccatcatgtggatcagattcacattatctacatggacgaaaaaccaaaaaaattggaagatgtactttgttggtgcgtagttctaaggataaaaagaatccagcgattaatgggttcaatccatactctggaaaaaggacattgctctcttggttgattgaatctggagttgtccaactaagacaaaaagtgcaatacatgaggcgtcgaggtgcaaaggtgatgctggagggatggataacaagagaggggattcattgtgattgctgcagtaaaatactcacagtctccaggtttgagattcatgctgggagcaagtcatgtcagcctttccaaaatatttatctggaatctggcgcttctcttcttcaatgccaagtcagagcgtggaatatgcagaaagatgctacgaatcttgctctccatcaagtggacactgacggggatgatccaaatgatgatgcttgtggtatatgcggtgatggtggagatttgatttgctgtgatggttgtccatcaacatatcatcaaaactgccttggtatgcaggtatgtaattgcagcgaaatcgtattttgaccatttaatgtttctttccattaattggtttcgagtcaactttatatcttttctgtatttacatacttgtatcatgctatgattgtaggtgcttccttcgggtgattggcattgtccaaattgcacatgcaagttttgtgatgcagctgtggcttctggtggcaaggacgggaattttatatcattactttcctgcggcatgtgtgagagaagatgtaagttgtttcccttattgaggttggtttccctttaaatgaaattccattgccaatggtgatctcacttaaattttaccaccccttttgtagatcaccagttatgcctgaatgatgaagctcacaaggttcaatcttttggttcagcttcttcgttttgtgggcctaagtgcttagaggtattgacttctctaattcactcaggagtttgttgtttcgttattatggaatccagtttcttcttagtgactatagaggctggtaggacaagatcgcgacttattagcttcatgatcaataaaagtatcatactatattctttgagacgtctatttttttttgtgacgttataagttttgtgcatcatacaaaaactctcatatgtgtatcagcatcagtgaaggctaattctcttggtttttcttttatatcatcaatttcttgtatcagcaaagtatttgtttatacaatggggaaatgcttaaggctcttttatctatttgttcagtaatttccatgtcaatgcatgtatttggcattcatctcgtatagtcatatcctataattgtacattcattatcttttacagctcttcgaaaagttacagaagtatcttggtgtcaaaactgaaatagaaggtggctactcgtggtctcttatacatagggtggacactgattcagatacaaattcccaaatgtcggcacaaaggatcgaaaataattcaaagctagctgtcgggctggctatcatggatgaatgctttttgcccatagttgacagaaggagtggggtagatctgattcgcaatgtcctttataattgcgggtaagtctgtgtgtttagtctgtcttttatatatataccgaaaaagtatgatgtctccaatacctcttgatatggagttcatgtacaagcattgaagtggataactgattatcccgaaagtgaattgaacttggtatctagtaggagctgagagattaacatgtcagctgtaataattgtaaacttgtcattgtgacattgttgacatactgaagcaattatctggtgtttgtgtcttatcaattttgatactcgatgttgatattgatcttcattgtatgtatgtttcatacttttttcttagatgcacttgcatggaactttgattccatatgttgactgccttctctatgcagatccaatttcaaccggataaattatactggcttctacactgctatcctagagagaggagacgaaattatatccgcggcatctctcaggtaattttccatcatcttagccaacactttttaataacaggcaatggcatggtagaatcattcctgagtagtatccgttaaaaagttatctagcgtcgtctgaaattaactggacatcaattgtcactagtggggtacatttggatgtcttgcattttcctttccccctctagtcctttaataactaaaagtttatttgtagtgattcttttgttaccctctttactacaactgtgagttctctattagtctatcttttgccttttcaaattggttgttgatagtatcatattacatacccatttaactagttgtgattaagtaatgctatctatcagctgcaggttaatcagttgcctatacttgtggatgcaagtgattgcacatgttcattcattttaagtagtagttgttgcatcgataatcaattttcaggaccttctagaattgaagtgttttatttcctttttaggttccatggtatgcaattggcggagatgccatttattggaaccaggcacatatataggcgacaaggaatgtgtcgtcgcctttttgatgcgattgaatcggtaagttatgtgaactatataatcattatttgtagggccagatgctgaaaggtgcttttaacgtttcaaatcctggtttttcttgtttgttaaggctatgcgttctctgaaggttgagaaattggttatccctgccattccagacttcttgcatgcatggactggtaactttggatttactcctcttgatgactcagttagaaaagagatgaggtccctgaacacattggtattccctggaatagacatgttacagaaaccgctgctccatgaagaaaacattatagctcctgcagctgcaggtgatgccatgatttcagaggtagagacagaaaagaaatcagaatttacctcttctgttgaaattggtccatacgcagtagagggtgatgagtttgtcgctgatgctgcaaactgctacaaagatattcttgcttctgatgaagacaatattctggtatcagttgaaacagccatgggcacaatttgcaagccaaaggatgaattgagtagacattttcgcggtgaagaaagtggcattagctcttctccttgtcagatcacattaaagtctggcactaagcacgtattaggtcatatatgtgatgatacaggatcatcatgtgaagatggccttacggatgtgaatgtcgaagctgatgctagcttactctctcaggaaatccaacaagcatcagctagttttaaggttgaaaacaatctctctttatctatttctggtagaggatcatcagatttgagctctatctcccaagaagtcaagagtgaacaaacctcatcgaatttagacggggttccttcatgtaaagactataacatacttgttcctggtgctaagttggataaatcaaaagatgatgcattcgcggatggttttcttttgtgaggggaaaaaccccttgcactcgggatgaaaatctgagctcttcatttcagtgacagacctgttctcctagaggaggtatagtatctccctggatttgttgggacatttggattgtcataacagtcaagctgcattatccagcagtcgagatttagtttcacatatcccatataagagatttgtcgccccccgtctgagctgctaatgatactgtagaatggaaaagcatatgataatatactgtggaattccaatatcttttaagcctgagtgatctcatattcaactcgattagtgtggaaagagtcctgttgttgttgctgcctttgcctgtatttatttttcacccagattcagggttttacaacattgtattatatgaagttccgattatatatatggggccattctagttttgcatatcagagctctattatctcacagatcttccgctgcttttctgttttttttttttttttttgtggtcaagcgttcttctattgctttcaatactttgatatgtataacatgggtgaaacatgttacagcaaaaatgtcacaaaaactcttcagccttgttaagatcatccaaaatctcagtcttaacctcatcaggaagtggtgcagaaggacctgcctttgagtaaaatttcgccaaagcgcggattacattctccagctccacgtatgattcctgaaacacatgaatatttcaatcaatttcaattgatcaactttcaataaaagaagaagataaagattaaacaaacatacttctccggcaacagtcttttgtcctctccaattgctcagataatcacgaatggattctttagcagcatcagcacttcttctgaacttagcattgtctttagggttctctttcaatgactccctcatggttttgacaacctctcttgcagatttcaagtaagcttttggtaactctttgccagactttgttctctcattaggatcaaacaaagtcttgaaagcaccaacaactccttctccttcgtctaacttttcctctgacgcctgagcttgtaatccagaaaactcaattgtggccatgaacgaagaagcaccaacaacacatttcaagaaaccacgacgatcaaacaaagatgatgtttggccttgacgaagcttttcatctattttaatttgcaaagtttaaagcagttaaataaaacttgtagataagtttagaaatcgtgaaatcaatccatctcttataaaaaactaaatcattgaagaaacatgtttgatttcaacattggatgatataaacaacattgacattaaaacagaaaagagttttcaaaaaaaaaaaaaaaaaaacacagaaaagagataaagaagaagaagagtgatactttgacattgtggcttcgatttcatatggtgatgcaccaaagtaggagaaaagttcatgacggctacaaggaaacccatgaatctttctgtctgataacaacaggaacctcagaatcagatatagatgaaaaagaggatggttctagttgtttgcgaaaatggcgaatttgcccttcaagttgatgataataaaataaaaaacgctagaaggagggttcgaacctccgaccttgtggttaacagccacacgctctaaccagctgagctattccagctacttgttatgttatgtgtatttatgttttatatattgtcttatcatttattaaattgagttattgaatttctttttagtcgaaacggtgtttttttttaattcacttacaaaaaataaggattggtgcatgggaaaggccgattcataacaaattgtaggcccattaaaacgaagcccattatcaaccctatatatagtgcggcgtcggagtttttatatttttccaaacaggaattaagaaacccctctagtcgacgatatcgagatcgatccaacctttaccaacgctttatatctcttctaaggtaaaatttgtcgctccttatctctctcactgtttcttagaaaattcatcttaattattatatagatagagaaccctaaaagttcaaggttgtatttgcgatcgaaactatcagcggccgtgttccgaaccagttttgaatttcaatttttttttttgaaggttaaaagtctttgattcgtgaatgatgatggatccgccgcctacgaaggagtttgctttggccccagtatatgtgtattgggacatgaagaggtgtccggttccagatgactatgatgctcgtcgggttggtccgtgtattaaacggattttaaggaaatcaggctacaatggtcctgtcaccatcactgctgttggctcactatcaaaggtccctcgtgacatccttgaagtggtctcttccactggaatctctctttatcacgaggtcgccagtaagcatcgatcttctcatccttattccctttttatttcctttattagagagagagaaagagtctctctaagtatttagtttctgaaacaggtaggaaatgcatggtttcgtgttcccttgaccatgatgatttttagccacgtccagctactttgatgttcatatcccgtccaccactgtggattcctccaggcttctattctaatattctcatccaacgtgaaaaaaaatacaactccattttcccgtttccacttgagtctcctcgagaagcctcctccaccctctggaaaaactttcttctagctgatccagggccacttgaggaggaggaggatagctgcagtgaaacgcctggacctgcctcctggatttgctctgtgtgccgtcgtatttgtggcccaggtattgctggccaaggcgttgataatttcatcacgcatctctctactcgagaacatgaactcaaggtaatttaagcatccttgccacttgtttaactatattctctctttctcagttgttcttttctttgcctaaatttgaccccgtctgtctttttcctcgcagcgtcaacgctttactaaccccaaaggtgagcctcctcttgattcttgtccggagaatgctactaggggtggcaaccaaagttgatcatattatgtttttgtatctctttaaggccatttagctaattgatggctccaagtttttaattccataattgtcattttaaatctcaatttatgaaggagaagaccttttcattgtaccttttgtgcatttgttactcgtaaattgattaatgaataaacaaatgaccatccaaaactcagatttacgaggaagaatcaaaaacttacaaaacaaacgtcataacgaatgtacaattatggatgtgcttatataaatcttagtcctcgatgtttagatgaaagtactcttcaagaacccctctaggtgtcctaccaaatcccttggctacttcttccatttctttaagctttgtgacttcttttctaatctgatccaatctcttcagcacattcgtcatcaagctattcgcatctgtacctgatactcgcctcgacagctctgacttctccttctcgagctgcctatacagatcactcagacattctttctgagcatgaagtttgccttctgcaatttggtactcaaattcctgagcctttctcagcgctcttagaacctcgccgatttcttcttcgagtttgtgcatctcagcctcatggttgaatggtatgggcccaattggagtcacgtcctgtaaactttgcaatgtatcattttctctagcttctccactgtcggagtaatctacaaccagaatgaagataatctgttataatgaacaataaatcaacttcaatacatattcaagtcaaagcaaaggatcgtgattaagggatatgtacctgaccatatagttggtgtatcatcattccagagatcttccaagctcgtgccacatttaagctgaaaagagttggctttagtttcaggaacgtccagtaaacattacattttacaaagtatattataccttgatgactgttgattcgatacaatttaatagctccttagcattgtctctttgtgctccccgcaagatacaaataccgagattcaggatcttctccacgtcgccttgatattctacagtctgacatatttctagaaacttgttgacatgtggaaacaagtcctttttggcgtcacatcgcctgcagtagtattcagtatccaatcccatgctgcctccaatggttccagccagataagctcgaagagcacagttcatatgagcaacatgtccacatatgtgaccctcggaaaccacagcttcacatttgatatagctatagcctccatgctccaaacttattaacttgcagcaaaggatgcaacagcaatcaacgcagaacttacgttcaccgcagcaaatgtcacaaggcatagcaggtaaagtctcggcttcgcactgtggcatcaggctccggcatttttcattaccagccttacagaccgcagtatcagatccatcatcacgcattggatcttcatctgagctatacactggtaactgaacctgcttctgaggcaaaacacctgtcaaacagagaacaaatcaccatgccaagaaatcagtaacttgttcagaatgttgaaacgtaattcatatggttaagaagaactaacagaaacatgcgatgagagaagcataaggaaaaacatagtaagtctactggaattgtatatatttgagtaaagcatcatatagagtaaattgaaccttgaccatctctgcagggtatgctccagctgaaagaagcaaagaacttttgaacatccgcttcagggaagtgtacacgaatatatcgttggagcgagagcctgctcctaaacaccttatttttccgcaatatttcagtatctaaaccgggaagatacttaggaggatataagtatctatccacgaagtagcctttaccgctaattctcggtccaaccttccaatgccaagtatctccaggattaggccaattctcaggagcataaggtaaaccttcaccagattccaatggacttactggtctcagcagaaggtgaggcgattcacctatgttactttgatcaatatccatggagtccatgttataagacctgcactcaatcacaaaaccaatggaagcagcttcaataagaacaacatgaaggaacattaatcaaatatgctagatacactactgatatagctcagttcctatacacacaagagaaaaggctcagctacaaaactaattttcaatttcttaatccaaacagaaccaatattgtcaagaaaaagacccaaattgaaacgcatgcataatatttgtttaagagcaaaacgagtttcgatttcacggtgaagcagaaactgcaaatcaggcaaacggaatccattaaaaccgacgaggaaaggaagaagagaaacgtacaatctccagagacttcaagactgattaatttcagaagatctcaacgatagttacttctttcttggccatgaaaacctggagctttaaaacgacaatggttgatgctagggccgaagtaggggccttgggaagaacaagaactcgaaattcggaggaaccaaagttttattgtagggtttgagcgaagatcaaaaacatcaatgtatcaaacatttcacatttcaatcattgggccttcttgggcctatctttaaaaagcccgggtcgggtcggagtaataaacagtaaccggcttggttcacagggattggtgggtccatgacaaaattgtaacattgcaatcaggcagtattttggagagtttgaaaacgatattgaatgtgacagtgtcttatgacaagagatatctacaatggagttttatgtgagtctgatgttcacactcgaaaactttcacaagttgaagaatcatgtgattttgtatcttgatgtcaatgtttcccattcatggagcttttgtcgacaagttttgacatgtccctacaatatagcaacaacacttgtgtgacatagatattgaaagagagatagatatacccattcgcatttttataagattcctcttgtgataaatccaatgaaactatatgatgatttcaaaataatacaaaaatagaaattgatctcaatgtaccttccaaagaaaaatgacaacgtgtggggctaaaaattgctgtaccatcatatctgacaccttgattccattttttttttatacaccaaacaatgagtagagcataaaggcctttcgtattacaagcatttattacttaccatatttaaaataaaaaaacttaccatattattgtcgatctagtatatatatatatatagatcgatatttctacgtataaatagggcgatgttgtgtgacatgtctctcagtcaccacttttggcgggttctcgtcgacagagattgatcaaatctaattattattgttgatgatagaaagttgtcatgcatagatttctcaagcgagaatattcattaatataggattctcattttttaattcttcgctctgaagttgtaacctagtagcttgtactaggtacatgccatgttgtaacattggttagatatttgtaaattttagaggctttaaatgcaaaagattatattcggactactcgatcataaattttggtctagtaatctgcttgaacattgattttgcggagcaattcttgatgagaagcaattttatgattttatcccaaaactaatcgcgacatgatcattcggtgaatttgttgctaggagaaacaatggtctaagataaactgaaaaagggaagagaacaaatattagttaagattgatcaatgagaagtgaagtgagtcagtgtactttgcacaaacatcgatctttcgtctttgagtcatgagatggccagtttaggttagtccaaacattgcctcctcgtgagttcttgctgtatatatttgcaaggacaataattcctcttatttggcgttaatttatttattatgtctagagttcgtaaatgaattgaagaaaattatttactaaacaataaaggttttgctctccccgcagaatttttgcctatgacattaagaaaaaaaaagcgtgaaaatataaagataaacagtacaattttggattatattgttgaagtttactcatataatttgtatatgttgataatggagaaaacatataaatatttgcatgtccgtatataaccttatttcccttctatcaaatctaagaaaaaaaacaaatactttacgcgtaggcgctttttcatgtttaaagtttcgattaccatcaagatttgctttttgagtcattttaccttatactatatacgacaaaaactcgtaaattaccctcttattgtatttaattaattgaaatttctaattcacatttaagatattaatattttaatttattttatcaagattgtatattaataataaaatagaaattttcattgtcaacaataaatatgaattttatatcaaatatgttaaaaatttagttttaagtgatatataaccattttcaagaaaacaaatctataaaaaaaaaagtgtatgaattactgaaagttggtataacttaaaaccttcaaacgaacagacaaaaaactaagatgaccgttaataataagatacttttgtagatctgtatattatacaaacaaaataagtaaaaataagaattaaaattattttggtcttaagattcacagcaaagcacgatgcattgtgtaaatataatacattatacaaatacatggtggtacgtatataatataaatatttgtacatataaatacaagcatgatacaataatagtatcaaaacaaattaagacaacctagctaaatccacatgctcaatacatattctctcactctctttctcacaaaaacaaaaacaatgccaagagtcatgtggaaaaacttccatctttgcttcccatcaaatctcaccaagccctcttcatctccgtccggtgccacctccgacgatcccaaccgtccatccattcttctcatcaacaactttaacctcctatatgacgactcctccgccgcccaccgccgcctatccaagcctcttatccacgacgttgaaccctcttccaccttcaccgcctccacctccaccgcagctaactcttcttcctcctctgcctcttatgatgattccgataattacggttttgcccctgacgacgactctccccctcctgacttaaccgccgttttagcctcccgccgcttcttcttctcttctcctggctgctcaaactcaatcactgactcgccagatctccgctgccgggataattacgatactgccactaggcttcttaccggaggaaccgccgtgaaacactacgtgcaatctcctgatccgtacaacgacttccgacgatcaatgcaggagatgatcgacgccgttacaaacgccggagatcttcgccgttacgagttcttgcatgagctgttactcagttacctctctttaaatgccgccgatacacacaagttcattatcagagctttcgccgacattctcgtctctctcctatcggacggtcaccggatcagctgagctgacgtggcatatatatatttattctctcttcatgttatgtaaaaagtaacacatgttatttatttttgtaatgcgttacttaggacaaataatcagaactaaagttaatgtaattattttgtaatgatacgattgagaaagtcgagagaggcgtgggtttttgtctcgatcgcatgcagttagattcttcttttaatttgtttctatttttgtctttttacccttttaaattaaataaattaaatgttctggagtatatatggtgaaacttaaatcattgattgggaagttatagttcaatttaacatattgatgataaaaaatagacttaatttatactttccgaaatgcatctctagaagtatatattaagagacggaaacccatggcttcattataaacttaaaagtgaaaatttattttggtttaaatcattaaatacacgaacgaaacttatgagttgaagaaaatttgtaatgggtaaaagctgaattgtgataactaacaacattacaattttgctgattaattaccaacaaaataataattgtctaattggtatgatgtatgattgttaaaagtttgtcttttggagaaactaccaagaaaacgctcggattagtgccatgacaaacaatgaaaaagctacgtcgactgacaattggtactatttcttcttctttcgtaacgtctcaaattatgtttgacatgtatatcgaagattgactttcttctgcttttcttgatgttctcactttacatccatatcaaaacaaattatttaatcgaaaaactgtatatgataaaatttacatcgatttatatagttttattcagatattttagccaatgccatgatttcttttatacgttggggtttatgctatttggccaagattcatatagcgtattagttatctaaaacgcaagaagcgcattaaaatattgccaagttagggaatggtgcatgatagactaaatatattaacaataggtattcaaatttagctaatgttgagatctattgttgtaggtgattctttccatgagatatttcacataacacaaggtgagacaaaaacaaaataggagaatcctaagagacggatgttggccgaagcctcaaccaatattataacaaagctattttcatcattaatattatatataacattttgctcacatccctgattcatattcgcaggacacgaccaacaacaataaatagtgtatgaaatagggactgagacagttaatcatttactacactagagattagaaatctcaaggttttcagatagatattaaaacaggcctttgattgcttcttcactcaccatggcagcagcattctccggataagaatcaaggagagcttcaacattggggattaaaccgcctcatcgtctttgtccacggctacaatatcattgggggtaataaagcgttgaagctgcttgaaaaataaactgacacacagagatagagagagatagaggaacacggtcgccaaatcgtttcgatcgcaaatacaactctttcagtatcatagataattgtggccaaatatataacttttgggttctacgcaaagagttagatgaattttaaggaaacagtgagagataaagaacgagaaatttacgtaagagaaataataagcagagttggttggatgatctcgataatcgactaggggtttctaaatcacttattgaatacatacgccgatgtttcccgcccgcaaagaaatttatattattaggtggggctgagaatgggcttcgctttaatgcgcttagatttaaaggcctttgcagtttctatgaatcggccttctctgtgcaccaatcctactttttttgtttttttgttttttttggggggcataatcctacctttttaatttttaaataccagttatactgaaaatttggttattttatacccaaaataataatataactagatttattattgttgtcgattttattatttttttcataattcattgttgatttgttgggtaattatttaatttgtttttaagtttggttaaattataaatatatggattaagttgcaaatacatgttgttatgtagttgcaaatatgtgggataaatgataaagttttattatcgaattgctaatatttaaaagtatcaaaacttatttaaaaccatctcaatatatgatcttaacaactccatttaactactcacaatattaactttgtgttgattaaaaaatgtaagtaacctataaatagagaatataattttttaaacaaaagattaagattttaacaatggatattttgtacgtataatgtaaactttttattcttgttttcgatgaacaacgtttaccgattaaagaagtaaacacaaagtaaactattgaagatcgtacatgggttctccttaaaaattcttaaaaataactatctgaatgtcgagtttatcgttgctccttacgaggttaatgcacaacttgtatatttggcgaataataaagataaagacatttgtatgtggttctcattactgatacttacctcgtaccatttagatgtccaagagtaagttctctaatacacttatcaattattatttttaatagcttgaaaataaatttaatggtcaaaagatacctataatatatttttaactgaaaaataaagagaaatttatgaaatctgttagttttatgtttttaataagcaaaataaaatattttaataagcaaaataaaagatttatgttttaaattatctaaaaggtttttttttttttgtagtttaaaaagtagtacaaaaagtgttatgattcgtcattaatcattcccaagtactcttattcctcgataattgttcttcaatctcaaatttacataaacaattgaaagaaatttatggatttattaattatatagcgattcatattcaaatttaacaataattttggtatttatttctcgtaattgatactgcggtttcaatcctaatttatccaaactaaaaactctcttatttggtctttttgtacttctcttcctttttttttttttttttttaaattttctgtcaattgtacatttgttatgacatttgttggctaagtggcggacccacgttatgagtggtggcaagtgccccaattaacaaataaattaaacttaatggtagagataaaaagtttagtggcgtaatgttttggagtttgctaaaaagttctcaagaggagttcgacaccacgaggtaatacagtcccccactattttttttcctgggtacgaaggtaaaatgaaaagatcttatcatcttcaataacaatattcttacataatcatccttcataaaatgagattcaaaatgataaattggaataagaacttaagcaatcgataaagagacaaatacatgtgtgataaacataaagcagaagaagcataattgttttgttttctctatgcaagttcatactgaggagtatttgtggaagcttcacggtttttaagcctctgtctccgttgagctcttttctgtttgcgagtttgcgttttgctagcaagttttgaaataactggcgcaggaatgctctctgttgcttctgaacaaccaaatacaatgtcaagaacatcttcttccgccatttcgccatccgagtttccctgaatacaagacttgaaatcagatattgggaaccggttctcgtccaaactgatgcctaagcatttgcataggccttagaattaacaactaagagtagatagtactcacagagctattttggagcgtctgtttagtctttgaagcatcagatccaccggaaattcttcgatgagaagggtttggtaagccattggggtttctctgagatttggttgcattgacatcatcataagaagaggcaatttcagtgaaagtggttcgtctacgccaacgcatttgaggtttgtctccttcatcaccgtaaacagattcagggtagaaatgcttggacataagttgccatctccaagcttcacctctgttggacctgactaagctgtaggttggaaaaatgtccagccaaataaagaattaagaaaaatcaagcgaaggtgacaaatcaaataacacagcaagtctcaaaaagagtgagctctctcacagatgcttacacattcacaagctctttctgcattcgtgtagcatcttgactaaggatatgatcaagggatgaaactgcatatttggaacttgaccaattccaagcaacaacaaaagtcgaagcagcaactcctgcgtcgaggtgaaagaaaaaaaaaagacacaacatttttcagaaagtcgaaacgaatgatcatatacaaagatatgcaaatagttaccagctgcaagagcaaccctctcaagtcctttcggctttttcaacttctttgtcactagaagaatacaccacagaaaaggaatcaaaagctatctatctatctccattacaaatttgggttacacaaaagaaaaaaagactaaattttctgaaccaagaagaagagtcaatggaggaattacgacgaaccttgccaagttaaacctccccctacaccagacgcaaaaccagctgtccacaaagctttgaaatggcaagagacaatagctctagactcttcaggcgtgatcttctcctataacagagcaaacaaatttaacattttgcccaaatttgcacaccttaattcatacaacaattacacacattctcaacttattcgaacaatatcaattcagaggaaaactaattgaacaaagaaacaatcttgctgaagtttgaaacctgtatcatacatagattgggtaaaacttgattgtagaaaaagagttgatttttctggaattgtctagggtttaattgaaaagataaaagagtatctacctgctcgggttttgaggctaggacaacaaaaagctgatttaaagcggccatagccatcgtgttcttaaatattctcagttcccagaaacgaatcgaagaacaagtgtgtgattacttcttctttctcatggaaacttatagtccttctctctcctcactccatcgaatcgaatcgatcatggggaagaaccggttcgaatctgacttaattcgacattataaccggagagggcgaaaaaccaatgtggaaaaatataaaccgaactaaaattgaaatcgatacgacgatactaatcataaccggtgttaatgtaaccaaatcaagccaaaatgaaaaccaactcgaaattttattaaatcaaaccgaactgagttacacctatcttttttgggttacaaaaggccgttggtttaccaaaacgaaagcgtttgggcttctcacagtgaaccaagcaaatgacaatgaaacaggaacttacaactagtacatccgagagtgcctacccttgtacaactagacaacgaatcgaagaaccaagtgtgtgtgttcttactacattgagtcattgagtactactacaactagacagtaacaataacaagtacttgttcataactatacctaaaacaagacaagatgtcaatgctcttaatacgaaggaaccacataggggaatattttttttttctcataagtttctaagttggtgtcattgcgctagcctttgactctgcttctctatacaatcgtcgtgaggatgaaaacatccaataacgctcccgattcacattctttgctactcggaacaccaagtgttccatgatatcgattgttagtgacaacaaacttgaactatcatccatcaccgagctttggctgtactcaagaacccatgtgtttggatctagctgcagaaccgatgtgctccatttggttttcccccaggaagtgttggtctcgtgtattgagtaaccgaatttcccctctgtccacttcaatgagaataaccaaacataagaatcatataaacacaactttgtcaacaaagcaagaactatgaaatgtactcatactcaaagttctctggataagccaatcttttgccatacaattcctatgtcaagctatagatttacacaaacagatactaaacaagcagatctttgacttttgaatccactatattaaaactgtaaggcagtggaagaataaatttagattggttacctcagttactcggcctgataacacggtgatcgaactcgaggagaagccggtatggaacaatccagatgtctgcaaaggccatccccatatactcacctcttcaatggcagatttgtacagaacacactttgagttcaacattggtccatcctagaaacgtaatcttcgaatcagtcaaagaaaaatagaaactttgtgaaaatttaagctaataataagttaataactacctgattgattttccatttagaatcagaacctgtgcatctcgaaaactttctactcgtaacaaaacccttaaattcatcttccaagagtctcagcttcacccccaaatcaagatcagcctgagttctctcataagcgttcctcacaatctcctctgtaaattcaggtttaaaaacctcttcaagcacccaactaaaccctaattccaaacccagaaccaacccaatcaccaaaatcactttcagaaaaacaacaatcagtagtcttctctctttcttcgtcgttttcctctgttcttcattctcgaaaacttttgatttcttggtcagtttcttcttcggggaagagatcatcaacttcaagattgggcgagaaacagaagcaggggtggtgaccaccgttggatcaaacgaagtcggagtagattcaacggtggatttgaaattggatgcagaagaaagcttagtgagagagcttttttgaacactgagaggcatgagatcaagcgtagcgttgagactatcaagacaaatctcgcagctacaattcgcatctttacgacagtctgggaagtaacaattactgtctcttctctcccaatcttccgtagatacagttgtagtagtcgtcgttgttgttgttgtgctcgatgtcattgatttctccgacggtgaaactaaaatctttcctttcatggtttctctgtttatcatctgattttcgttggccctagatttcatcaatctctaatttcattttgtatttttatcgttttgaaatttaaatgtcaagtcccaacggtcctctgatctcggcagtttttgtgttatgtaaatgactaacatacccttacttaacacgtgtctttctctttccttttaatgggccggattctagtttgggtccagttataatttcctttgtgtttcgaattaggtttaaattttactttattagaattaagcccaataacgagttttgttgccaaattttcttacttgctatatatgtcgtcaacatgcatactatataatctcataacaaagtttttttttttttttttctaaattgtaaatatcatataaatgaaaaaacaggttttacaaattttgataacctaaaccatttgaactctttggcaaaaagaaataaaaaacaaagagtcaatcgaaaactgggaaaaaacttggaagtttcatcacagtcacaacgccattaacttgcgaaaagggcgtctgtttcttcttgagatgataacgttttttatttcgcggtcgatgcacttgaaaatagaaggcggagagagtgaagtagcgttatgcaggacattgtttcgctgcttccagatgtggaagaccgtagactgaacgacgatgtttctaagaaccgatggagcggttgtttttttatgatgtgactctccatttttatgatgtgattacaaaaaatcaagtacagatactacttcttttgttatttcttggaaagctatgtgacgctgaaatcttcaaatcttttatttaaacccaattttacatgttaacatacatacacacctttgacaaaaaaaaaaaaaaaaaaaaaacaacgtacatacatacattcacaattcacaactccagtcagcacatttaatgtttatgcaaaatccacatctatagaattgttttctctaacgacattgttttaaggaaacgtcacgcgttattaatgattccttgcgacttagcttgtccataaacacatcacgagttccttctatatttgtgacaatgactattgactaatattatcaatttatatccatggatctagctactacttgataggtaataccataacaagaaataatcattggttaaaagccaacccagtgaatatcaacaaactccaactccaaatgataatagtttcatgtgaattgttttctagttaaggtaatctctcaaatcaatgtaattggcacggttttttcggaatttatattggaaaatgaagtctcaaggtataagattagtatatcctaactcgatttaattttattaaattttgggatactttgaattgacataaaactttgtttgcctaataaaacaaatcccaaatgatttttcttctcgcttcatactaagttttctttttttgaggtctcattctcatcctaactcctaagctaagtaagtagcctaactttatgaattgttgtatatcaacttgaaaaattaactaaagttttgttggaaacacctaccaacataaatgcttgaacgtggcatcttgattatagttcaacgaattagtattgctacttgctaaagttcttcagatattactttctttgtccaaggattacgaaactaaattctggtgacacgttatcccgttaactttaatcacgttatggtttaatcgtttattttcgtcacgccacagtttatctgatacaaaaatagatactacataaaatagatactacttttcacgattattatttctttcttttgctacatatatatgacaccatttttcctgtcaattataaatcctattaatttcataactacatcttgttccataattttatgttttgagtgtttttgcttaaccaaactcatttaaattatatccaaaaaaagaatcaaattcaaaaactagctttctttggtaaaagttagttaaggtagttgagtaccaaaagtcaaagtcaaagccaaattcgagaaattaccttaatatccttttccactatatatcatgcacacatatatacaacaagacatatcaccataactatttcatttacacagaacccaaaccaagacaatatttgatcaatttatcaaattctctcaacccctagtctaaacacaaaaatgaactccaatagtttcttaatctcagcagccttaatcttctctctactatcatcaaattctccaacatcgattcttgctcaaatcaatacaccatgttcaccatctatgctctctagcgttacaggttgcacgagttttctaacgggaggtggtagttttccgacctcagattgttgtggggctcttaaatcgttaaccggaaccggtatggactgtttgtgtctgatagtaaccgcaggtgttccaatcagtattcctataaaccgaactttagccatctctctccctcgtgcatgtggcattcctggtgtccccgttcaatgcaaaggtatctatctaacttctatattattattctgttttttaaaatataatttgagtcctactttgtttttttcgttagatatctatatatcgacattaatggacatttttttctagtttttcaattgaattttctttatttcgtatctcattaaaatatttgtgaaactttgcagcttctgcagcacctctccctactccaggtacttatgtttttgataattttattgatagactctttacaattatacttaagcttgttactttttattgttaccaacaaaagctaatgtatagttcataactcacaggtcctgcgtctttcggtccgaccacttctcctacagattcgcaaacttctgatcctgaaggtactcgcgaactttttactgcaacttctagttctaactccaaaacattttgttcagaatttgtttctaaaagattttcgggtttgttgacgtcacataactcgcagggtctgcttctttccgtccgcccacttctccgacaacttcgcaaactcctaatggtaaaccatataaattcctaagaatgtattttagtaacataatttgttactaatattttcgagtttattgacaagtagacaaggatctcagcggatcgggcaacggaggagatccaatggggtttgctccacctccaccctcgtcgtcgccttcctcttcgcactctctcaagctttcgtatcttctatttgctttcgcctttacgattatcaaattcatctaattaaagagcaataccatactataaaagacgttctttacgttcatattttacctgattcttgttaaaataatgttttagagttttgttgtatttgatagccctattaataaaacagtttccttaattttatacacaccaaatcatgcatttaaaaacgagactctgcaaaaaccaaaggttgagagatagaaagaaaatatgaacaaatccaaaatagccttttgtccatccacctacaattaacccttattactctactttttttttaatttacttccacccatcagaccactcatcttcttccttggctacaaaatcacctctggtttcaaacttaccaccattcttgatctcttcaccactgccgccgtctttccaaccatcacaacattcttctttttcattttttccgccattgttgttccacccatcagacctgacatctttctcctttgtgccaccattcttgacctcgccactatcgttccactcggcttcttgagggtcttggggagcgttgctgcttccttcttgattgatcccgtttgtgccgccattgttgtcccacccatcagaccattcatctttcttctttgtcccaccaccattgctgttccatccatcagaccattcatttttttcctttgtgccgccattgttgttccacccatcagaccattcaccattctcattcgcaccaccattgttgagctctccactgttgttccactcagcttctggagggtattgaggcccattgctgcttccttcttgcttgaatggttcctccacaaactcctcctgctctggtaaaccgcatccttggtaagcattgttatccacacatcgccacaaaagcttgttccagttcatgtcctgtttcatataatacgttttattagttgagagattgggaatgatgtcaacgcattatgtctttatccagaacaactaagtaagtggtaccttgcatatgatatgtgggtttccgatgatcactagcagagagattgcacgggttatggcgacattaaacctccttggattgctcaggaagcccagacaataggctctatcgaactcgttgtgtttgatagtagatcttacagttgaaatgatgatgacctgtttctcttgaccttggaattgctctacactaccaactttgacttcagtcatatctaacctgtcaagaacctccttgatcttcattacttgctgcctgtaaggagttataactccgatatcctcttcttgcacacagtcattcgctgttaatctcttgattgtctctataactttgctgatctctatacggttgaaccaggacggattgttaccttccctctcatcgcatccttggatcccatagaaaaccatcggaaattctttgtttggaaggaagtttaacgaggcaagaacagagtctgtgtcttctttggaagctaccagttctccatcatagaagagctttgacgggagatcaagaatctctgggtggcatctgtagttcttgactagctttgttacataattctcatccccttcgcagtaataatcacactcaaacaatctttccaagtatgacttccccaagccgagtgactcagcatctcttgagtatataaccggacccaattgccttggatctccagcaagcacaaccacagtttctgtcaagcagagatttgatacagcaatcatgttttcaggctctgaagcttgaccagcctcatctaagagaatatgagtgaagtgaccacggtttacaccttccgcgttaagaagcgatgcactcatatatgttgacacaacgagtttgtaacgagtcaaagctttgagaggggggcacttgaaaattaactcatcaaagaagcaaaagcggataatctcaggcttaatttcttcatatgaacgagtagctgcattcagcctgaaaatctcattgtccttgatgcgaactccctctaaacaaaggagtttctctaaaatgtgatcagctgcactattggagggagcacagacaagaacccgagcatttctctgtgttgtataaagttgaactatagcctccaccaatgtcatggttttcccagtaccaggaggtccatggattacatatggtggtgctcctttgcagccaagaaccatttcaatggaacaaatctgctctgcattaagagctggtgaaatgggcacaaagggttttgtctttatcatccttttcccagagtgcaaggatgggaaaaggaagtttggatccaacatttctgccgcatcaacagcctgatacaaccttctagtgttgattcgattgtatgtgaacctcacattatagacactcccagctgtgtggcgttggtggaactcagaggcaaacttcatatgtacttcatccgcctctacgcggtgtacaaagccctgtgagaaattgatttcaattttgtatcctctaaaagataaatgattaaacatatttgcagttgtgaagcagaaagtgatctgaaagtatgagaaagtaaagcgagaacaaaacctgataagcgtggtcagttccatcatcatatgcatgtctaacaaagatgaagtctccatggacaagggaaggtcttctctcagcaaggccaggaacttcgagggacaaatagataccccttctcttcattgaaacattctccatatcataagctcgcatgtcttcctaaacaaccaaaaaattacaagaaacatgattcatggtacaagaggtttattgagttattaacaaaaatctgaaacaatgaggatacctcgagttgtaattcttccataatcagtaaagttttatagtagttagcatagttccttgctgtaagaccttcgttcaaatcatcagggaattccttattctcgatcatctctctaatctcctttggaatttcatacagaggaagcctatttctaaaactacgttcaaccacctttgaagggcgtgatcccttcacataatcatccacagcaaaatctttcttcggagcccttctacttctagagtaaggcctgttagaagtcagagaactcgaaatcttatcctcagccaaaaggaaaacaacccgctcaaccctatcacttccccagtcaacagtaacaacagtggtatgtaaaccaatgtccttaggcttacaagacacccaaatggtcaaagtgtcaccaggctcaagcatcctatcttccagagtaaaagtttcataaaaacactgtctctctttcaagtctgaatctttcgaaggcggtttcaatatcgagagagtaaaagaatcctcagggttagatgcgtaaatcttagtccagagatcaacaggctcatccatagtgttcttgacagtgaaggaatcaaaagaagtctctccaacagttacagattgaggcttctctttcttaaatgggaaaggaacagaaacaacaactggaccttcatcaaatggattgtagcaaccagaagatccatcattctgatagtctataaatccaatctctcccttgtctgcgattacagaatattcgtcatccgatttgtatccactcacactcattgctgatgatgatgacaatctgtaacataaacacaacacatatcgattataaacaaattacacattttgaaccacacgcatgtaatgatcacaacatgacgctaagaggattgtattggaattcgagtagcgagaactagactcagagcataacaaaaacccaaaaccctaacacagaaaacgaaattgagcatgagattaactgaaattgagagaattgatcatacgtactgaatcagtagcaaaatgggttacactctttgattcgatcacaccaagaaatggagaagcaatgaagccagactaacgcaggcaggcttcaaaggagaagaaacatgaaaagagtgagtgaagactgaagagtcgtagaaaaattaaaattgctgaaattgggaattaattcgctcaagtaaagcacgtgcatcaaacatttgggccttttgggttttgtatatgttatgggcctaagaggtatatgttaagcccaatcgttgttaattacaacggtaattctaagaattgacctttggagccgtaataattataattggactgatgcatatttaatcaaataaataagatcatacatgatacatgttaatccacatcgaaattctagaaataattattgtgatctataatcatgaagttataaatcaactgatttattttagatgattggatttggcgtttaggtataattgaaaatacagcgtcttaatgaaggttcattgatgatgaaatatttttattttatggatatttaaagttttacatgatgatgttacaaatatgtgtttatatcctatatgtatttagtattattgtgtttcttgaaaagctcacggccttgtagatgttgttacaccactaatagtcaccatgtggcgatttaattgtggtattccttgtttggttaattcggcatgtccgaatcaagaactttttaatttagcaaattaaatttcgtggtaagacctagacaaaaaaagatagaaattggtactaattgctaactagttgggtaacaagaggaatcttaatagaattgtagattttgtttgtgaatttcctttctgattgaagtgacaatatgttagccctccttgagtgtcttttcatagcccgtggcttttgtttcttgtaatatatatatagaaaaactaaaagacctaaacacacaataaattagataaatgttgtatagttcaacaaaaaaatgtgtggaattggttaaaattgaataaaagaggcatgctgtttctgttagtctgatagcattagcctatcctttcccactctcaaaagcctataccaaccagtcaaatctatgttctttatccgagctttcttttcttttttctattacaatatgttttgacattttttatacaaaagaaacactatatatccttataaagataaaatcataattttacttttacattgactcgtatacatcatagatcactagtcttctgttgtgtatgattttattagtcgtacatgtatttggttatactggttatgacaaagttgttttggctaaactagttatgataccttgtatccacaaatgcttagttatattttggtacgccctattgcatatcctaaatgagattcaaaagttcaaaactattgggatatgtaaccactaaaactaccaaaaacttgtaaattcatgtgttttaacatcaaaagagcagagaaacgtacattaagcaagtatactattattcggatgactcataagtgactgatatattgatcattgaatatatagtagtgaaacccatctacttttttcttaactgatggattttattctcatattttccaagttaaatcatatgaaaaataaaaaaaggaacatgttttaaaacgagattattataacaagctggttaaatacacttgaataatccacgtcacttttgcttctattgtaacaaaagcttctctttttatgtggtaaaatgtttttttaaataggaaggaattatcttggaaaaaaacacaactgatcattgtctgtgtaattaatcatatggctccgaattttacaagaatcttcgtttgtttattacaattaacaaagcgttgttgtgaatgtgatcaacaaaaagctgaaagaagaagacaaagcatgaggaaacagataaaagacaaagcatgatttacacaaaacactctcttcactttcaggctctctttttttagtttttaatcattcccttctacgtttactggtccagtctctgtctctttcatatactattattttttaatacaaaagctacatacacaaatcgaaatcttggtttttgaaaaagttcttaacgaaattttgtattccctttgaatctttgaatttgttggaaaataaaattgttgaaaactacatgtcacctaagtgaatctttgatatgtagtttttgttaacaaaatgattaagtaatagtaaaatacaaattttaaattaaaagtaaaattaaacattgaatttgtatagtcaaaaagaacaaaagatatgaagttagctgcctttgaggttgtcaagcaacccaaacttttttcagtccaacgataattacaatgcggtatcagttcacttttcctttttggaaattttcataaataaagtgcaaatttgaatatttctttttgtatattttcagatattctttacgtaaaaccttatataataagcattacaatatatgattatctaggggacacagtactaaataagaacgaaaagaaaacgatatttccctaatgctaagttaaatcaaaagaatgagaattaaacaaaaaaaaaaatcaaagaacttccatctatccacttggcagtttctgaatgggttagttgattcctgttaacacaaaaaagtgttttacattacacaaatagtgaaaaagattggtaattaatttctaagcaacaattaaattcaataattaactgaaattattaccttataacgtcgctgtaaaagtaacatccactagagttagcaaaaaccatgctatgaaccggatatgcctcagaaccgccggtatgtgaaaattggttaaccgaggccaaaattataattcacaacaaaacacattcaacgcctgcaaaccggaaattaaacggtacgattagttaaaaaccgaaccggaaacagaaaatgttattaaagaaaaagctttttttgaccaacctgttccctttgagttaaagtggctatggaatgtctcaatcactctcaaagaaccaaaaaacttttgttcacctgacaaaagccaatccatttctaccatgagtgaaaacatttctcaagaccgcacaaagttaagaaccaataagtttgaaatattatgatttattgccgatgcattgcagagtttaaagcagtaagacaaacaaacaaaaagagacaaagatttgataatatgcagtagacaatcttatcaagcttcaatattggattccttatcctaatccggatgcaagatcaactggggtcctttttatttccggggaaatcaaaatcagttgggtgatcttaaatgatctaagagaaggagttgcctcatttcttggttgagattacatctttgcacataaatgcagaatttgtagactggtctccctatatagacttgatctatttgaatctcacgaggaccacagatacttatggacttctttggttttggaccagctcaagtcactgacacagtgactcaacatttttatctacttatgtcctaatctgtcggtttggtgactattaatctaactgtttctggcattttatcacaagtttaaacctaagatgtaaaagaaaagagaaatgaagaaaaagttaccgtaaaaagcagaaaaaatgggaatttgtgtgtttctagaagaagctgagctcggtgtatccacgggagtaaggtaagagctcttcagcttggacccgtgaagcggagtaactcgttgttcgctttatcctattatgagctgactcaacctctgcacagaaaatgccgtagaccggtctatgatcagagaaccgtgactctcctcttacataagataactgatgcagtccttcaccaaaccacaatatcctatcacacctatttttagaaaaccaaatgtcagatgaaagattcatatagcagcagaagttcttgttttcttgctgttaaaataaggaaacttaccaagcaggagtgcgacgtttctccttgggatgcaaatcatctccagagtatctatctgagttcctcgagtacttgtacgttggtgggaaataaatctttccttcattccatcccttaaacacatggcctcgtttttgctcaattcttaactgcaagcaaacatattccgcataagaacttcttgcgccatttcttcacaccattaggatctaagtatatctacaaactaacctggtcattttcaagtaaagctctccaattctgcatctcaacaagcgctttggcagatcgataagacagtgctatacggtagtttagatcgccaagccatattacccggctggtaaaaataaatgatgaattagatcaaaaaacttgtaaaaaaccaacataactgtttcttgaagtccaatttcaaagtatgaggagtaagtttcatcaatcttactcatgctgaaggatgttctcaggggacttttcttcctctgaactcttaacgcgcggaaacctcgttttcttcagtatctccatgacatcagagtttctctttagctcatcgccttctttttgtcccgaagtcaagtgcgtacaaacgaagcaaaagcttgtttgatggagcaacatgcttattgagattgatccctacaaataacaatagaggcaaaagcattataataacaaagtggctctaactcataggacagaacattatataatgaagaacaaagtctaaccttatttccaagataacccatcagtcccctgccaacacaagatactttcatgttcttgacgtgttctcttagctcacttttcacccaaatggttaagaagacacccaccatttgtttgctagcaactaaacaatactgcgaagagttccatgggatcctatatccattctcgtttgctgcagaacctggtgagtacaagacagtgcttggagaatccccaagaccattatcatcatctgaagaccttgagaagtcacttggccgtgaataatcactcggtctagagtagtaatcacttggtctagagtagtcactcggtcttgaatcactgggtcttctggaataatcactaggccttctggaatagtcactaggccttctagaataatcactaggccttctagagtaatcactaggcctatgactgctgctgctaccacggaaactcgggtcgaaatcacttggcctgtggctgaagaagacacggtcacagacgctgaaacgacggtcaagacctggctgaggaatagaaggatcattccatgtactactcggggtctgaaaagaccgtctgtggaagaaagtagagttcttttgccttgtagatccagagaaatcagcatcaagctctgccataggcacagggataggggaaggcgtgtgataaccgctggttccgctagttcctggtcggttattaagcgtttttcggataagagagagccatttctgagcaggtccattgtcttcagctccaaggacatttccagcattaagaggaacaatctcttggaatctgaacttgaccaaatagcaaagattgagggaatgaaagaactcaaagaaactcattaaaaatgtcaagtgttttgaaacatacatacccgagtacatagatatcagcaggagctgatgaatgaagccactcatcaaggtttaagtctgaaggaggagagcgtccagctacgttccatgtagccacaaagatgctgctcaaagtaatcaacactagatttcagtaaaaacaaagtttacaagaaacatatgtgtatgtgtgtgtatatagacatacctgtagttttggacatcaatgatcctaggattctcataattcattctcctttgccgagcttgctgctcccagttcttactgagtttctctgtgacaccccagtgaaatcatcagtaccataaaagaaagattcatctggttttacatgaaacaagtcacaatatgtatgagtctttttaccagttttggtattcttgattgtggaaggtgctttctcagctgaaaagctacttctatgctctacttcaattcctttaatcagtttaacaaatcaacatcagaactaaattgaattaagattatctcagaagagacaaaacataacgcttgaggataaaaacaagaacaagtaaacaaaaatcagttaaaagaaagaaagaaagagagagagagaaattaccagcagaagaaggatcatctgcttgaaactcctctgttttgcttttgatattgaaccatttccttaccatcttcttggaccatgccagcttcatttcagaaattcatagaataaaaaaaagagttcagcttttaaattccatgaagatgggcaaaaataaagttaatagatttcgagaataaagaaaccttattagtcttggatttctcttctctcattgttgcttcttctctgcaagtgtatgtgtagctcttttctttttctttctccaacagaaagaaactcaatccatcaaaaacaaaggaaattgactggaattggggggctttgtccctctggacgagacagaaacttaaaggaaagcaagtaagaatatagaatcagggtttctccctaagagataggtttgagattctaagactctctttggacaaagcaatgtgagggctttctttcttttttgttcttgagagaaggtttaatggcagagacagaaaaaaaggaaatgtagcaaagagagagagacttaaaataagagaaagtgttgaagagacatcaattcttgaaagtagacagaggcgagacaatgagggcagattttagagtgagaaagttaaagttaacaaattctacagagagaaagaaagaaagaaagggagagagaggagcttcaatgaaacgggcaaagtaaaagcagcgtattttgaacaaaaataaagttgcagagactagtgagtgttttagtcctgttctttgctctacctttttatttttaagttttggctaagttcgtttttttgtttgtttgtaattagtactatgttttgtttttggaaactttttattcatctaatttaataccacgatttgacagacccatttgattagatttccaatacgaatatttaatgttgacaacgtctgtctaattcaaatctttaattctctttttttttttttttggcaaatatcatttttttcttgaattttgccatcgccaataacattttatctatacacttttttcaacacagttgatctatattcttaagaaaatgcaaaaatcagtatgtacgtctcgattcataaataaatcgtagaaacgttttgccaaaaaaaaagaaaaataaataagattgataaaaaacgagttttaatattactgacaaaaaattgtagaatgacataatatttaatttagttgtgattaatattgtataattatagaattctgcgacaatctatgattgatagaaacatgcctgttggttttgtcaactctagtaagaacttatcatcacttcttgtaataataaaagtaaaagtcgataatttttttttttgtatcataatcatttagctaataagatgtgtcatatgtcaaatacatttttaatcgaatgaaatatcatgttaatttaaataataaaaattgaaactttacaaattaattgagacataatcgttggtgcaatttatatttacaagtggatcagaatgaaccaaaagtaatagaagcaagagagatttttttttgcatgcgaaatatgtatatgatgttgactgattaagcaccaaaaaaagcttatactaattctgggatacaaattgccacaaacctatacgctcgaatatgtaaattgtaacacttaacaaagttaacataataagcaaatggttaattaagcttaaaaagagagtattgccaattcatcagttaggtagttgtgtttatcatctatctgtactcttttttttcttgttgcaagaacatttttgcctaaactagtttgattctttcatctagttttcgtaaactaacttattcggtgtccatttctatttctttctgaaattgaactgatataaattaagtccattcatctatttgtagatctttttttttcttaccacatgatgataatatttttttgtattacattttctctccaagatttgggtctatcaaacaaagtaaataaagcaaaagaataatactataaaaagttaaaaagagagagaggtatagaggaaaaagagaaagagataaagaaagctatgtcatatagtttgccatatcatctttccttttcaatttttttttttttcgccagttaactttttatttgttcccaaattttatctttatttaaatattgagtttcttgatttcctaaaaatttagatgatttatttaagggtgaacgacctgtgtgtccctcggaagtttcatataacactagacttacaccgaattccaacctcgatcttggtcaacacaaatgaaaagttctactcctatttctccctaatttgaaagttcgaaatctcaaaacacataaaatcaaaattcaaacctaaaacacacataaacatggtttataatcggtttattgttacccagacatcgttaaccacattaggactaaacgaaaccggatttaacctgagtagacccgatttaagatcgaaaatccccaaatttcagaatcaaagaacactagaatttgagagaacccagaaatttaatcaattgattgttgagggagaaattcatgatgatgaagacggatcatatcagccacattgcaaatcatctcagccacaaccacacgataaatcagatagttattagagccttctcaatgcattatttctccgaacaaactttctcaagacactttcagtcaaggataaataagattagaagatacaatggatttatttttggttttgctttttaagattatgattaagtcggctttgttgttttgttttataacttgatttactcaagctctgcgatttttgtctctgttttacattgctttttgatctctgcaactaatgaaatgttaatggcacaaaaaccgtgtcataagctacaaaatgataacgattcaccaaaatgagacaacaatgagattccaaatcgttgggtttgtctcctctacgaacgatgtcatggtttcccctcaggacttgctttatttccagaaaaatttatttaaaaagaagagcaaaatagagtttcagtcaaagactaaaatttgagattgacttaattccaaattcatatatccgcaatgctctttcaaataatgtgttcacaaatgatgtttttccaaaaacaatggaggaaaattcttcagtttcttctatggacaacgatacggagaatttcaattccattatcgatacttctcgtccttagattctattgtcgagccgccgcaaatacatcgtctttcctcccttctcttcctttaagcttcgaaactccaggaatggagatgtatatgttggttttgtgatcgggaggtgatggcggagaaggagacgggtcaaatggggtagaaggagatgggtcaggtttttaatttggtttaggattggtttaagtggtttaatatcggtttatgttataaaccaattaatcaaacgtttatgtgttttgaggttttgaactttcaaattagggagaaataggactagaactttctatttgtgtagaccaagatcgaggttggaattctgtgtagttctaatggtatatgaaactttcgagggggacacaagtcgtttaccctttatttaatggattttagagttattctttccttgtagcacaaatgttgaacacaaggtactgttctaaagtccactcgccattgatatcaggagtttgtgctcctttttctgtatttttcttgagactcccaatttcgcatcttttaagtttcattttacttgaatgtctaatgaacaactccgtatatagaaatatttttgcaacaactttttgtacatactactaattaagtcactatctattagctagggttaagtataaagcaatgtaaggtagatgaagatctcgcaattaagctttcggtcgattcgtagacacattttgaaccaaattaaaaaagagtctccagtttgaacattcacagtttcacactgtgctatcaaactatattgatatgatatgatccaatcaataaattaagaatagaactccattgttgattgctgaaatcccacaaaccttgttatatgtatataaaactatatatacctaacttaactaaaagaaatacggaaaataattaagaaattgataatggcctgacggcggagaattccatgctggggcagccatatgattcaaactatcaatatattatccatattgtaaattttaaatcaatttctaaaataaaatatacagaagtttatcaactaaaatgatccaaaatacttaaatatacagacatttagctccaccatacattcaacactcatgaatgctaatcatgattagcatatcaacaccattaattcgttttgctaattgcttttgccccatcaagatacgtcctcatttgtttacacacaatgggaaacgcaataacgaacatatgtgaacaataacaattatatttcgatacatacgttttcgacgattgatgattttacacttaaaatacaaaataatgtgtgtgtagtcattgtttgagtattcttaaacacgtttaagaaaacatcaaaggggtcatgttattcgattagtactttcttgatgtttaattatcaacacatgcgatatatattgacatttgacaaacacaattatttgcgtcaagactggtgatgatcaagaagcgactggctagtaaacagaggaagaaacgatatatataacttttatttgtggcgtcagactcacctattttttcattttacgatagaaattcgctttattttttgagtaacctatctattatatgagtggcctttcattttattggtatctaatcaacaagaatagtttcgttaacttgtctccacgaactcgtagatggtgtatactttcacattaggcgaactctaagcaacgcatttttttcaattttaacaagatgtaatacatttctcaaatatggttgctcgtcgaaataaagaaggggaaaaaatgcaaaacaatgtgagccaaaattttcgaaagaagaaatattcgagggcatgcaacacatattagtaaagtccacctattagggaaaaagaagagtcgacctattagtttccatatcctgaaattcaggattcaaacatcaaactattcaaagaatcgtaatctttgtgttaccaataaattacaaatcaattaggataatagaatcattagcgaatacttttattttttgtattttctatgtgccaaattgtttaatgggcgcaagagacatgaccaagtggtgtcaaatggatgcgcatttataatgttagtctatatttgtcatctccaatagaaaaggatattccttaatttggaaaatgtttctttcactgttgagctcaatctttgaacattcaagagtttcgttttactcgataaaactgatactaatccaaacaaagtaaaagattatatcattgaaagggttgtctttattaagtatgtagtaaaattattttcatcagggactctcatgaattatgtttttgaattaaacacatttcactgtaaggttttgacggaactagatatatatttctgtacaattttaagaatcctagatgtaatcattataagtggagaacctaatatacgttatagaaaatatccttatgagataatgtacatgtgtaaaataattctacatgtatagtacatatcatgtgtgatgtgtcgtaatcactttggttttcccatagcaactctttactttaacggtttaacctatagtttgatggtacgtatgaactcttaatcatgatgccacagccattttcccaatatgaatccatagttttatgataatcatgaaacgacatacattgaaactgtagtaagaggcttttttgattcatactcaattgttaacaggaccaagggacaaaagtacatttgcatggtttagtttcaaatggttattacatctaatcaccaaaggtttaagttcactaaaaaaacaggaggaagattttgcttttacttttacttttaagtacaaaatctcatctctcaaatttcaagatttacgaggcagtcagagcaaagattcacctaaagtttatttttatatgtagattaagattacatcatatatagacttagaggtattaaatcataagcatctgtttttttttttttttctcttttgcttttattgtggggaggcccactctttctttctttatgtttgctcgtaggctatgtaatgcccgtttgtatttagagtcgggtcatatctcatatagcattttcaggaaaaagggaataaaataaagctttcaaagatggattatggataatataatttattttagatattgtttactaattatatatcgttctaatctcatgattataatttataaaggttaaattttcaatatttcgtgtacaaaacaaatcaaataatattattctttcgtgtaatcaattgatcatattttttggattgtcgtaatttgctttaattttggtgattcttacgaaacctagaaatctctaattcttcatatggaacctagaagagaagatgtgacttagaccatgtacataggtgatatatttagagtatcaaaagtcacaaaataatttttaatagatcaaacaatagatttaggcctgatactgtatcagtgcagtgattcttttgatacccagtatcggatgacgtgaaggctcatgattcgtctgtgaaattcgtttttttctagaaattttttttttttttctctccgatagtctttctactgttttagctatgtagctacattttccgcaagtgagtaattttaccggcttttcgtgattatgcgacataattttacagtaattttgtaatcctatatttttataaatttattttttgattttgcaaatattttttttcttaatgataccaatatcggtatcaccactggaaacaatttattaccagtatcataaaaaattttaaataataaataaacattaaaattaatattaaaaaattgttaatgatactcatagtgtatcaactatgtgcatgctcttagcttatatactaacagacacaaaagcataaaaggcttaaacgaacacataaagacaaagcccacaaaggcccaattaactcattcgagtcgtatcacacctttagatccagttaacaagtctcttatacaagcaactcggcttgaaaagtgatcatcgtattgcaagcgttgttgttgatgttgttcttgaatgatgatcagaagctcgttggtcgctattatcaaagcatgttcttctacaagccggttcgttcaaccagtccggctcgatcaattgggttcaggtttaaatagtctctgagcttacagaatctctttccatctgtgtttctcaaagctgtgagcacttagaattcgcacttacatctacatgattggctcctaccaattccattcacagatgttattaccttgtctcagttagtttgacaacagagacatctaagctcttgtctggtggctcttacatgttttaacatgaaacattttgctagataagttaagagttcatagtagacaaaagtaaacccaaacaaaagtcaaggttttttctgagaaagaagataccctaaaggatcacacaaaagcaaaacacaagtcttggaaagatgaaatggcatatgagatatatagggaagaagagatgaagccaagagtttggtgatgagtcatggcataagtatgctgaaaccttcaactaaatctgcttcctttggttgcacgataagattgtcaaacatatccccaagcttcgaatgctccaccatagtgtccaacactttatcctctgtcacagcttcagcaatcttttcctttcctttgtcatgtctggaagaacatgcaaacacaagctctgagattctatccttttgtgcttgcttacagtactttggtccctcaggagtcccttttgcaaccaagtggtatgtgtaaacaatccgcttctgcccgattctgtaagcacggcttatagcttgtctttcgactgcaggattccacacaacatccaaaagaatcacccttgatgctcctaccagactgatcccttcagagcaggcttttgttgaagctaagaacactttggccttggattttggatcattgaattcgttgattaatgtttgtctttgtttctgctcgagtttgccgtgcatgtacaacacttcctcccctggattccacttgaaacgagagaccagatgtttcattatcagtttcaatgggtctatgtattggctaaagaccaacactttctcctttatcacctcgcataactcgacaaactccatgaggaatcttgttttcacgctttgatttggatcgagtcttaccttcttaagctgtgcaagcagagcctcgtcgatggacaaacgttccttctcagaaattttgcagcgagagactagagaaggatggactgagaccaaagacagcttgtgttctgtttcaaacacgttttttgttttccggttgtgagtgacttcaatggattctaggactctcctctgcagctcaggtgggtttaacaccacaacacattctctcaaaccagggaggctactttgaagaatgcttcctttatggacatgcacaaatggaagcataacagccttcagctcttcaatcccacggttgttgatttcattccccaaattttttttccctctcttcgttacagtcatcccactcttcttgagtgtggacgtgagcctctccagatatttaggtcttgcgagtcccaaaacattgcacagctccaggaagttgttctggaaaggagttccagagagcaagattcgtttctgtgtttccactttggatagtgttttccatatacaacttctctggttccgaggtgtgtgtgcctcgtcaagaacaagaagtccaggccttcccataagtatctctctgatatcatctaattctttgtctggcttcacttctctcaccatctttgtctttttgtcctcgtccttaactcctgcaagcttctcatacagattgtagctgatcccgagtatgctcttcgattttatccaagagtatattttcaccatccttatctcattattgcttcttgcagtggcattcttctgcatcaaaagtcccagcgccgccgagttctctttcccagtaaagtccaaactgctgagattatgaaagggaatgcttatgttccatttcttgaactcctctgcccatgtgagaagcaagctcgcaggagcaatgatcactggtttgcaatctgggaagcattgaagataggcttgcaggaaaatgatggtcagacgagtttttccggtcccgggagcatgtgacatgatgcatcctccggtctcatcactgttctcaaagtccttgagctcgttcaacatgattgtaccggctaagttcttccagataaactcaaaaccctcttgctggtgaggatacatttgagatttgacccctgggatcttatcccaaacagttccttcagaagaaacacatccctcatttaagctgttgttaggagcatcaaacccaagtttcccaatgaagctgctgccttcttcctcttcaaatctatcaaattttctcctttcccttgtagtcttctctccctacatgaagaaacatgcactagagttaccatcaaaccttttagtttaacgtttcaatcattttactgaatactccaaattccttacccactcagatacatccatgcttcggatctctctctccacgaagccacagtgcatacacttcaaaccaacctcaagatcaatacatagatcgtgtttcccttttttacattgtgctgctggagtttcattagctgatatatttttctctacctgcaaacatttcaagctagatttaccttgttcctaacaaaaggagatgaatatactgttttggagaaaacaagaaattacatttgaaaaaagctcgttgccgccgatgtcgttagatttagtgaaaaatgctagttcttcccacagcctatcttcctctgaatcgatctcagaaaccacaggtggtgactgaggctcctccacaccaaatttctctatcaatggtggtggcctaatgattagaagtccagcatcatcatattttctgtgatcttcccttgcttgttcttgagattggtcttcagctgaagaaactagttcgtctgcttcatcctcttcgcctaattgacctttctcccaaacagagttcacaagaagcctgaatagatcaacttctttattgtttccattcaatattctccaatccgagtggttattaatcttgacctctttgtcttttagagtaggatcagattcatatccatctccagagctaatagaagaatcagagtcatcttcaatatgttcattagtcacaacagacttatttaacccctctgcaactgcaggtgtcgtcaaacccatcctgttgttggcttggacctcttttgctttctctgaattctggatttcaggtattgatggcatttcaggtacttgtatttcttttgctttctctgaactgaaaacttcaggtcttgatggcatttcaggtgcttgtacctcttttgctttctctgaactgtaaatttcaggtcttgatggctcttcaggtacttgtacatctatcgctttctctgtagtgaaaatttcaggtctggatatggatggcttctcaggtgtgttcaattcttttcctgtctctggattctccacttcaggtctggatggagctccagttgttttcccagagttgatggaaacagaatcttcatactttgatacattagtagaagcaaagttgttcacatcctcaatttcatctcttattgaatgtggtctaatgaaagagctgtgtgattcagggtttcctgtgttctctttgccacagtgagcacaagtgtacacaacattgctcggctgctttgttactactcttacaacttctctttgtcgttcttttttttcttcttctcggtggtttagtttctgaatcttgttgtctctttctctaggcttggttaagctagaaccagacctcttataccttaccaaagccttcctttccactaaagaaactctcttgattggtgaactggcctttctcaagtcatcatcatctctattatctccaactacctcctttacatatgattcatcgtcactcgaggaggaagaggaagatgaagacgacgatgatgacgatgatgatgatgaagatggatcctcagaagacaaagactccaccgttacattatctttggtgttattatcttcactatcttgattttcttcttcctcttcatcggtttcacttgagctatcttcaccatcactgatagactctacaattctgctactttcttcaaatagcttcttcttggctgaagctcttcttctagcttcagtttcagactcagaatctgaaagaatctctatttcgccagggactgatttttccaaaaccaaacctctaatctcaggggaacacttgtccttcaaaaatctgatttcttctgacacatcttttaacacagaagagctcggaactgatattacaagatccaaatcagcaatctcaggagaactcttctgcatcagacatgtgttcttctgttcagacacatcctttaacttagaaaatctcggaacaggtatcccaacatccaaatctgtaatctcaggggaacatttcttctccacgcccaaatcactaaccctaaaagacctctctttcagacatgggttctgctcagacccatctgttaacctagaggagctgggacctgatttcttctccacattcagatctctcattatcctagaaaaactctcttttacagagttgttaggtacagagtacatgttactgacttgaggaggaggaacactgtcgttgcaagttggtgtgatgtcctcaatgtcggagtcatagtttttaggtttcttctgccgtcgtttctttgggggagatgtcaccggagctacagtctccatcttcttccgcttgttaacagcctgaagacgctgccagctccgggacttcactctcttcccaatacactccattaaagcaaacacaaagatctgaaaaaagaaagactgttagaaatctagagaagacgacaatggggtctgtaaagaaacagagagagagaaaggtaacgaacctttagatgagaaaaaatcgaatctttcactcactcacacgggtctgagaagaagatgatgaagttcttgagtttttagagaaatttttgattttcactggtttcagaaagtggaacagagagagatgggcagagagagagagagagaagggcatgaagaaagcgtgatggcaaagccaaaccatgctatttcaggaggtctctcataccgccaaaacggtactatttttccacacactctgctttttggttttggtcaaaaaatttcttacatttcgttaaaaaaacagctcattaatcagtttccatttcaagcattgtttttttctgttctaaattacctttttgaccactctgaaattacagagtcaacacgtcactcaaaactgcaggaagagaagatatttcattacaagacaaacaatgtgtaataaattatgtcttactgcttctaatttttttttctgtgttttccttttgcttttgttttgaaatgtaatctttttagtttaccaatctagatttgttataacaatttaaatgaaaaaaatcgaatcatttactattttataaaagaatctcaaaccctttctttgaatgggattggagattggagtattattgaaatcaactaccttcctcttgctggcatttaattccactattagacctttatattatttttaaactaaagaatattgtgtttgaaagaaaaggcaaccaaaaatgattacttacaaacatatacaaacaaaggtttttagaatataaagtagcaaacaacatcattccaaggagagaaaacagagaagaatacttgtcattaatagagagaggtatgagttcttcacgcaaagtctttttgatattggaacttggtcattaatttacatcaccaacaagttctaaatatgatgaaagaaaatttatgtaccaacttcactttaagtgcccaccttttatctaatcgcagtaatgaacacatcacgtcctatgaggctttgacaaattaggaaaaaggctaaactgtgttagtcagaagataataacttacagaggggaccattattaatctcctaagtttatgtttttgtgacaagttacaaattcctcagaggattattagagaagcaaatatcgaaaactgtataacaaaactaacttcttaagaccgtaccgtcacataacatcaatgagccattaccatagccgaaaccagtcagctacacgagtacaagacttattatggtatgtagtcatctcatgatttaagggtataatgaagtatcaactgttagtcccccaagatcctaattgcatatgatcagaactctggactcgtttcttaagtgaggatttgcaaagctcaatctttgtcattgcgattatgttccggtgacgatgttcaaaatctttccggggatttagttccatcactgtctttcttttctatttgtttttgtctttaacaatgtcaaagtcaaaatctcaccgattctgtaaattccaagttatatgacgtgtcattgtattattggtgcgagcgatagcacaacctttgcgtctgcgtcggtagcgaactcttcggaaatatataatctgtaattaaaatgagactaatcccaatttaaaatcaaaaacctttttatttatttttgttttcctatagagatttcttagaaaagaaataaattacttctcttttatttttcattcggtttagctcgtggaactgaatctggtgtgtttgttgatcagagtaatacggacattgcaatttttctaaatccggcgattaaatatgggtttcatagtcggcgttgtaatcggactcctcgtcggaatcgcaatcatcatcggctttgtcaagttggagaattctcgatccaagcttcgctctgaacttgtgagaccccactctccctttttcggattgaaaatttcgattttttttcttcttaatcgggattttgtttctgttttataaggcgaatacggtggctgcttttgcgaggatgacggtggaggattccaggaagcttttgcctcctgagttttatccttcctgggttgtcttctccgagcgtcagaagttgagttacaacattacttacatattgatgtgttttcatctctctctttctgcgtattggaagaacacgaaagttttagaatttggtcatacttgggactgattcttgttgttgctttggctttttatttacttcagttgacttggctcaaccatcacttgacaaagatctggccttatgttgatgaggtatgtttctattgtctaattcgttcaagtagagatatgttatttgtattatggataaagatattgtttcttaaaggagtttttttttttgtcctcttttgattcgatttggagttttaggcagcctctgagcttataaaggcatccgtggagcctgttcttgagcaatatagacctgccattgtggcctccttaacattttctaagcttactctcggtacagtggcacctcaatttacaggttagttttgttcatttctctttttaagtgtaaaactttgtgttgtaaggtaccagaacttgtgcaattgagtcatgttgaattgttggtggaatccttttgattgtgaacttttcttgagcttgagcttagactaagaatgttcttacttttacgtgtctccacattgtaacctactattctgtgatagtcatcgaattcctgtcaaaaggaaaatattcaattgaataacaactgaggagtgaattatcaattcgactgggaaataatcaggcaatggcagcagtatccttctttacacttcttcggattgtgtgtttaaagtttgcaaaaagacgaaccataatcttaaacgaaattgtattgttgctttagaatttatgttttgcttgtgctccttggtattcgttaggtgtttccgttatcgacggtgataaaaatgggattaccttggaacttgatatgcaatgggatggaaacccaaatatagtacttggcgtcaagaccttagttggtgtatccctccccattcaggtatatgatttgatttccctcgattgcttactttgactttatattatttgtcaattcttctgtcttgcagaacttgtgaaggaaatattgatattctaacctttttttgatcaatgataagctgattacaactgatttcttattctttgttttctaggtgaaaaacatcggattcactggtgttttcaggctaatttttaggccactagttgaggactttccctgctttggagctgtcagcgtttctcttagagaaaaggttagtgccctctgcaacttttgaagctgtagctaaaattggctaagatagttcataagttttttgtacttttacttaatcgtgttgcatccttctgcttgcatacctgagcatgcatgtatgtgtgctagattggtttcattgaagaaagctgtggtgacacaaaatattcgggtgtagtgatcaattttgtatgatgtttagcttatacattcaattctgtgttgcagaaaaaattggacttcacccttaaggttgttggaggtgatatttcagcaattcctggactttctgaagctattgaggtttggcatactatttagtttcttgataccaaatatttatgtcattctagagtcttagagaaaggaaatatcaaagtggttacaagtctttatttagctatgaagtacatgtggtcgagaatcaacagggtgttctggttattgcattttcctattaagcatcttttcttgtttacaatgataggtggaatcatatgtgtttatcttagaacttgctagacaggttggcaatttgagtagacagcttaagttctacacatgaaaccttgttcatatgctatttttgtaaaatcacagtatacattcctagttttcttacccaacgctccatatgatgcaaggttgtaatctcttagatggtcctttatgccctggtgcatatgacacttaccagtaagttgatatgtctcaggaaacaattcgggatgccgtggaagattctatcacatggcctgttcggaaggtcatcccaattatacctggtgattataggtacacctcagattaaatagatgaagttgaactgttgacgttcttcagtggaggatatgctcaacttttttttcttttcgttttgactttcttactattgtgttatagcactttcgaatagtcaatgcaaatgatggtgcttgtctttctggttttggacttttattttagatttttttgtgtttctattcccagcgatctggagctaaagcctgttggaatgttagaggtgaagcttgtgcaagcaaagaacttgaccaacaaagatctagttggaaaatcagacccctttgctaaaatgtttatacgccctttgcgtgaaaagactaaaagaagcaagacaattgtaagtagtccatctaatcctctttttgtgctaaacctaccagaatgatctgatttatatttattctcatcagaacaatgacctgaatcccatctggaatgagcattttgaatttgttgtggaagacgcgtcaactcaacatttagtggtcagaatatatgatgacgagggtgtacaagcatctgagcttattggttgtgcccaaatccggctttgtgaacttgaacctggtaaagtgaaagacgtctggttgaagctggtcaaagatttggagatccagagagatactaagaaccgtggagaggttagatcggctataaatttcccctaattaaataaaccctgtgattttgtatctgtacatggctaatgaatggacgttattgttgattctctgtaatttaggttcaccttgagctcctttacatcccttatggttcgggaaacggcattgtaaatccctttgtcacttcatcgatgacgtccttagagagggtgctcaagaatgatacaacagatgaagaaaatgcatcaagccgtaaaagaaaagatgtcattgtaagaggagttctctctgtgacagtgatatctgcagaagagataccaatacaagatctgatggggaaagctgatccatatgttgttctctcgatgaagaaatcaggtgccaagagcaaaactcgggtaagtcctctcatttaaagcatcaaagagttatccatgttatagatgtttcatcctcctcattaactaatggcaattttgcttcaccaggtcgtcaatgacagcttgaacccggtatggaaccagacttttgattttgtagttgaagacgggttacatgatatgctagtccttgaagtctgggaccacgacacctttggaaaggtaaaaccaaaccgcaacaacactgttatttgatggttattattctgcgtcattgcaccaaatggatgtttttctcgtttggtttattatttattgtgttggcattgggcattggaaaaatgaaacattgtggctttacttttgtggacaggactacattgggagatgtatcctcacgttgacaagggttataatggaagaggagtacaaagactggtacccattagacgaatccaaaacgggcaagcttcagctgcatctgaagtggatggctcaatcaatttatcgtgattcctaagcttaatcggtagaatcaatttatcgtgattcctaagcttaatcggaagattcacaacttcgaatgtacatgttgtctagtagcgtcaaacggatgtgttttgtcaaacaaagacgagtctgcatgtagcccagaagctgtggactcggaatatgagttttcctctttttttctgaaaaccctagacaatactcgtgtacgtttgcctcataagctcagatgtcataaggggtttgatctttgcgtgcatcacaatccttcaataattttttaccttttaccctaaaatctcgtctacacgtatcaccatatttgtcttcaccaagtttgtttcactatcataatcagcgatctcttgacacatattgactagtccttgttgcttattatcctcaagtgaagccaaataagccacgcacactcggtgacaccttcaatgtttgccatgtgtcatagtccatgcaaatgcccacttcattttattaagacgagagctatacaaacaccgtctcttcttattcacttgctgctagttataagaatcagacagaagttgcagagaaaagagaattaattgattggtgtaatggagaaggcagttcatttatccaccaaaaatggacccaaggttccaggagagccaacgaagaccggaacctccatggttgacacggcagcttcagccgtacaaagcttcgctccgattaaccaaatccaccaacatctctgcgcgtacgcttctgaaattgttaatcttctcttttcattttatctttaaacaagaaataaagaagaggatcggaagaatgagggataatcataacagtataaaacctacaccacattttttcgtttaatagatctgtcaaattcttgtagtttagatttaaaaaacattgtattgatatcttacgtaaatcaagttaatcaaattttcttgaatttttaatcgatgtgaacacgtgtggagttgtgtacatgcatgcagaatgaaacttaactatttcatatgagtttgtttgcatcagtaaaaagatgaactatatatatcctctcctttttgcgcttgtcataggtttcatttctatgcatatgacatgacccgacaagtggaggcacaccatttctgtggtcacatcaacgaagacatgcgccagtgtctgatctacgacggtcctgatgccaacgctcgtctgatcggtctggagtacattgtgacagagaagctctttatgacattgcctgacgatgagaagaagctttggcacactcacgagtgggaagttaaaggaggcttcttgttcatgcccggtgttcccgaagctattcaacggcaagatctcgaaaaagtcgccaagacttatgggaaagtttaccatttctggcaagtcgatttggggcatcagcttcccattggcttgcctaatatcatgatggctgttactcgagacggacaactttatccggaaatgatcaagggtacgtagatttgtcatttataggttatgcttagtcaaatatgcttttatgaaagttaacatgaacattttgaaatgttcaatgggtgaccgcagagacggaaaagcaatttggagtatcgatagacaaggagcgagagtcaagggcttatatgaagggtccagaccatgggatccatcccttggcaaatggaggaggcaaaggcctgaagttggagttgcgagaggttgacataaagccggttgagtccgttccaagagtcttcgtttaagttatacttaaatagacaacttaagaagaataaataaataagcgatcgagcttttcttttgtatagccctcctcgaatcatgtgtataagatgtaaaatacacttgaagtagtatattatggtgtcgtctagtggttttaaatattacgtcttcatgactccagttcattatcttttatgaccctgcgggtaatcgttattataaccttagagaaaagatgataatactatgaccaaatggaaactacaaaatttgttgaatcacactatgataaataaaggccccagtgaaaagaaaggaacagaagcgtagtcttgtcatgtgtgtgtataacaaatgtaagacacttgaggcattttggtgagcgacgactgcatcttctttatttgaacttgtctcaattgaaatggaagaacagagagacctctgtgttctcaagattgaacagccaatttctgaagatgttggaagaagacttgaagactgacatcatccgtgaagattatatcagagcctgcattcatctcgcttgcattgttgtatgttgctgacggatttagctttgctaacagaaaccttgcctgtccattattgccatacgtattacagaacatcagtaaacactaggcaactttcagtgtttcacacttgaacaatcaactacaaattcagagatgaaaggggttaaaaacactgacctgggatccatgttgatcacaaacaactaatcttggtacagggaaacgatcacgaatgatcatctgcgcatcttcttgaggggcttccaagagttgggcaaatgccttgacaaataaagaggtcagacgagacatgtaaggctcatattcgagaaaatccaaggccaatgcaacttgcatattcattacctggtgttcaggctgattttgatatcccaagttgcgccactgtgcaatggtcattccatggaaaacgacaacactaatgtaagaatccaacaggaggatacggtctgcaccaatggaagcaacatccaacaatgcaggttgaggtagtgagttaaacgaatatgttgttagagatggctgaatcataacagctgcgttcgaaatattttctcggtttaatagcatgcggttgtaagcagtttcgtctggactattgttgaacacctgccaatatcaccacaccatgagtacatttaaagatataaatttaatacaacttcccaaacgtcaagcttacctgcacaaactgtgagcgtcggagattgaacgtaaactgagggaatagtgaaaagtttggatttagagtaaatgaagcaggatcatccttccggtaatcaccaaatttagaacaaagacgaataaggttccggtccagccatcgcgtagcatcaaatccctcctgaggaaacataattgacagaaattaatacgtttgataaccaaaatccacaaagtttgggttaaagcaatggtggaaagatattcaaattatcgaatgaaaatccacaatatacaagttttaacattccaacatacaaacaacatttttttcttaactttgtcccaatacaatataagaattagcaaaaatgcaaatcggtagaaagtaccaaggactgtagattcaagaatctaagtttgaaagttcctcaatttaaaatttacctctgtttccattttcaaggaagctaatctggccacaaccacagcagcagtttcttgatcaaaaccttgcaccaattcctgcatatacaacacacctcattagcatacatgtacacgtacaaagaaaaggttaaaaggaccataagagtatgacaatgggaatgtggaatacaaacatgcaagactagatttcaccataaataagggcttataagttaaacattacagaaacgttgatgcatactccagaaatctaaacaaacttgacagtaacttagaaaactgttttctccaagttgatgaagaagtgttaataaaaaaggaaatgatgtgtcaacgtatcttaacagaagcaaactgtcagccaagctactaggaagatatgagagcataagaaaaatataaaattcttgcctaactagagactagtcaaatgaatcatttacccagtgtaatcctcacactgaccattcaaatagctaaagagactaacgagaatcaaagactaaaaaatgcgaaaacaatggaccaggacatattcgatcattcttgggaaaggaaacccataatgaagtagccaaatgcaaaaatatctagaaactaatctggaaatgtggaaagtactaacctctgtgctaagaccagtatctacccattgtctggtaacagtagtaactcgctgtaatgttttaccttttgaattttggtagctgcaatcatatatttcagatcaaatttctattatttggatgaatatacccaaacccagaattgcatgaagagcataccttgtcataaattgtaaatatagttggttatttacacctccaggagcacttgattgatcactagaagaaagatcaaagaagactgtcaaacaagtccttttatcgaggccacacatcttccattgtgtagtattcccctccccaataactgtatcagcaacgctagggcctttctgcaatttttccaaaaaagagaggcataactgttaagctatctatcattatttgaaaacaagaagatcaacttctgagtatgggtagcttcaaccttttgcaaagacgcacaaggtccaataatcccttggatttttatgtcctttgaacagcagatctcaagtgtaccactgaaatggtagtatgaaaaagagtgagaatgcgactaactgaagatgtcttagatgcaacataagacacttggaaaatttaatttagcatgcatggacaattgaaatagcacgaagcacatcaggctatagcaacaactcacttgaaacaaaggccgagagactcttcgccatcttcaaatactcgcttaaaagaatccttaaatacagaatggccaaaactttctgataaaacaacaagacctccagttctttcaaccgcagctttcatttcagcaacaccaacctaacattcaaatcacagataacataattatgatccaagttaaagtagagttcaacagaatacccaggctctgagtaaagttagagcacacagcaaggaagttaatcagaggaaatattttacaccagattttctccttaacatgaagataacattcagggaaagtaaatacctgatcaagtgcggatgcaaaaaggtccagtacatgtccttggttaaccagttggtttgcgagcgcatcataaaatttctccgctttcttatagaacggagccgcatctttatcaagatctttatgtgaacgcaaaggttctgatagatcctttgacacaatctgcagaagccagaggtagtactaactcaaaggaaaaactttgtatttgaggccaaacaattaacaaggaaagttcagagtgtgctcttctcctaaacacttttgtcgaccattatacttgcagataaatggtcatctaatatgaagatgtatctcccacacgttgctcagcagaacatgacgaaaaaatacatttagttctagattggagcctaacagatttgcgatgaaaaagccatgctatcttaagcaacatagctagttttatcctacttaggctagatgaagtatccgaagctctaacaaaagaaaaatagcatttctatacatcatcttctcctatctatcatggccaactgtcacccttaccactacaagaggttcatacattaaatctaaaccagatattgaacaattccgtatgtaaaaagccaaagtttcagccgcttttctcaagtacaccgtcacagaaactctaaaaagaaggggaataagcaaatgaagttaccgtgcctggcccctcagaacatggtcctccaattaaagcaacgattctagccccagttccaggaaaacaagctccaagtagtcccgtagccacacttatagccactcccgtgcatcgtgactggcgccgtccagcctggacaggccactgatccgtctgtagctcttccaacagctacactccaaaacaaaaacaaagttctttaccatcatcatcagctttaataaaattatgcaatatcaaaaatccatcagaaaaaagtagaaaagcaaaaactttatcaaactccaaccacaaaagatggatgaacttaccaaatcaatcgtgaattcacagtcagaagctggcaacaagaatctattaacacccgaatagccgaaattggcagaattatccctccccattggaaaaccaccaaccgggtttcgtctcccagaagcaccaagccctaactgctccaaaacttgatctttggagatctccttatctcccctaaagacataaactttagtcaaatcagaaaaccccagctcgtgaacatgcgcctgcgtcccaaacgagacaaacccaaccaatgcattctccggaagcaacccgatcgcctgcttaagcgcagatttcgcgtatccaaactcctcttcaatcatacacgtgtccaggacaaaaacaaacaccgacggcgaaggctgaccagaaacagcaccggtctgatcaaaattgccaacaccagtaggctgagaagggttaggcagagtgtattcaacggtagtgtactgtggatagagctcacaagggacattagtctcggacataacatggtagtgaggagggaagtggtttctctggaagcaaataggacagatccagatcttggcgaggaaatcaacacgagcaaaaggattaagagcagcggtacaaatgcgacaacgaagaggagcatattcaacagatgggatatcccggtggtaacggatcggagagatacaagcagcgacagggatcacacacttgcttgcttcaactttggtgcgaggccaaacgttccacgtcatacgaactccatcgattccttctggatccatactcgccatctctgacatggtttttaagggtaaagatccgaaattggaatgaaaaatttggtctttgtgattctgtaaattcaggggacctcagaagaatcaaaagcagagacgaaactgtggaaagggatctatctatgtgagagagattttatgagtagagagagtcgtctgtctctaataacatacatacatgcttttttagggttaaaaagtaacagagtaattaattgcaaaagttataatggattttgggttttttggcaactaattcatcatcaacttatgttaacaattgaccaaatcttctattaaataaaaaaaattcaaaatactgttttgtttttctcacattttagaatatgtgagatcacttggccaatccaaatcttctttgtcagagttgtttcattgaaaaaacaaaaataattaaaactgtgattgatcgtatatttgcctttatctgtgtattagacagaaaaaaacatatcccaattatcaaagcaactttatgtaacccacatctaaattaaatattagactaacaaattaaatgcaacaaatttaaacggggatcacaataacgttagtaatacaagttttattgaatcaatgaaggtgcatataatttgtaaactcaactatacatgagtcaggttcccatgagtcacctacaacatgaatctgtgcaagacacgttgtgacgatatacatctataaaaacatattattaaattgtagttacgaaatatacccaacattgcatgctgattgttacatttgttttaccctcctctgttttataaaacctcaaaacagactcttcacaaaagcttccacattcttgtccgaagatcctccttctctacccgcttcagtcgctaaacgcttccatttctctgcgttttccctcagctccaccgatttcgcctccatcactgcttccaaacaccgcattatctctcctctctctactaaaccttccgagttctctctcaccctcacacctgtcttccatatttcttccaaaagcttcgcatttgctggctgatccgaccacatcggaaacgccaccactggaacgccgagaaccaaactctccagtgatgagctccacccacaatgagtcaaaaaacaacctatggctcggtgtctcaaaacctctatctgcgaacaccacgagacaatcatcccaacctcttcaagctcgtgtctaaaaccagctatcttctcaatctctgtctcttcttctccttctattttcgcttctctgttgagtttatcagttataacccacaagaacggtcttcccccttctatgagtgctctcgctagttcctctatctgtttcttcgacaactcaaccattgttccaaaagaaacataaataacagaggactctgttttcgagtctaaccaaagtgtataactactactttgatgatctcttgataaatctttacctgattcgcttccagtgaaaatctccgcaggaagtaaaggaccaactgccaccatttctatattcggaatagctgttaagaactctggctccagcgaatcgaatgtgttgacgagaattttcgggttagattcttctttgagaaaatccatcagttcttgatatactgcttgtgcggctttgttcgtgttggaaggtgagaggaaagaaggcagatcgcggatttcgagagaaggtagattcgggaactcgaaaacggagttgtttcctgtagagtaattgtaataaatgtcgaaagcgaaggctggttggatccagagatgaacagagggaagatgaaatctacgcgccacttttggaacccagttgggaagaatcgtgtagatcaagcaacttacgggagagtcaccattctgattagcttcgatgaaatccgatagagctttatcgccattacgttcgaagtgtaccaaccggttttggacgtcgtcggtgttggagatgactccgtcgtcgaatccgtcggagaaagtaaggaaagagagattttcgacgttgttgtggtttgggatcatagagcggtgaatgacagagagacacgtggcgaaagttacacgtgcgccagttgttttgatgagccgacgagcaaaacggagagatgggttcacgtgaccttgcgccggaaacgttaccagtagaaaatgcggttgcgccattttttgaagtgactttcttaatacgtacgaggtgtgtctcctcgtggatttgtgctgttatatgtatataaatggaaaatatattagatgagagtaatgggatttcatttggggtcatgtgacatgagataacatgttttaccgcttttggcgtgatccacgacgtacgccatgatggagatcataataagtatcatgctgaatatactatataatttatttataaaaaaaatagaacgaaagaaaaagtatcatgctgtcaaaaagaaaaaaaatatcatatttttatagagaaaaaactcgaaaaatatctgtttaatatctatagttgtttgaataatatctaaattaattttatgtttttaaatgcttttttaattcaaacattcaaattcatgattattatattttaacggatgttctaactgtggttgaaatttaactcatgatattcacgaaatgtataatctattttctaaagtttacaaatatattagtgtaatctaatggttaaatgtggattgattctcttcataaatctaagttcgaatcccccttctttcctaattaatccaaatttattaagatagtcaatccctctttgtcctaattaatccaaatttactaagatagttagtcaatccacgtttaaccaccatactaacctaatatatttgtaaagtttagagaatagatagtatatatatttataaataccatgagttaaattttaattatagttagaacctccattaagtaccaaaatttaaataaacgaaagcttttaaatttgggaaaatttaataatatatgtattaaatggacaaataaaagttagatgagagtttttttaaattttttattataaaataatttttttgcatgaaattgtttttaagataaaattttgacataaccaaatattattttccgccacgaattgagtctacgagagatgtcctgtctttaaactcgtaaagttttggtcttacccaacccaatacccacaaaggtaaacgacataacggttaataatattctaaccggtttataagtttacataaatcatttactaatccgcgtgtaattaagttttatgaaatgtggttattttgtaggtcacgtgaaatttattaattttttagtacttgtttttcttttttgggttcaactagttacttttttcctttgacatcaaaattattgtagacgagtggtccatatatagatggtgaaatgaaatgaatattgagtaataaataaatatagaaagtgaacaaaaaaaattagtggaaaaggtaactggaaagaaaaggcttattggcttggcaagattccataagtttatttcaccaaaaaggaaagagtacttggccttgctctctctctcttttaaaatggtaaactggtaaagataggagactcaatttctagttcatcaaaacatatttggcgttattatttctgtggtcacttgaataataatgtctcagcttctcttccgtctctcaaaactctcttcccggaataatgagcttgtatgtacgcttctcttctctctttattggtttcgctctgtattatagttaggttttgttttagaaggctttgcagggaactaatttgtgattgtgtaactaagaaatgacatctggaagataaggatttgagtatgcgttacttttctgttctgatgtctgagcattatataattaattggcagatacacaagagcgttcgcttgttttcaaccagcccgtatttgacacttggcagcgttgttgaagacttgcctgaagaagacggcagctacatcggagatatcctcttgttcgatccggccaaggaagagttagtcacagtccgggacaaaacaattcccgaaaagctcgttaactcgagagtggtcggagcttcacatggatggacatttttctctgaccgatgcaatcataattctgtatgtatcagcgacctttttactcccatggcttccaaatcaaacacaaagataattcctctgcctctgcttactactatgatctatggccaaacagaagctgtctggaacgtggcaatgtcgtcatcttctcctcaccaagacaatgaagaagaagactgtgtcgtggctatcaatttcttgggtagccaactgagtgtgtgcaggcccggtcgtgaccacggttggactaacaaacaaatccctttcatctgctcggaaaactcaaatcttatgtactcgaagagagatcaaaggttttatttgcctgctcctggaggcaattacttgtgctcttgggatctccacttcgataacgatcctaagttcaatgagttggtgtttcttaatctccctgagttgccacagtccgagtgggagctgttgaattcttgtttcaaggaggaccattgggtggagtcaccttccggccaaagtttcttagtcaaatggtaacgtgcgagtctaacatgtagacagaaatcttggtcaatgctaatttgggtcttatatgcgtgtgcaggtactctcacatcccttctcaacgatacaaagatccgatattgatggtgcttagagaggatgaagaaacagaagagggaacaagaaatatgtgttacaccgaggacattggagatctttgtatcttcctttcaaagagtgatcctttctgtgttgtggcaagctcttgccctggtctcaaacccaactccatctacttgatgggccgttgctttgctgtttatgatctcaccacccgaaccgcccgtcacttcaaagcccccaaaggtggaccagaaagagttcctttcctcccttattggcttcctccattttctatctagttctttggttggtgttaatgttatatgtggtgtgtttcgattttagtttctcttttagtttctctcaagcgttttggattgctatgatcatctttatgttccctttttgaggttattaatttataaggccatggttcgtggcacttattcttttagaaatgttggctagctcccatatcacattaggataatcaccttaagttcattgttaaaaaatgagcttatatacacatattgaacctccaagagaaagtttaaaggaccctttatatcgccaacaaaaaagatatagctgcgcaaaaaaatgaaaatgaaaactctttgtagttaaaaaaaaaaacaaagataaatcgagataagctcaagaggaatggtatgtccaagattccatttcagacgggattctggtctgggatgttttaacttaaaattgaacttagaacattaacaatctttaggtgttaccaatttaaaccggtagagagaaacttcaagtgtacacaaagacagaaatagtatgactagatagcaaatggaggaagccagtaaggggcggtcagagcgcttggtgcacctttgggagctttataatgatgtgcctctccggtagtgagatcgtaaaaaccaaagccacgtcccatataatagacgcagttaggcttgaggccgaggcaggagctagccgggatacagaaagcctcgttgcttgcaaggaaaatgcacatgtctccaatgtcctcggtgtaacacataatttttccttccgtcgtctcctcttctctaaaaaccatcaacccctttgttttgtggtagattccttttaaatttgacgaaaagaagccaagcgcatacctgcacgtaggaaagcacacgcttattctcagtattttcaatgaatttactttacttgtataactatgagtgtatatatagatagaataccatttgactaggaaacggtcaccaccagaaggtgactccacaaggtattccgtcctggaacatgaactcaaaagctcccactcggactgatccaacactggatggtctcgatagaacaactcatggagcccaggggagtcatctgatttgaagtggaggtcataggagaacaagtagttgcctccaggggcaggtaagtaaaatttttggtctcttttggaatacatgagacttgagttgtgtccaaacagttgaaaggggttacaatgttagtccactcaaggtcacaaccgggtctgcacagactcagctggatacccgaaaacttgatagccactacacagtcttcctcaccaagaggagaagaggaggacatggctacgttaaaaactttttcggtttggccagtgggcagagccgtaagcctaggcagaggaatcatgacagggtttgttttggatgccaaaggattgaaaatgtcgctgatacgtacggaacgatcagtccggtcacagaaaaatccccatccatgggaagctcccatcatttcttcatccatgagctcttcgggaattgttttgtccgggaccgtgactatctcttccttggtcgggtcaaacaaaagaacatctccaattttgcagccggccggcaaaattttcttaaccctagtgccaagtgtcaaataagggctggttgaaaacaaacgaatgctcttctgtatctgccaagtaattcggacatcagaatgggattgtaatgcaaacactcttatctaactatgatttaaacccaatcatctccaccctccgattatcttcttgatgtcactacttacagacaaacccaaatttgttccctacaaagccttttaaaacaaaacctaactaatacataacgaatacaatagagagaatgcaagagaagtttacatacaagcacatcgttccggggagagagtttggagagaccaaagagaaattgagacattagaaattatgtttcaagagaccacaaaacagagttttttttttttaaaaggctaataatgttttgatgaattagaaattgagtatctcaaattctcgatacccaatatcaacaaataaatcaaagcaaaccaaggcttggttgttggtttacatagcattcttcctctttccttttttggttaaaacagactaatcgaatcctccaattttctatattttttcttcactttctatatttaatttattacgcaatattcagtctatcgtggaccactggtaaaacctacgataaatttgttgacaaggaaacaagtataccaaaataaaagaaaaaacaagtatacaatataattcacgtgacttaaaaactaaccacacaattcatacattgcttaggttgttcgacaaaaacttttttacacgtacagaaactcattgattaataaatataatccacatagataaaccaagtgaaccacattagacaagcgagcccgaccccgataagattggtaagcgttgatgctagacgcctacacgtcttgttattaatgtttcgactctgagcttcatgttttttttccccaaaatgtctttttctctcttgttcactactcctagtttccccattctttatgcagtatatatatatatatatatatatatttttttttttttttattctttaaagagtaacttgaatatttaaaaacactgagagaaatgaaacaagcaaacaaattatgggatttaaaatttaaagaaaagtgtaagaaactaaaaaggaaaattgttttgagttcgccgtgtcgcgtagccgtggtcaccgcttcatgctccacctcatcttgaaggcaagaacacacttcctagacaaaaacatattagaaagagaaaaaaaaaaacaagaatatataacttagcataatagatattaaattagaaaacagtctcacaataagttaacaaagcagaaaaaaaaagtcacacaacaaaccgatcgaagagagtcaaacgacatagtttattacataacataatacttaatacagtagctagttttctattttttggttgacttggagctgctggctccacctccgccatcctgaggcatctgcacagtgtagaccgtctccgaagtcatattctgggagacgtcagtaggagtcctcacgatgatatactccaagagagcactcttcttcacgatgactatgtatgttgtttgtgtttgagtttaggtttagattttagatatctagaagaggttttatataggtaatgagacgagaaagaggaagatgtataataaattttcatgggagaaagaggatgataattcattttcagtttcctctattgttcactgaaatgcaaaacaagcagagagggcacagattctataagggttgagtaatggaatcttgggttaaaagccgagaaagagatgtctctgcatgaagaagaagatggtgtcgatggggagatagagaaagatatgaactgtaatgcactatgactataacagtggagattgtgaccccacatcacatgtgctatcataaattaactgagtaatacactaatatgtgttagcctgttaggtatataatagtaaaatcctcaagtcattatatgagaaccacgttatcaaaaccgtaaatgtaaactaaggaatatgatcaaaacaaactttaagaaaaaataaaaaaaattggactataataaccgagtacattatgtggacgcattgatagaagaaagaggaagatgtctaatagtaataactataaggttgagttaagttattacttttttggttaaaacttaaaagccaagaagagatgtctgcctctggctctggcatagtgcataatggttggtgttgatggggagaaagagaagaagtgaacttgtaaatgtaaaaatcctcaaataaataaaacggacccacattctctgtaaatgtaatttaaggactatgatcaagacaaagttatacactttaaccaaaataaaataaaatctttattattatgctttatttctaatgcatcaaatgttttatttttctaaataaatatattgtataataatataaatgctgtaacgtttttgaaaatatctgattctttttactttgctttataagggaggtctaagtagggtgccaaacacaaaaagatctaaacattaaatcaaaattgccaaaaaaaacaatagacttgatccaaatttggatatttagacatttatttggatcataaagactgcaacaactcagtggttcattggattccttcttgtttcctaaattaaacttgttatgtttgtgatcaagtaaatgcttgtgttgtgttgtgtgttttattgagtttattgcttgtgtacatttcgagtttttttagagtgtatgtcaagttattcaagaatacacatttttcaaaatttgaaattttagatcctcaatttttagatccaccattgggctgtctcaaaactaataaacactgaaagtgtctaaatttttgattttccaatattaaaattataaattatgtttggatccaaccattaaggatggtctaagcgtctaaatacatttaggactaattctagtcataattatttctaaatatcttggacctttctatttggcaaggctgagtggttttttttctgtcaaaaggttttgatttttgtaatagaaaattacaatagggccgaaagcccaacaagaaaacaaaacgaaaagagatggcccaatcacaatacgggctcgcctgaaacctaatcggaagaacaacggaggtagaaaatggctaaacgcccatcgatcgaacacgcttgcttggagagtctcaaaaaggtgattcaatcaaacatgttttgtaattgaccattattcaaaaaacatatttatctagatggagtaaattttatgttttaattgaatttgatattacaaagtgacagtattagcaaataacactccgccacttctagacaccaactcttttgtcctttatttactttacttttacctcctctgcttcacacaagttttgaataagagattctccacaaatatcctccacaaaagcctccatgttcttatccgaagatcctccttctctacccgcttccatcgctaaacgcttccatttctttgcgttttccctcaactccaccgacttctcctccatcacggcttccaaacacctcctgatctctcctctctccaccaaaccatccttgttctctcttaccctcacaccagtcttccaactttcttccagtagcttcgcgttcgtcggttgatccgaccacatcggaaacgccacaaccggaacgccaagaaccaaactctccagcgtcgagctccacccacaatgagtcacaaaacaacctacggctcggtgacttaaaacctctatctgcgaacaccacgacacaatcatcccaacctcttcaagctcgtgtctgaatccagctatcttctcaatctctgtctcttcttctccttctgttttcgtttctctgttggatttatcagttataacccacaaaaacggtcgtttcccttctatgagtgctctcgctagttcctctatctgtttcttggacaactcaaccattgttccaaaggaaacgtaaataacagaggactctgttttcgagtctagccaaagtgtataactactactttgatctttaactgatttgttggtgcttcctgagaaaatctccgtgggaagtaaaggaccaaccgccaccatatcgatattcgggaaagccgttaaggcctctggttccagcgaatcgaaagtgttgatgagaattttcggtttggtttcttttatgagaaactccatcatttcttgaaacgcatcgtatgcgcctttgtttgtgttggaaggtgtgaggaaagatggaagatctctgatttccagagaagacagattaggtaactcgaaaacggacttgtttcccatgaaatgagtgtaatagatgttgaaaaccaaagccggttggatccagagaagagcggagggaagttgaaatctacgtgctacttttggagcccaattgagaagaatcgtgtagatcaagcaagtcacgggagagtcaccattcttagtagcttcgatgaaatccgatagtgccttatcgccgttaaccttgagattcaccgaccttttctgacggtcttcgtaggtggaaatgcctccatcgtcgaaaccgtcggagaaagtaaggaaagagagattttcgactttgttgtggtttgcgatcatggagttgtggaagacggagacacaagtgacgaaagtgacacgtgcgccggttcttttgatgagccgacgagcaaaacggagagatgggttcacgtgaccttgcgccggaaacgttaccagtagaaaatgcggtggcgccattttttttctacttgtcttagctccactgaagtgagtatcaatacaagaatctgtgtctctccttgtggatatatctgtgctttcatatgtatatatatacatatatataaatatagatgaggaattggattttgatgtctgcacatgcatgcgtattcatcaaacatacgcaaaattgtaccacataacttgtgacgtctgcgatgacgctcactagataaacgcttcatcgtataaatccaaacttgcggttgttttttgcagatttgatgtttacatatcaatgaacatacaaacaaaaacaacatatagacaatttcatttcagtcatataaaataagagtgaaaaagaaacagagtaattgcttttatttgagttttataacttttatgattaccaactttcttttagtactgtagtttttatttggaagaggaaaaaaaaacagtattgcactatacaaatgtagaaataactagcaacaggtaattgagaccattatcaacaatgaatgattgattagtcctgtctttatcatgacctatgtggaaaagttcaagtgatatacattttctttttgacttttagaatggagaaccaatgttttcgtcttccatatgaaaaagatacgtctcatgcactttctattataatggacgcgaacttatggaaatggaaaataattaacatatatctatgaaagttacaggaactttctaactatagattacttgggaaggaaacaataacagataaccattaaatctacacatacgccatttacatgtgtacatgtcactccttgttttttgaagaccggtcttttctttgaccaccaagaatacgagagatttgtagacctctactaaaggcttggttaaagagcattcttgtctggaactcagacacaaaaggaaaccaggccaaaaacgcaactggtgtgaacagaagcaagcccatcacgatctcgtagcctcgagctagcgtcctaactgatgaccatatccctagctgttggatcagaggcttacacgcttgtgcaatctgacgtggaggacaaaacaaagcaactgtcacaaaaaccagacaaaactggtatcttagatacaaatagaggagtttgatggaggagaaagacttacgagaagcattccccatccagttggcatgaaggcaagcatgcagatgaataagtctttgattgttatcagaggaagtgcgaggaaagttatgagaattgccacaaatgtgaggaacacaagaccctttatgattctgaatagaagctggaaattcgtgctgaatcttcgccttccaacgcccaaaccctgcaatgatcgttacatagaagaaagcaacacaatgttaagatttggcaagaaattgaaatgtgaatgtgcttaaagattcataccttcacaatcagtagaatgaataagatcacaaaccatgacgctccataaacctgaaaacagagtcattatcgttcaataatcaagagtttcaccattcacagggaagtagttataaggttagcttacccaaaagctctgattttttcctttgaaggtactgagatgatacacaagtccatattgaaagatgaagaagcgcaaggccaaaaagatctcaagggtgataccacgaacccctgaatgtctaagatgttctaactctttctcccaccaagattcccaactcttctcaggagggacaccaattcctcctcggttataaatccatttgttccagtctgtccagtcatcaacaatcttttgccactcaaaaccagacggattgaaaaggaaaggagcaaagagccatgtcaccaccatgaaccatatcgaaacagtgatcagaatataagtaaccacacccctatatgattgaccaaagatctgatataccagtagaagaatcataagttcaatgcccttcacaaagtgactacgggaatagaacctatagttctcagcaaatttcgcgtggaagaccacaaaccctcgaccagttcctctatactctgcgcctccatgaaacaatgtccttccgtagtaatgtgtttttgtcccgagctgaaacgtgaaaaagacggaagcaagttgtaactgcatcagcacaaactcaatcaatgcattgtggaaccccctctcaagtccaatctccatcatcataggcaaagccattaaaaaaccaatctgcacaaatgattgagaagcaagagctgcctcaagaggcttattgttacggaaagctcgttggctactcaatccttcttcaagcccactaagtactagatataaccgtccataaagaaacacatacaccgtaagcacggttaactgtcaaaacacacagataatggcttcagtcttgagaaagaaaaacaaacctgccatgtatatatctagtgattgagagataaaaagggagaatctcaacctaccatggtactgaagtagaacccaattgtggtgaaataacaagacagcatccggaagaaatcaaatcggtgtcctagcctataaaggtcgcgactcaaagtttgctcgccatttccattggcgatttttgcctcaaacattgagatctggttgaggcccacatctctccctttaccaacttgtatatattcatgatgagtcacatttccttcacgcagagtagaattaaaacctgaaaccagtaaaaaggtatgagaaaaaatgtaaaaaatgaagtagatcatatgtgtaccaccaaagaatatgagatcaagctagtgcctgcaaatatgtcttcactaagattgatgactttagaagctttgcagataccacctctggtaaggtgaaacagacgatcaaaaatatctggatgtccgtaatggaatcgtactctggagcagcaacagaaagagcacatcaattttgacaactacaataccctgacaagatttcagaacagggaagaaacttacttcaagggactagctagcactctttgcccaatcgttacaaaactgttctcttgatttgacataaaccatgcaagagaagacacacttcacaagaaaccacaaacataggagatcagtatgcacacagaaactaaaaatctagaagacagaaataggatcattctgttagtaccttccagtgaaaatatgctctctaagaccaagaatcgtaggacatcttacgcctccatgcttttcaagaaactcttgcagcaagttcctcattttgaaagcttcctccatgtagttgtcctaaggtcaaatatttagaggttaagagtctcctgcggtgattattctttgaacaattttaagcatattatatgtgattcattagcgacacatgttagacaaaagaaaactacgcatcgcacctgattcatgtctatcgtctgcaacccttctccacgggtaaatatgatagcatggttctgattttccggctttccctctcctagtatagctggtcccggaagcttaatccgataaatgagctgacagaaaataaatataactcagtctctcttgaacagcagcatctatatcctctgacctcactgcataggattaaactcatcctcgtattttgggaaaaaaaggagcaccaaaatgttaagtattttacttagttttctcaacttatacctgatctagtgtttgaacagattcagaagaatccattggtttggtctgtggagcagcttttacaagcgctgagtaataaattttctcctctgtccccttataactttctttatgtgtttgctctacctcatcgatataggcgacacgaatagacggatacctgccatgaggaaatagcaagcttaactaatgaggctaagaactaaataacaaaccaactggaaagataaaggatgaaagaatgaagatattacgtcgtcataagtctcaatatgtctttagcacgttggtcgccagatctcttatgaatactgtattgttgacaagaaaccacaaaggtgaacttcatatctgcaagtgcttgacactgcgcccaaagtgaccctccgctctttgatgcttcttcactggttaactcgagagccttgtagccttttaataattctagaacaaaaacaaggtagtttaaggaatgctttcatactttttaagaatcgaaaagaatcacagagaagattcttcaagcaccttcatcctttgccatatcaaggaaggcctgaagttccaaagcctttcggtaatacatcattcctcgcactagttgaaacagatcagaaatcaggcacaacaagtttatcaaaagataaattcgtcaggttagaaaaatgaagcagaattcaaccgattaagagaggagactaaagtctaccagttttagtcagagtttggcctctgtaagatgcccaaagacgaagctcctcttccaaatcctctcttgctcttagttcttcttcgttgccacatttaactcgttccagaaagtttgtccattcatctgatgtaagccatggactcagctgatagctcaaacaaagtaacagtaccatatgaaaaaattaaaacagatggaaaagtgaaacctgggaagatcttctgcaagtaaaagagtatagaaactccatcttcattttgctgttctaagccaaatatggagaaaagaacatcctctgaaaagtatggtgtaaggaccctatgaaaaaacaaaatggaagatgttaagatatagtaagcctacgagaagatgtccatcgtgactggaacctacgagaaggaaagcatgttgcggatcttgggtgcaggaggcatgtccatgaatagtgaatttgaaaagaaagtaagacgccttcgagcttccaagttggatggaacatccatagctgactccttgacagtaagcaaaagatgaagcctcttaatctgcaaaagaacaaaaacagaggaaagcagacaaaccacttagacatccctcatgccaaagagatcaaatgcaccactgtggtggaaacaataatgagagaagaataactttaagaggaagagacttgctttttctttccaagctt

SEQ ID NO: 15 - DNA, 103223 bp, Arabidopsis thaliana
gaattcgcacttacatctacatgattggctcctaccaattccattcacagatgttattaccttgtctcagttagtttgacaacagagacatctaagctcttgtctggtggctcttacatgttttaacatgaaacattttgctagataagttaagagttcatagtagacaaaagtaaacccaaacaaaagtcaaggttttttctgagaaagaagataccctaaaggatcacacaaaagcaaaacacaagtcttggaaagatgaaatggcatatgagatatatagggaagaagagatgaagccaagagtttggtgatgagtcatggcataagtatgctgaaaccttcaactaaatctgcttcctttggttgcacgataagattgtcaaacatatccccaagcttcgaatgctccaccatagtgtccaacactttatcctctgtcacagcttcagcaatcttttcctttcctttgtcatgtctggaagaacatgcaaacacaagctctgagattctatccttttgtgcttgcttacagtactttggtccctcaggagtcccttttgcaaccaagtggtatgtgtaaacaatccgcttctgcccgattctgtaagcacggcttatagcttgtctttcgactgcaggattccacacaacatccaaaagaatcacccttgatgctcctaccagactgatcccttcagagcaggcttttgttgaagctaagaacactttggccttggattttggatcattgaattcgttgattaatgtttgtctttgtttctgctcgagtttgccgtgcatgtacaacacttcctcccctggattccacttgaaacgagagaccagatgtttcattatcagtttcaatgggtctatgtattggctaaagaccaacactttctcctttatcacctcgcataactcgacaaactccatgaggaatcttgttttcacgctttgatttggatcgagtcttaccttcttaagctgtgcaagcagagcctcgtcgatggacaaacgttccttctcagaaattttgcagcgagagactagagaaggatggactgagaccaaagacagcttgtgttctgtttcaaacacgttttttgttttccggttgtgagtgacttcaatggattctaggactctcctctgcagctcaggtgggtttaacaccacaacacattctctcaaaccagggaggctactttgaagaatgcttcctttatggacatgcacaaatggaagcataacagccttcagctcttcaatcccacggttgttgatttcattccccaaattttttttccctctcttcgttacagtcatcccactcttcttgagtgtggacgtgagcctctccagatatttaggtcttgcgagtcccaaaacattgcacagctccaggaagttgttctggaaaggagttccagagagcaagattcgtttctgtgtttccactttggatagtgttttccatatacaacttctctggttccgaggtgtgtgtgcctcgtcaagaacaagaagtccaggccttcccataagtatctctctgatatcatctaattctttgtctggcttcacttctctcaccatctttgtctttttgtcctcgtccttaactcctgcaagcttctcatacagattgtagctgatcccgagtatgctcttcgattttatccaagagtatattttcaccatccttatctcattattgcttcttgcagtggcattcttctgcatcaaaagtcccagcgccgccgagttctctttcccagtaaagtccaaactgctgagattatgaaagggaatgcttatgttccatttcttgaactcctctgcccatgtgagaagcaagctcgcaggagcaatgatcactggtttgcaatctgggaagcattgaagataggcttgcaggaaaatgatggtcagacgagtttttccggtcccgggagcatgtgacatgatgcatcctccggtctcatcactgttctcaaagtccttgagctcgttcaacatgattgtaccggctaagttcttccagataaactcaaaaccctcttgctggtgaggatacatttgagatttgacccctgggatcttatcccaaacagttccttcagaagaaacacatccctcatttaagctgttgttaggagcatcaaacccaagtttcccaatgaagctgctgccttcttcctcttcaaatctatcaaattttctcctttcccttgtagtcttctctccctacatgaagaaacatgcactagagttaccatcaaaccttttagtttaacgtttcaatcattttactgaatactccaaattccttacccactcagatacatccatgcttcggatctctctctccacgaagccacagtgcatacacttcaaaccaacctcaagatcaatacatagatcgtgtttcccttttttacattgtgctgctggagtttcattagctgatatatttttctctacctgcaaacatttcaagctagatttaccttgttcctaacaaaaggagatgaatatactgttttggagaaaacaagaaattacatttgaaaaaagctcgttgccgccgatgtcgttagatttagtgaaaaatgctagttcttcccacagcctatcttcctctgaatcgatctcagaaaccacaggtggtgactgaggctcctccacaccaaatttctctatcaatggtggtggcctaatgattagaagtccagcatcatcatattttctgtgatcttcccttgcttgttcttgagattggtcttcagctgaagaaactagttcgtctgcttcatcctcttcgcctaattgacctttctcccaaacagagttcacaagaagcctgaatagatcaacttctttattgtttccattcaatattctccaatccgagtggttattaatcttgacctctttgtcttttagagtaggatcagattcatatccatctccagagctaatagaagaatcagagtcatcttcaatatgttcattagtcacaacagacttatttaacccctctgcaactgcaggtgtcgtcaaacccatcctgttgttggcttggacctcttttgctttctctgaattctggatttcaggtattgatggcatttcaggtacttgtatttcttttgctttctctgaactgaaaacttcaggtcttgatggcatttcaggtgcttgtacctcttttgctttctctgaactgtaaatttcaggtcttgatggctcttcaggtacttgtacatctatcgctttctctgtagtgaaaatttcaggtctggatatggatggcttctcaggtgtgttcaattcttttcctgtctctggattctccacttcaggtctggatggagctccagttgttttcccagagttgatggaaacagaatcttcatactttgatacattagtagaagcaaagttgttcacatcctcaatttcatctcttattgaatgtggtctaatgaaagagctgtgtgattcagggtttcctgtgttctctttgccacagtgagcacaagtgtacacaacattgctcggctgctttgttactactcttacaacttctctttgtcgttcttttttttcttcttctcggtggtttagtttctgaatcttgttgtctctttctctaggcttggttaagctagaaccagacctcttataccttaccaaagccttcctttccactaaagaaactctcttgattggtgaactggcctttctcaagtcatcatcatctctattatctccaactacctcctttacatatgattcatcgtcactcgaggaggaagaggaagatgaagacgacgatgatgacgatgatgatgatgaagatggatcctcagaagacaaagactccaccgttacattatctttggtgttattatcttcactatcttgattttcttcttcctcttcatcggtttcacttgagctatcttcaccatcactgatagactctacaattctgctactttcttcaaatagcttcttcttggctgaagctcttcttctagcttcagtttcagactcagaatctgaaagaatctctatttcgccagggactgatttttccaaaaccaaacctctaatctcaggggaacacttgtccttcaaaaatctgatttcttctgacacatcttttaacacagaagagctcggaactgatattacaagatccaaatcagcaatctcaggagaactcttctgcatcagacatgtgttcttctgttcagacacatcctttaacttagaaaatctcggaacaggtatcccaacatccaaatctgtaatctcaggggaacatttcttctccacgcccaaatcactaaccctaaaagacctctctttcagacatgggttctgctcagacccatctgttaacctagaggagctgggacctgatttcttctccacattcagatctctcattatcctagaaaaactctcttttacagagttgttaggtacagagtacatgttactgacttgaggaggaggaacactgtcgttgcaagttggtgtgatgtcctcaatgtcggagtcatagtttttaggtttcttctgccgtcgtttctttgggggagatgtcaccggagctacagtctccatcttcttccgcttgttaacagcctgaagacgctgccagctccgggacttcactctcttcccaatacactccattaaagcaaacacaaagatctgaaaaaagaaagactgttagaaatctagagaagacgacaatggggtctgtaaagaaacagagagagagaaaggtaacgaacctttagatgagaaaaaatcgaatctttcactcactcacacgggtctgagaagaagatgatgaagttcttgagtttttagagaaatttttgattttcactggtttcagaaagtggaacagagagagatgggcagagagagagagagagaagggcatgaagaaagcgtgatggcaaagccaaaccatgctatttcaggaggtctctcataccgccaaaacggtactatttttccacacactctgctttttggttttggtcaaaaaatttcttacatttcgttaaaaaaacagctcattaatcagtttccatttcaagcattgtttttttctgttctaaattacctttttgaccactctgaaattacagagtcaacacgtcactcaaaactgcaggaagagaagatatttcattacaagacaaacaatgtgtaataaattatgtcttactgcttctaatttttttttctgtgttttccttttgcttttgttttgaaatgtaatctttttagtttaccaatctagatttgttataacaatttaaatgaaaaaaatcgaatcatttactattttataaaagaatctcaaaccctttctttgaatgggattggagattggagtattattgaaatcaactaccttcctcttgctggcatttaattccactattagacctttatattatttttaaactaaagaatattgtgtttgaaagaaaaggcaaccaaaaatgattacttacaaacatatacaaacaaaggtttttagaatataaagtagcaaacaacatcattccaaggagagaaaacagagaagaatacttgtcattaatagagagaggtatgagttcttcacgcaaagtctttttgatattggaacttggtcattaatttacatcaccaacaagttctaaatatgatgaaagaaaatttatgtaccaacttcactttaagtgcccaccttttatctaatcgcagtaatgaacacatcacgtcctatgaggctttgacaaattaggaaaaaggctaaactgtgttagtcagaagataataacttacagaggggaccattattaatctcctaagtttatgtttttgtgacaagttacaaattcctcagaggattattagagaagcaaatatcgaaaactgtataacaaaactaacttcttaagaccgtaccgtcacataacatcaatgagccattaccatagccgaaaccagtcagctacacgagtacaagacttattatggtatgtagtcatctcatgatttaagggtataatgaagtatcaactgttagtcccccaagatcctaattgcatatgatcagaactctggactcgtttcttaagtgaggatttgcaaagctcaatctttgtcattgcgattatgttccggtgacgatgttcaaaatctttccggggatttagttccatcactgtctttcttttctatttgtttttgtctttaacaatgtcaaagtcaaaatctcaccgattctgtaaattccaagttatatgacgtgtcattgtattattggtgcgagcgatagcacaacctttgcgtctgcgtcggtagcgaactcttcggaaatatataatctgtaattaaaatgagactaatcccaatttaaaatcaaaaacctttttatttatttttgttttcctatagagatttcttagaaaagaaataaattacttctcttttatttttcattcggtttagctcgtggaactgaatctggtgtgtttgttgatcagagtaatacggacattgcaatttttctaaatccggcgattaaatatgggtttcatagtcggcgttgtaatcggactcctcgtcggaatcgcaatcatcatcggctttgtcaagttggagaattctcgatccaagcttcgctctgaacttgtgagaccccactctccctttttcggattgaaaatttcgattttttttcttcttaatcgggattttgtttctgttttataaggcgaatacggtggctgcttttgcgaggatgacggtggaggattccaggaagcttttgcctcctgagttttatccttcctgggttgtcttctccgagcgtcagaagttgagttacaacattacttacatattgatgtgttttcatctctctctttctgcgtattggaagaacacgaaagttttagaatttggtcatacttgggactgattcttgttgttgctttggctttttatttacttcagttgacttggctcaaccatcacttgacaaagatctggccttatgttgatgaggtatgtttctattgtctaattcgttcaagtagagatatgttatttgtattatggataaagatattgtttcttaaaggagtttttttttttgtcctcttttgattcgatttggagttttaggcagcctctgagcttataaaggcatccgtggagcctgttcttgagcaatatagacctgccattgtggcctccttaacattttctaagcttactctcggtacagtggcacctcaatttacaggttagttttgttcatttctctttttaagtgtaaaactttgtgttgtaaggtaccagaacttgtgcaattgagtcatgttgaattgttggtggaatccttttgattgtgaacttttcttgagcttgagcttagactaagaatgttcttacttttacgtgtctccacattgtaacctactattctgtgatagtcatcgaattcctgtcaaaaggaaaatattcaattgaataacaactgaggagtgaattatcaattcgactgggaaataatcaggcaatggcagcagtatccttctttacacttcttcggattgtgtgtttaaagtttgcaaaaagacgaaccataatcttaaacgaaattgtattgttgctttagaatttatgttttgcttgtgctccttggtattcgttaggtgtttccgttatcgacggtgataaaaatgggattaccttggaacttgatatgcaatgggatggaaacccaaatatagtacttggcgtcaagaccttagttggtgtatccctccccattcaggtatatgatttgatttccctcgattgcttactttgactttatattatttgtcaattcttctgtcttgcagaacttgtgaaggaaatattgatattctaacctttttttgatcaatgataagctgattacaactgatttcttattctttgttttctaggtgaaaaacatcggattcactggtgttttcaggctaatttttaggccactagttgaggactttccctgctttggagctgtcagcgtttctcttagagaaaaggttagtgccctctgcaacttttgaagctgtagctaaaattggctaagatagttcataagttttttgtacttttacttaatcgtgttgcatccttctgcttgcatacctgagcatgcatgtatgtgtgctagattggtttcattgaagaaagctgtggtgacacaaaatattcgggtgtagtgatcaattttgtatgatgtttagcttatacattcaattctgtgttgcagaaaaaattggacttcacccttaaggttgttggaggtgatatttcagcaattcctggactttctgaagctattgaggtttggcatactatttagtttcttgataccaaatatttatgtcattctagagtcttagagaaaggaaatatcaaagtggttacaagtctttatttagctatgaagtacatgtggtcgagaatcaacagggtgttctggttattgcattttcctattaagcatcttttcttgtttacaatgataggtggaatcatatgtgtttatcttagaacttgctagacaggttggcaatttgagtagacagcttaagttctacacatgaaaccttgttcatatgctatttttgtaaaatcacagtatacattcctagttttcttacccaacgctccatatgatgcaaggttgtaatctcttagatggtcctttatgccctggtgcatatgacacttaccagtaagttgatatgtctcaggaaacaattcgggatgccgtggaagattctatcacatggcctgttcggaaggtcatcccaattatacctggtgattataggtacacctcagattaaatagatgaagttgaactgttgacgttcttcagtggaggatatgctcaacttttttttcttttcgttttgactttcttactattgtgttatagcactttcgaatagtcaatgcaaatgatggtgcttgtctttctggttttggacttttattttagatttttttgtgtttctattcccagcgatctggagctaaagcctgttggaatgttagaggtgaagcttgtgcaagcaaagaacttgaccaacaaagatctagttggaaaatcagacccctttgctaaaatgtttatacgccctttgcgtgaaaagactaaaagaagcaagacaattgtaagtagtccatctaatcctctttttgtgctaaacctaccagaatgatctgatttatatttattctcatcagaacaatgacctgaatcccatctggaatgagcattttgaatttgttgtggaagacgcgtcaactcaacatttagtggtcagaatatatgatgacgagggtgtacaagcatctgagcttattggttgtgcccaaatccggctttgtgaacttgaacctggtaaagtgaaagacgtctggttgaagctggtcaaagatttggagatccagagagatactaagaaccgtggagaggttagatcggctataaatttcccctaattaaataaaccctgtgattttgtatctgtacatggctaatgaatggacgttattgttgattctctgtaatttaggttcaccttgagctcctttacatcccttatggttcgggaaacggcattgtaaatccctttgtcacttcatcgatgacgtccttagagagggtgctcaagaatgatacaacagatgaagaaaatgcatcaagccgtaaaagaaaagatgtcattgtaagaggagttctctctgtgacagtgatatctgcagaagagataccaatacaagatctgatggggaaagctgatccatatgttgttctctcgatgaagaaatcaggtgccaagagcaaaactcgggtaagtcctctcatttaaagcatcaaagagttatccatgttatagatgtttcatcctcctcattaactaatggcaattttgcttcaccaggtcgtcaatgacagcttgaacccggtatggaaccagacttttgattttgtagttgaagacgggttacatgatatgctagtccttgaagtctgggaccacgacacctttggaaaggtaaaaccaaaccgcaacaacactgttatttgatggttattattctgcgtcattgcaccaaatggatgtttttctcgtttggtttattatttattgtgttggcattgggcattggaaaaatgaaacattgtggctttacttttgtggacaggactacattgggagatgtatcctcacgttgacaagggttataatggaagaggagtacaaagactggtacccattagacgaatccaaaacgggcaagcttcagctgcatctgaagtggatggctcaatcaatttatcgtgattcctaagcttaatcggtagaatcaatttatcgtgattcctaagcttaatcggaagattcacaacttcgaatgtacatgttgtctagtagcgtcaaacggatgtgttttgtcaaacaaagacgagtctgcatgtagcccagaagctgtggactcggaatatgagttttcctctttttttctgaaaaccctagacaatactcgtgtacgtttgcctcataagctcagatgtcataaggggtttgatctttgcgtgcatcacaatccttcaataattttttaccttttaccctaaaatctcgtctacacgtatcaccatatttgtcttcaccaagtttgtttcactatcataatcagcgatctcttgacacatattgactagtccttgttgcttattatcctcaagtgaagccaaataagccacgcacactcggtgacaccttcaatgtttgccatgtgtcatagtccatgcaaatgcccacttcattttattaagacgagagctatacaaacaccgtctcttcttattcacttgctgctagttataagaatcagacagaagttgcagagaaaagagaattaattgattggtgtaatggagaaggcagttcatttatccaccaaaaatggacccaaggttccaggagagccaacgaagaccggaacctccatggttgacacggcagcttcagccgtacaaagcttcgctccgattaaccaaatccaccaacatctctgcgcgtacgcttctgaaattgttaatcttctcttttcattttatctttaaacaagaaataaagaagaggatcggaagaatgagggataatcataacagtataaaacctacaccacattttttcgtttaatagatctgtcaaattcttgtagtttagatttaaaaaacattgtattgatatcttacgtaaatcaagttaatcaaattttcttgaatttttaatcgatgtgaacacgtgtggagttgtgtacatgcatgcagaatgaaacttaactatttcatatgagtttgtttgcatcagtaaaaagatgaactatatatatcctctcctttttgcgcttgtcataggtttcatttctatgcatatgacatgacccgacaagtggaggcacaccatttctgtggtcacatcaacgaagacatgcgccagtgtctgatctacgacggtcctgatgccaacgctcgtctgatcggtctggagtacattgtgacagagaagctctttatgacattgcctgacgatgagaagaagctttggcacactcacgagtgggaagttaaaggaggcttcttgttcatgcccggtgttcccgaagctattcaacggcaagatctcgaaaaagtcgccaagacttatgggaaagtttaccatttctggcaagtcgatttggggcatcagcttcccattggcttgcctaatatcatgatggctgttactcgagacggacaactttatccggaaatgatcaagggtacgtagatttgtcatttataggttatgcttagtcaaatatgcttttatgaaagttaacatgaacattttgaaatgttcaatgggtgaccgcagagacggaaaagcaatttggagtatcgatagacaaggagcgagagtcaagggcttatatgaagggtccagaccatgggatccatcccttggcaaatggaggaggcaaaggcctgaagttggagttgcgagaggttgacataaagccggttgagtccgttccaagagtcttcgtttaagttatacttaaatagacaacttaagaagaataaataaataagcgatcgagcttttcttttgtatagccctcctcgaatcatgtgtataagatgtaaaatacacttgaagtagtatattatggtgtcgtctagtggttttaaatattacgtcttcatgactccagttcattatcttttatgaccctgcgggtaatcgttattataaccttagagaaaagatgataatactatgaccaaatggaaactacaaaatttgttgaatcacactatgataaataaaggccccagtgaaaagaaaggaacagaagcgtagtcttgtcatgtgtgtgtataacaaatgtaagacacttgaggcattttggtgagcgacgactgcatcttctttatttgaacttgtctcaattgaaatggaagaacagagagacctctgtgttctcaagattgaacagccaatttctgaagatgttggaagaagacttgaagactgacatcatccgtgaagattatatcagagcctgcattcatctcgcttgcattgttgtatgttgctgacggatttagctttgctaacagaaaccttgcctgtccattattgccatacgtattacagaacatcagtaaacactaggcaactttcagtgtttcacacttgaacaatcaactacaaattcagagatgaaaggggttaaaaacactgacctgggatccatgttgatcacaaacaactaatcttggtacagggaaacgatcacgaatgatcatctgcgcatcttcttgaggggcttccaagagttgggcaaatgccttgacaaataaagaggtcagacgagacatgtaaggctcatattcgagaaaatccaaggccaatgcaacttgcatattcattacctggtgttcaggctgattttgatatcccaagttgcgccactgtgcaatggtcattccatggaaaacgacaacactaatgtaagaatccaacaggaggatacggtctgcaccaatggaagcaacatccaacaatgcaggttgaggtagtgagttaaacgaatatgttgttagagatggctgaatcataacagctgcgttcgaaatattttctcggtttaatagcatgcggttgtaagcagtttcgtctggactattgttgaacacctgccaatatcaccacaccatgagtacatttaaagatataaatttaatacaacttcccaaacgtcaagcttacctgcacaaactgtgagcgtcggagattgaacgtaaactgagggaatagtgaaaagtttggatttagagtaaatgaagcaggatcatccttccggtaatcaccaaatttagaacaaagacgaataaggttccggtccagccatcgcgtagcatcaaatccctcctgaggaaacataattgacagaaattaatacgtttgataaccaaaatccacaaagtttgggttaaagcaatggtggaaagatattcaaattatcgaatgaaaatccacaatatacaagttttaacattccaacatacaaacaacatttttttcttaactttgtcccaatacaatataagaattagcaaaaatgcaaatcggtagaaagtaccaaggactgtagattcaagaatctaagtttgaaagttcctcaatttaaaatttacctctgtttccattttcaaggaagctaatctggccacaaccacagcagcagtttcttgatcaaaaccttgcaccaattcctgcatatacaacacacctcattagcatacatgtacacgtacaaagaaaaggttaaaaggaccataagagtatgacaatgggaatgtggaatacaaacatgcaagactagatttcaccataaataagggcttataagttaaacattacagaaacgttgatgcatactccagaaatctaaacaaacttgacagtaacttagaaaactgttttctccaagttgatgaagaagtgttaataaaaaaggaaatgatgtgtcaacgtatcttaacagaagcaaactgtcagccaagctactaggaagatatgagagcataagaaaaatataaaattcttgcctaactagagactagtcaaatgaatcatttacccagtgtaatcctcacactgaccattcaaatagctaaagagactaacgagaatcaaagactaaaaaatgcgaaaacaatggaccaggacatattcgatcattcttgggaaaggaaacccataatgaagtagccaaatgcaaaaatatctagaaactaatctggaaatgtggaaagtactaacctctgtgctaagaccagtatctacccattgtctggtaacagtagtaactcgctgtaatgttttaccttttgaattttggtagctgcaatcatatatttcagatcaaatttctattatttggatgaatatacccaaacccagaattgcatgaagagcataccttgtcataaattgtaaatatagttggttatttacacctccaggagcacttgattgatcactagaagaaagatcaaagaagactgtcaaacaagtccttttatcgaggccacacatcttccattgtgtagtattcccctccccaataactgtatcagcaacgctagggcctttctgcaatttttccaaaaaagagaggcataactgttaagctatctatcattatttgaaaacaagaagatcaacttctgagtatgggtagcttcaaccttttgcaaagacgcacaaggtccaataatcccttggatttttatgtcctttgaacagcagatctcaagtgtaccactgaaatggtagtatgaaaaagagtgagaatgcgactaactgaagatgtcttagatgcaacataagacacttggaaaatttaatttagcatgcatggacaattgaaatagcacgaagcacatcaggctatagcaacaactcacttgaaacaaaggccgagagactcttcgccatcttcaaatactcgcttaaaagaatccttaaatacagaatggccaaaactttctgataaaacaacaagacctccagttctttcaaccgcagctttcatttcagcaacaccaacctaacattcaaatcacagataacataattatgatccaagttaaagtagagttcaacagaatacccaggctctgagtaaagttagagcacacagcaaggaagttaatcagaggaaatattttacaccagattttctccttaacatgaagataacattcagggaaagtaaatacctgatcaagtgcggatgcaaaaaggtccagtacatgtccttggttaaccagttggtttgcgagcgcatcataaaatttctccgctttcttatagaacggagccgcatctttatcaagatctttatgtgaacgcaaaggttctgatagatcctttgacacaatctgcagaagccagaggtagtactaactcaaaggaaaaactttgtatttgaggccaaacaattaacaaggaaagttcagagtgtgctcttctcctaaacacttttgtcgaccattatacttgcagataaatggtcatctaatatgaagatgtatctcccacacgttgctcagcagaacatgacgaaaaaatacatttagttctagattggagcctaacagatttgcgatgaaaaagccatgctatcttaagcaacatagctagttttatcctacttaggctagatgaagtatccgaagctctaacaaaagaaaaatagcatttctatacatcatcttctcctatctatcatggccaactgtcacccttaccactacaagaggttcatacattaaatctaaaccagatattgaacaattccgtatgtaaaaagccaaagtttcagccgcttttctcaagtacaccgtcacagaaactctaaaaagaaggggaataagcaaatgaagttaccgtgcctggcccctcagaacatggtcctccaattaaagcaacgattctagccccagttccaggaaaacaagctccaagtagtcccgtagccacacttatagccactcccgtgcatcgtgactggcgccgtccagcctggacaggccactgatccgtctgtagctcttccaacagctacactccaaaacaaaaacaaagttctttaccatcatcatcagctttaataaaattatgcaatatcaaaaatccatcagaaaaaagtagaaaagcaaaaactttatcaaactccaaccacaaaagatggatgaacttaccaaatcaatcgtgaattcacagtcagaagctggcaacaagaatctattaacacccgaatagccgaaattggcagaattatccctccccattggaaaaccaccaaccgggtttcgtctcccagaagcaccaagccctaactgctccaaaacttgatctttggagatctccttatctcccctaaagacataaactttagtcaaatcagaaaaccccagctcgtgaacatgcgcctgcgtcccaaacgagacaaacccaaccaatgcattctccggaagcaacccgatcgcctgcttaagcgcagatttcgcgtatccaaactcctcttcaatcatacacgtgtccaggacaaaaacaaacaccgacggcgaaggctgaccagaaacagcaccggtctgatcaaaattgccaacaccagtaggctgagaagggttaggcagagtgtattcaacggtagtgtactgtggatagagctcacaagggacattagtctcggacataacatggtagtgaggagggaagtggtttctctggaagcaaataggacagatccagatcttggcgaggaaatcaacacgagcaaaaggattaagagcagcggtacaaatgcgacaacgaagaggagcatattcaacagatgggatatcccggtggtaacggatcggagagatacaagcagcgacagggatcacacacttgcttgcttcaactttggtgcgaggccaaacgttccacgtcatacgaactccatcgattccttctggatccatactcgccatctctgacatggtttttaagggtaaagatccgaaattggaatgaaaaatttggtctttgtgattctgtaaattcaggggacctcagaagaatcaaaagcagagacgaaactgtggaaagggatctatctatgtgagagagattttatgagtagagagagtcgtctgtctctaataacatacatacatgcttttttagggttaaaaagtaacagagtaattaattgcaaaagttataatggattttgggttttttggcaactaattcatcatcaacttatgttaacaattgaccaaatcttctattaaataaaaaaaattcaaaatactgttttgtttttctcacattttagaatatgtgagatcacttggccaatccaaatcttctttgtcagagttgtttcattgaaaaaacaaaaataattaaaactgtgattgatcgtatatttgcctttatctgtgtattagacagaaaaaaacatatcccaattatcaaagcaactttatgtaacccacatctaaattaaatattagactaacaaattaaatgcaacaaatttaaacggggatcacaataacgttagtaatacaagttttattgaatcaatgaaggtgcatataatttgtaaactcaactatacatgagtcaggttcccatgagtcacctacaacatgaatctgtgcaagacacgttgtgacgatatacatctataaaaacatattattaaattgtagttacgaaatatacccaacattgcatgctgattgttacatttgttttaccctcctctgttttataaaacctcaaaacagactcttcacaaaagcttccacattcttgtccgaagatcctccttctctacccgcttcagtcgctaaacgcttccatttctctgcgttttccctcagctccaccgatttcgcctccatcactgcttccaaacaccgcattatctctcctctctctactaaaccttccgagttctctctcaccctcacacctgtcttccatatttcttccaaaagcttcgcatttgctggctgatccgaccacatcggaaacgccaccactggaacgccgagaaccaaactctccagtgatgagctccacccacaatgagtcaaaaaacaacctatggctcggtgtctcaaaacctctatctgcgaacaccacgagacaatcatcccaacctcttcaagctcgtgtctaaaaccagctatcttctcaatctctgtctcttcttctccttctattttcgcttctctgttgagtttatcagttataacccacaagaacggtcttcccccttctatgagtgctctcgctagttcctctatctgtttcttcgacaactcaaccattgttccaaaagaaacataaataacagaggactctgttttcgagtctaaccaaagtgtataactactactttgatgatctcttgataaatctttacctgattcgcttccagtgaaaatctccgcaggaagtaaaggaccaactgccaccatttctatattcggaatagctgttaagaactctggctccagcgaatcgaatgtgttgacgagaattttcgggttagattcttctttgagaaaatccatcagttcttgatatactgcttgtgcggctttgttcgtgttggaaggtgagaggaaagaaggcagatcgcggatttcgagagaaggtagattcgggaactcgaaaacggagttgtttcctgtagagtaattgtaataaatgtcgaaagcgaaggctggttggatccagagatgaacagagggaagatgaaatctacgcgccacttttggaacccagttgggaagaatcgtgtagatcaagcaacttacgggagagtcaccattctgattagcttcgatgaaatccgatagagctttatcgccattacgttcgaagtgtaccaaccggttttggacgtcgtcggtgttggagatgactccgtcgtcgaatccgtcggagaaagtaaggaaagagagattttcgacgttgttgtggtttgggatcatagagcggtgaatgacagagagacacgtggcgaaagttacacgtgcgccagttgttttgatgagccgacgagcaaaacggagagatgggttcacgtgaccttgcgccggaaacgttaccagtagaaaatgcggttgcgccattttttgaagtgactttcttaatacgtacgaggtgtgtctcctcgtggatttgtgctgttatatgtatataaatggaaaatatattagatgagagtaatgggatttcatttggggtcatgtgacatgagataacatgttttaccgcttttggcgtgatccacgacgtacgccatgatggagatcataataagtatcatgctgaatatactatataatttatttataaaaaaaatagaacgaaagaaaaagtatcatgctgtcaaaaagaaaaaaaatatcatatttttatagagaaaaaactcgaaaaatatctgtttaatatctatagttgtttgaataatatctaaattaattttatgtttttaaatgcttttttaattcaaacattcaaattcatgattattatattttaacggatgttctaactgtggttgaaatttaactcatgatattcacgaaatgtataatctattttctaaagtttacaaatatattagtgtaatctaatggttaaatgtggattgattctcttcataaatctaagttcgaatcccccttctttcctaattaatccaaatttattaagatagtcaatccctctttgtcctaattaatccaaatttactaagatagttagtcaatccacgtttaaccaccatactaacctaatatatttgtaaagtttagagaatagatagtatatatatttataaataccatgagttaaattttaattatagttagaacctccattaagtaccaaaatttaaataaacgaaagcttttaaatttgggaaaatttaataatatatgtattaaatggacaaataaaagttagatgagagtttttttaaattttttattataaaataatttttttgcatgaaattgtttttaagataaaattttgacataaccaaatattattttccgccacgaattgagtctacgagagatgtcctgtctttaaactcgtaaagttttggtcttacccaacccaatacccacaaaggtaaacgacataacggttaataatattctaaccggtttataagtttacataaatcatttactaatccgcgtgtaattaagttttatgaaatgtggttattttgtaggtcacgtgaaatttattaattttttagtacttgtttttcttttttgggttcaactagttacttttttcctttgacatcaaaattattgtagacgagtggtccatatatagatggtgaaatgaaatgaatattgagtaataaataaatatagaaagtgaacaaaaaaaattagtggaaaaggtaactggaaagaaaaggcttattggcttggcaagattccataagtttatttcaccaaaaaggaaagagtacttggccttgctctctctctcttttaaaatggtaaactggtaaagataggagactcaatttctagttcatcaaaacatatttggcgttattatttctgtggtcacttgaataataatgtctcagcttctcttccgtctctcaaaactctcttcccggaataatgagcttgtatgtacgcttctcttctctctttattggtttcgctctgtattatagttaggttttgttttagaaggctttgcagggaactaatttgtgattgtgtaactaagaaatgacatctggaagataaggatttgagtatgcgttacttttctgttctgatgtctgagcattatataattaattggcagatacacaagagcgttcgcttgttttcaaccagcccgtatttgacacttggcagcgttgttgaagacttgcctgaagaagacggcagctacatcggagatatcctcttgttcgatccggccaaggaagagttagtcacagtccgggacaaaacaattcccgaaaagctcgttaactcgagagtggtcggagcttcacatggatggacatttttctctgaccgatgcaatcataattctgtatgtatcagcgacctttttactcccatggcttccaaatcaaacacaaagataattcctctgcctctgcttactactatgatctatggccaaacagaagctgtctggaacgtggcaatgtcgtcatcttctcctcaccaagacaatgaagaagaagactgtgtcgtggctatcaatttcttgggtagccaactgagtgtgtgcaggcccggtcgtgaccacggttggactaacaaacaaatccctttcatctgctcggaaaactcaaatcttatgtactcgaagagagatcaaaggttttatttgcctgctcctggaggcaattacttgtgctcttgggatctccacttcgataacgatcctaagttcaatgagttggtgtttcttaatctccctgagttgccacagtccgagtgggagctgttgaattcttgtttcaaggaggaccattgggtggagtcaccttccggccaaagtttcttagtcaaatggtaacgtgcgagtctaacatgtagacagaaatcttggtcaatgctaatttgggtcttatatgcgtgtgcaggtactctcacatcccttctcaacgatacaaagatccgatattgatggtgcttagagaggatgaagaaacagaagagggaacaagaaatatgtgttacaccgaggacattggagatctttgtatcttcctttcaaagagtgatcctttctgtgttgtggcaagctcttgccctggtctcaaacccaactccatctacttgatgggccgttgctttgctgtttatgatctcaccacccgaaccgcccgtcacttcaaagcccccaaaggtggaccagaaagagttcctttcctcccttattggcttcctccattttctatctagttctttggttggtgttaatgttatatgtggtgtgtttcgattttagtttctcttttagtttctctcaagcgttttggattgctatgatcatctttatgttccctttttgaggttattaatttataaggccatggttcgtggcacttattcttttagaaatgttggctagctcccatatcacattaggataatcaccttaagttcattgttaaaaaatgagcttatatacacatattgaacctccaagagaaagtttaaaggaccctttatatcgccaacaaaaaagatatagctgcgcaaaaaaatgaaaatgaaaactctttgtagttaaaaaaaaaaacaaagataaatcgagataagctcaagaggaatggtatgtccaagattccatttcagacgggattctggtctgggatgttttaacttaaaattgaacttagaacattaacaatctttaggtgttaccaatttaaaccggtagagagaaacttcaagtgtacacaaagacagaaatagtatgactagatagcaaatggaggaagccagtaaggggcggtcagagcgcttggtgcacctttgggagctttataatgatgtgcctctccggtagtgagatcgtaaaaaccaaagccacgtcccatataatagacgcagttaggcttgaggccgaggcaggagctagccgggatacagaaagcctcgttgcttgcaaggaaaatgcacatgtctccaatgtcctcggtgtaacacataatttttccttccgtcgtctcctcttctctaaaaaccatcaacccctttgttttgtggtagattccttttaaatttgacgaaaagaagccaagcgcatacctgcacgtaggaaagcacacgcttattctcagtattttcaatgaatttactttacttgtataactatgagtgtatatatagatagaataccatttgactaggaaacggtcaccaccagaaggtgactccacaaggtattccgtcctggaacatgaactcaaaagctcccactcggactgatccaacactggatggtctcgatagaacaactcatggagcccaggggagtcatctgatttgaagtggaggtcataggagaacaagtagttgcctccaggggcaggtaagtaaaatttttggtctcttttggaatacatgagacttgagttgtgtccaaacagttgaaaggggttacaatgttagtccactcaaggtcacaaccgggtctgcacagactcagctggatacccgaaaacttgatagccactacacagtcttcctcaccaagaggagaagaggaggacatggctacgttaaaaactttttcggtttggccagtgggcagagccgtaagcctaggcagaggaatcatgacagggtttgttttggatgccaaaggattgaaaatgtcgctgatacgtacggaacgatcagtccggtcacagaaaaatccccatccatgggaagctcccatcatttcttcatccatgagctcttcgggaattgttttgtccgggaccgtgactatctcttccttggtcgggtcaaacaaaagaacatctccaattttgcagccggccggcaaaattttcttaaccctagtgccaagtgtcaaataagggctggttgaaaacaaacgaatgctcttctgtatctgccaagtaattcggacatcagaatgggattgtaatgcaaacactcttatctaactatgatttaaacccaatcatctccaccctccgattatcttcttgatgtcactacttacagacaaacccaaatttgttccctacaaagccttttaaaacaaaacctaactaatacataacgaatacaatagagagaatgcaagagaagtttacatacaagcacatcgttccggggagagagtttggagagaccaaagagaaattgagacattagaaattatgtttcaagagaccacaaaacagagttttttttttttaaaaggctaataatgttttgatgaattagaaattgagtatctcaaattctcgatacccaatatcaacaaataaatcaaagcaaaccaaggcttggttgttggtttacatagcattcttcctctttccttttttggttaaaacagactaatcgaatcctccaattttctatattttttcttcactttctatatttaatttattacgcaatattcagtctatcgtggaccactggtaaaacctacgataaatttgttgacaaggaaacaagtataccaaaataaaagaaaaaacaagtatacaatataattcacgtgacttaaaaactaaccacacaattcatacattgcttaggttgttcgacaaaaacttttttacacgtacagaaactcattgattaataaatataatccacatagataaaccaagtgaaccacattagacaagcgagcccgaccccgataagattggtaagcgttgatgctagacgcctacacgtcttgttattaatgtttcgactctgagcttcatgttttttttccccaaaatgtctttttctctcttgttcactactcctagtttccccattctttatgcagtatatatatatatatatatatatatttttttttttttttattctttaaagagtaacttgaatatttaaaaacactgagagaaatgaaacaagcaaacaaattatgggatttaaaatttaaagaaaagtgtaagaaactaaaaaggaaaattgttttgagttcgccgtgtcgcgtagccgtggtcaccgcttcatgctccacctcatcttgaaggcaagaacacacttcctagacaaaaacatattagaaagagaaaaaaaaaaacaagaatatataacttagcataatagatattaaattagaaaacagtctcacaataagttaacaaagcagaaaaaaaaagtcacacaacaaaccgatcgaagagagtcaaacgacatagtttattacataacataatacttaatacagtagctagttttctattttttggttgacttggagctgctggctccacctccgccatcctgaggcatctgcacagtgtagaccgtctccgaagtcatattctgggagacgtcagtaggagtcctcacgatgatatactccaagagagcactcttcttcacgatgactatgtatgttgtttgtgtttgagtttaggtttagattttagatatctagaagaggttttatataggtaatgagacgagaaagaggaagatgtataataaattttcatgggagaaagaggatgataattcattttcagtttcctctattgttcactgaaatgcaaaacaagcagagagggcacagattctataagggttgagtaatggaatcttgggttaaaagccgagaaagagatgtctctgcatgaagaagaagatggtgtcgatggggagatagagaaagatatgaactgtaatgcactatgactataacagtggagattgtgaccccacatcacatgtgctatcataaattaactgagtaatacactaatatgtgttagcctgttaggtatataatagtaaaatcctcaagtcattatatgagaaccacgttatcaaaaccgtaaatgtaaactaaggaatatgatcaaaacaaactttaagaaaaaataaaaaaaattggactataataaccgagtacattatgtggacgcattgatagaagaaagaggaagatgtctaatagtaataactataaggttgagttaagttattacttttttggttaaaacttaaaagccaagaagagatgtctgcctctggctctggcatagtgcataatggttggtgttgatggggagaaagagaagaagtgaacttgtaaatgtaaaaatcctcaaataaataaaacggacccacattctctgtaaatgtaatttaaggactatgatcaagacaaagttatacactttaaccaaaataaaataaaatctttattattatgctttatttctaatgcatcaaatgttttatttttctaaataaatatattgtataataatataaatgctgtaacgtttttgaaaatatctgattctttttactttgctttataagggaggtctaagtagggtgccaaacacaaaaagatctaaacattaaatcaaaattgccaaaaaaaacaatagacttgatccaaatttggatatttagacatttatttggatcataaagactgcaacaactcagtggttcattggattccttcttgtttcctaaattaaacttgttatgtttgtgatcaagtaaatgcttgtgttgtgttgtgtgttttattgagtttattgcttgtgtacatttcgagtttttttagagtgtatgtcaagttattcaagaatacacatttttcaaaatttgaaattttagatcctcaatttttagatccaccattgggctgtctcaaaactaataaacactgaaagtgtctaaatttttgattttccaatattaaaattataaattatgtttggatccaaccattaaggatggtctaagcgtctaaatacatttaggactaattctagtcataattatttctaaatatcttggacctttctatttggcaaggctgagtggttttttttctgtcaaaaggttttgatttttgtaatagaaaattacaatagggccgaaagcccaacaagaaaacaaaacgaaaagagatggcccaatcacaatacgggctcgcctgaaacctaatcggaagaacaacggaggtagaaaatggctaaacgcccatcgatcgaacacgcttgcttggagagtctcaaaaaggtgattcaatcaaacatgttttgtaattgaccattattcaaaaaacatatttatctagatggagtaaattttatgttttaattgaatttgatattacaaagtgacagtattagcaaataacactccgccacttctagacaccaactcttttgtcctttatttactttacttttacctcctctgcttcacacaagttttgaataagagattctccacaaatatcctccacaaaagcctccatgttcttatccgaagatcctccttctctacccgcttccatcgctaaacgcttccatttctttgcgttttccctcaactccaccgacttctcctccatcacggcttccaaacacctcctgatctctcctctctccaccaaaccatccttgttctctcttaccctcacaccagtcttccaactttcttccagtagcttcgcgttcgtcggttgatccgaccacatcggaaacgccacaaccggaacgccaagaaccaaactctccagcgtcgagctccacccacaatgagtcacaaaacaacctacggctcggtgacttaaaacctctatctgcgaacaccacgacacaatcatcccaacctcttcaagctcgtgtctgaatccagctatcttctcaatctctgtctcttcttctccttctgttttcgtttctctgttggatttatcagttataacccacaaaaacggtcgtttcccttctatgagtgctctcgctagttcctctatctgtttcttggacaactcaaccattgttccaaaggaaacgtaaataacagaggactctgttttcgagtctagccaaagtgtataactactactttgatctttaactgatttgttggtgcttcctgagaaaatctccgtgggaagtaaaggaccaaccgccaccatatcgatattcgggaaagccgttaaggcctctggttccagcgaatcgaaagtgttgatgagaattttcggtttggtttcttttatgagaaactccatcatttcttgaaacgcatcgtatgcgcctttgtttgtgttggaaggtgtgaggaaagatggaagatctctgatttccagagaagacagattaggtaactcgaaaacggacttgtttcccatgaaatgagtgtaatagatgttgaaaaccaaagccggttggatccagagaagagcggagggaagttgaaatctacgtgctacttttggagcccaattgagaagaatcgtgtagatcaagcaagtcacgggagagtcaccattcttagtagcttcgatgaaatccgatagtgccttatcgccgttaaccttgagattcaccgaccttttctgacggtcttcgtaggtggaaatgcctccatcgtcgaaaccgtcggagaaagtaaggaaagagagattttcgactttgttgtggtttgcgatcatggagttgtggaagacggagacacaagtgacgaaagtgacacgtgcgccggttcttttgatgagccgacgagcaaaacggagagatgggttcacgtgaccttgcgccggaaacgttaccagtagaaaatgcggtggcgccattttttttctacttgtcttagctccactgaagtgagtatcaatacaagaatctgtgtctctccttgtggatatatctgtgctttcatatgtatatatatacatatatataaatatagatgaggaattggattttgatgtctgcacatgcatgcgtattcatcaaacatacgcaaaattgtaccacataacttgtgacgtctgcgatgacgctcactagataaacgcttcatcgtataaatccaaacttgcggttgttttttgcagatttgatgtttacatatcaatgaacatacaaacaaaaacaacatatagacaatttcatttcagtcatataaaataagagtgaaaaagaaacagagtaattgcttttatttgagttttataacttttatgattaccaactttcttttagtactgtagtttttatttggaagaggaaaaaaaaacagtattgcactatacaaatgtagaaataactagcaacaggtaattgagaccattatcaacaatgaatgattgattagtcctgtctttatcatgacctatgtggaaaagttcaagtgatatacattttctttttgacttttagaatggagaaccaatgttttcgtcttccatatgaaaaagatacgtctcatgcactttctattataatggacgcgaacttatggaaatggaaaataattaacatatatctatgaaagttacaggaactttctaactatagattacttgggaaggaaacaataacagataaccattaaatctacacatacgccatttacatgtgtacatgtcactccttgttttttgaagaccggtcttttctttgaccaccaagaatacgagagatttgtagacctctactaaaggcttggttaaagagcattcttgtctggaactcagacacaaaaggaaaccaggccaaaaacgcaactggtgtgaacagaagcaagcccatcacgatctcgtagcctcgagctagcgtcctaactgatgaccatatccctagctgttggatcagaggcttacacgcttgtgcaatctgacgtggaggacaaaacaaagcaactgtcacaaaaaccagacaaaactggtatcttagatacaaatagaggagtttgatggaggagaaagacttacgagaagcattccccatccagttggcatgaaggcaagcatgcagatgaataagtctttgattgttatcagaggaagtgcgaggaaagttatgagaattgccacaaatgtgaggaacacaagaccctttatgattctgaatagaagctggaaattcgtgctgaatcttcgccttccaacgcccaaaccctgcaatgatcgttacatagaagaaagcaacacaatgttaagatttggcaagaaattgaaatgtgaatgtgcttaaagattcataccttcacaatcagtagaatgaataagatcacaaaccatgacgctccataaacctgaaaacagagtcattatcgttcaataatcaagagtttcaccattcacagggaagtagttataaggttagcttacccaaaagctctgattttttcctttgaaggtactgagatgatacacaagtccatattgaaagatgaagaagcgcaaggccaaaaagatctcaagggtgataccacgaacccctgaatgtctaagatgttctaactctttctcccaccaagattcccaactcttctcaggagggacaccaattcctcctcggttataaatccatttgttccagtctgtccagtcatcaacaatcttttgccactcaaaaccagacggattgaaaaggaaaggagcaaagagccatgtcaccaccatgaaccatatcgaaacagtgatcagaatataagtaaccacacccctatatgattgaccaaagatctgatataccagtagaagaatcataagttcaatgcccttcacaaagtgactacgggaatagaacctatagttctcagcaaatttcgcgtggaagaccacaaaccctcgaccagttcctctatactctgcgcctccatgaaacaatgtccttccgtagtaatgtgtttttgtcccgagctgaaacgtgaaaaagacggaagcaagttgtaactgcatcagcacaaactcaatcaatgcattgtggaaccccctctcaagtccaatctccatcatcataggcaaagccattaaaaaaccaatctgcacaaatgattgagaagcaagagctgcctcaagaggcttattgttacggaaagctcgttggctactcaatccttcttcaagcccactaagtactagatataaccgtccataaagaaacacatacaccgtaagcacggttaactgtcaaaacacacagataatggcttcagtcttgagaaagaaaaacaaacctgccatgtatatatctagtgattgagagataaaaagggagaatctcaacctaccatggtactgaagtagaacccaattgtggtgaaataacaagacagcatccggaagaaatcaaatcggtgtcctagcctataaaggtcgcgactcaaagtttgctcgccatttccattggcgatttttgcctcaaacattgagatctggttgaggcccacatctctccctttaccaacttgtatatattcatgatgagtcacatttccttcacgcagagtagaattaaaacctgaaaccagtaaaaaggtatgagaaaaaatgtaaaaaatgaagtagatcatatgtgtaccaccaaagaatatgagatcaagctagtgcctgcaaatatgtcttcactaagattgatgactttagaagctttgcagataccacctctggtaaggtgaaacagacgatcaaaaatatctggatgtccgtaatggaatcgtactctggagcagcaacagaaagagcacatcaattttgacaactacaataccctgacaagatttcagaacagggaagaaacttacttcaagggactagctagcactctttgcccaatcgttacaaaactgttctcttgatttgacataaaccatgcaagagaagacacacttcacaagaaaccacaaacataggagatcagtatgcacacagaaactaaaaatctagaagacagaaataggatcattctgttagtaccttccagtgaaaatatgctctctaagaccaagaatcgtaggacatcttacgcctccatgcttttcaagaaactcttgcagcaagttcctcattttgaaagcttcctccatgtagttgtcctaaggtcaaatatttagaggttaagagtctcctgcggtgattattctttgaacaattttaagcatattatatgtgattcattagcgacacatgttagacaaaagaaaactacgcatcgcacctgattcatgtctatcgtctgcaacccttctccacgggtaaatatgatagcatggttctgattttccggctttccctctcctagtatagctggtcccggaagcttaatccgataaatgagctgacagaaaataaatataactcagtctctcttgaacagcagcatctatatcctctgacctcactgcataggattaaactcatcctcgtattttgggaaaaaaaggagcaccaaaatgttaagtattttacttagttttctcaacttatacctgatctagtgtttgaacagattcagaagaatccattggtttggtctgtggagcagcttttacaagcgctgagtaataaattttctcctctgtccccttataactttctttatgtgtttgctctacctcatcgatataggcgacacgaatagacggatacctgccatgaggaaatagcaagcttaactaatgaggctaagaactaaataacaaaccaactggaaagataaaggatgaaagaatgaagatattacgtcgtcataagtctcaatatgtctttagcacgttggtcgccagatctcttatgaatactgtattgttgacaagaaaccacaaaggtgaacttcatatctgcaagtgcttgacactgcgcccaaagtgaccctccgctctttgatgcttcttcactggttaactcgagagccttgtagccttttaataattctagaacaaaaacaaggtagtttaaggaatgctttcatactttttaagaatcgaaaagaatcacagagaagattcttcaagcaccttcatcctttgccatatcaaggaaggcctgaagttccaaagcctttcggtaatacatcattcctcgcactagttgaaacagatcagaaatcaggcacaacaagtttatcaaaagataaattcgtcaggttagaaaaatgaagcagaattcaaccgattaagagaggagactaaagtctaccagttttagtcagagtttggcctctgtaagatgcccaaagacgaagctcctcttccaaatcctctcttgctcttagttcttcttcgttgccacatttaactcgttccagaaagtttgtccattcatctgatgtaagccatggactcagctgatagctcaaacaaagtaacagtaccatatgaaaaaattaaaacagatggaaaagtgaaacctgggaagatcttctgcaagtaaaagagtatagaaactccatcttcattttgctgttctaagccaaatatggagaaaagaacatcctctgaaaagtatggtgtaaggaccctatgaaaaaacaaaatggaagatgttaagatatagtaagcctacgagaagatgtccatcgtgactggaacctacgagaaggaaagcatgttgcggatcttgggtgcaggaggcatgtccatgaatagtgaatttgaaaagaaagtaagacgccttcgagcttccaagttggatggaacatccatagctgactccttgacagtaagcaaaagatgaagcctcttaatctgcaaaagaacaaaaacagaggaaagcagacaaaccacttagacatccctcatgccaaagagatcaaatgcaccactgtggtggaaacaataatgagagaagaataactttaagaggaagagacttgctttttctttccaagcttccgtttgagaataaactgggaatcgaagttgactgaaatatttgcgctgttgatgaagaggggtcatgacgtcatacttgacataagatccattgtgggcagtctctagtaagctatggaatggagactctaaatcagagtgcttcaaaccaaaatgatcgatcacttagaagacggctcatagaaatggtcttaccttgggacttcttcttccatgatgtctctagtcaccaattctaacatgttcagcaagacaattacaatttgatccttgtcctcctccctgttttctagctgttgcaagtagaccaacctcagttatttccttaaattcatgctaaacttagcagagaaattcatcatggtaatgctacagtaagtaccaaatattcgattagccgaacgaactggccatacagatcaggaagagcactcaggttcaattctgttatcagcgtttccttctcaatatgttcatcaatcttggagaaaatgtcgtttatgaccctgtagaaaaacatgtaagttagaaaagggtaatgtatatatcctggggtggaacacaggcaagggattttaaaaacttactgtccttctcgttctccgaccaccaaataattgatgagattcttaaaagaggcatagcactctctaactgcacaagtcatgtagctgtcaacagctaatctctttttcagttcacggtcttttccattgctgtctttagccatatccaaagctattgggatctatgacatttaatcatgaatatgtcaaaaaatcgaatacaaaaacggaaaatgtaactagatataagtcacaagattaattttcaccttactagccaatagaaaaggtggccaccggataagatccaaatcagggtcagaccaatatggcacaagcaatagttccatttccctgtacacaaaccaacattaacacagaactcttattactaattttgtagctacttttacaaacgtgaatagaaagtagagtagttataggtatttggacgaggaagccggagaggtgattttagagagagtaaaaggaagagaagataagagcggccaagtgctgatttgggtgagaccaacatgaacaccaggtacagaaaaacatgcctgtatttcaaggctagatagttgatcagagagtgagttagattcctgaaaagaccaatctgtatacggtgaataggacttctcactgttcttttgaaaccaatggtaatgtgatgagaccccaaatatagttcttaacttagattggctctaaccctctgatagaacactcagatgcttgaatcaaaaagttctaatggtttcatcacatactttaccattggttttgcaagaacagccaataagtactactaaccttaaaatgattaatattttcatgaatctaattccttctctcatcaaatatataagtttgtaacacaggaaagtttataatgtaactggtgttcatgttcctcaccttctacggcatgatggttgtcggtgtcactcaaatcaacatttggtcgctgttatctcctcttactccctctgaaatctcctctttggctttctcatttaagaacctgtaactactcttctttctataaaagtttgaaaaaggacctagctctcattttcagagagggataaggatgaaagattcaaagccagggcaaacctatcactaatcaagtcctcttctcggaaactactgattattttgttccacatctgagcaaaccgcgctgcttccttgtctttactagatgggagctggatttacaaaaaagagcagaacagaaccttgaatagagttctaataaagaaaaaggatagtggaaatagctctttagcttaaacaggagtaaccagacctgatcaaacttgcgagagaaggtcgccctaaatctctttttctttgtatcatcgctgttatcttgtggtaccaagcaatcattaaaggcccctggtatggactgaaatctcgacctcaacattccaagtgttcggatctgaagtgaaacaaagttcttttaagaaactatccacttggaaactaaagaagtgagtgtatgccactccgtaatgtaaaagtaatcatatttgcttctgatggaaaaggaagacaacaataaacctctccaagacggcggaaagctccatttaaacctccgaccagagttgaaactatagcataccatatttgagtgtccatgaaataaacctgcatatagaaattagcataccacaggggaaaccataaaaacaaaggaagatatggaaatgaacagtatgtgcaaactcacgagaataactggtgaccagagcgcgatgacgactcctaaattattcttggctgcaaaaaccaaagaaacaatggcagagttatttaataaaacagcagaatgcaataagcaaaacctgaaattatgttatccattaccgtgagggaaaaactcatgccagctgtagacggatatatggattcgcattatatctttggttggaccaacaaggggcttaatctgcatcgaagatggaaagtatgagaactttacattcataaaactgatatgagtatcattaaaatcttagtggagaaaacgtttgcaacttccaagtaaaaagtttcttgcatattgctcatgctagacttgtgtaattaggaatacaagtaaatgtgatacctcagcgtaataactgaatgccagctttgaaatcagcagaacgatccaaaacattgtgtacctagaagtcattttgtgcatcatcgttaagcagtgctgaaaaaaacaacctacattcgaacctataagttttagggtccttacttgaaaagtgacaaagcgctctcatgcataccccttcctatatacagacgaggctgtatcacaaagaaccatgataagaccatcttttcactttaacattcatggactagcatttttcaagatataagcacatgaataaactacctgagaccaccacatcatcagcatcattatcttatagtcagacctttcaagatagcgccgaatgaatggaaacaaaaacagcaacgcagaaagcatgttcggggataagtagataagaattgccactatgaaaagagaaggtgaattatggctgtgtcccccaaaccaattctttatggtctgagaaaaaccggaggcgtttttccagctgtacgcataagtaactgccatgactacaacccatactgcagccgcacctaccttcatgacgtatctgagtttcacatagagtgacatactatgtcttgccttccagctgagggctatgtcaaggacagctgaaatattatgacaaacagtcagaaaatgtaaggaaaattgtcatgaaaccagaagatcgcaaaggtcaaaccaataattggtaggaaaacatcatattcaagaggacactaaatcaactattgcccactcataacggaggatgctaaacagctatactatgcatcattaccttgtgcaagctttagtatagctgctgtaatgaagacgctcaaaacctttaggaagacatcaccctgaaaaatggcgcttaactctccggatccattccatgcaataacaatcattgcctaaagaagaataatacattaaataacaaaaaggaaatacaaatttgaaagacaaatgtactaactaaaagatattggtacctgcaaacacaggatataaaagctccacaatctatcaaaacttctaaatatatgccagaacgagcgtatctccacaaaattgactttgcccatccaccgatctccactgtttgattttatctgcagcattatgaacatgaatcaagaaattaaagatacagaaaacttgaggcaaatgacataaaaagaaaatgtacaggttaaaataactctataagacaggaggatcagtctaacctgatacagcgagatttataatgaacatgataagattacaagtttataatccataagactaattaatgcaagatttgctaacataagcagaaaacttcttatacggcccattattttgtctctattactcatacctcacttctctcaagtcgaagttcttcagctgtctgacaaaagaaatcagcatcagcccgcattggccaccctaagcgaaaacatcgaattgacctgcaaaattgcagggacaaggaatttagaccacccagaattccgaaggatagagtgacattccaaaaaggttataagatgatcatctgcatttaccaaaaatattcattcaagtcatcatagtttctccacacagaatgctttgactttcctcctctacttctctttgcttcctgtaatgcacaaaaaactagattgagaaaaaataataggcacgagaagaaaagatgtccacgactagaataactgaagcaagtaacctttgatattgtctggtatataggagtcacaactttctgcaggaaagcttcatcttcaccaccatacgctggctttacatgctcccctgtcatgggactaacactaccggccaacataccataaagctcgaaagccatctgacagatacggaaaatcataatcaaacttatacagctaggaaaatgttattcttcacagagatataatcagaaatcgcactgactaaagtgaatccatacatggtgatatatataacagaggcattctggcatgaatctcaggtttgcagcttctccccatattaatagataaagtcccatgtagagcagtttacgctgctgtacctcttgctgaatagtaggcaaccttcaaatgccaacaagaggataagtagacaggaagtatgaggcatttagtatcatgcataagaactcaaatctttcttttattttggttaagatacaaaaaaaatatgaaaactctttgaggcattacaataaagagccctcaccaaaggctgcttttccgacccaagtatttgcaccactttttgtagtttctgaaaagtttcttcatcactatggtcaaggcacgatcatccaactagagaagatattgtacacaatcccttagcacaagtacaactgcctaggcagagagagaaaaaagaaagaaatcatcacattcaagtccaacaaaatacatacctttggttgttggtcaggttttggaaattgtcggatgtggacattagcaagtaacaagatcaagtgctctctttgattcaaaacattatctttctgaaattcaaaggttgaataacattcagtacagacaaaaactctttaagtcaaataatcaaaacaggatatttgctacatcacctgaaaaccaaacatagactgaagccagtctagaatgtcttcatcgagtttcttcttgtgacctgctgtccatggtaatccccttgtatttctaagagcggctacagcagcttgtatctacagaacagtattcaaacatattatgtggactgaaagacaataaaacagaaaaatagaagacaagctgagaatctggataacctcaggcaatctcattattgcctgattctgactatcagggtcaaggggaagtatattgtaaggcacgtaaatctgggtcttctcttccaccttattgtgcgtttccaaaatctacagcaaaagagaggatgatcagaaacaattttggttaactagatcatgagagtttcaagatgtttggccaaagcatttgtaacgactcgcacaagaatgagactataagatcaatatctactatgaggttcacctcatcagccacttccacatcttctgtttgattaacagccttcaagacttcaaagagaacggcagcagtttgataggcctttgtaagttgagcactaaaggtaaaatattgtaaatgagtggaaaacacagtaagaggtcaagttgcaagaaaaaaaacagcacatttgaaggaaaacatttagtgaaacacaaaccggtcagctttatccgcagcattcagcaaagcttggatgtatttcttgtagtagtgttgatagaaactctgcatttcacgtgcatcactcttttgccttcctgccaaagttgtttcattctcctgaagaagtaatcagaaacgtaaacggcatgagttcaacacttaaacacaacatgttagtcaaatcaataaagtgtatacattcatatttaccctttctaatcgttgaagaagcgcggtcttaaactggcgaacaccacgaccacttgaagttggatcaagcctatgcgccttctcaaatgcgtagaaacgacctggtaattttgttattcaaagctaatttaagctgagaaaagaagttattttatgattcacaatcaagttaatgaaattgttacaactcacataggtaagcaactcgtggattactagcttcaacttcattagccacacgtagaatcggagcaatctcaactaaagaagagggaacaacttcactatcaagcatagcctctccgagactaccaacagtctgagtccgcagaatccgcctctgcggtggaggcggatcaggttcccttctttgagccatattttccgacaatcaaactcagctaccaaattaaaatacttgttaaaaccttgagagacttgtgaactcaaacataagcgatagagagagactaggatccaagataatatccagaacagtaagatttactttcacagagaagcgaatttcggattcatccacagaaaagcaaacatcactgtacgcgcaataaacgcgaaaagctgttttctttctataaagaaaggtgaaagatccaacgaagtcccccaaaaaccagtaaagtagccgacgatgtaaaagcaaaaaacagatattttaactacccaattcgacaagacaatccatagctaaattactggtcctagaaacagagaggattaaactttcgaaagccttaaaacaatctccaataaaaaaaaaaaaaacgaaattgggttacacgacctagaaaacggaggagcacactcaaaagtcaagtcaagtggaaacaaatttaaaaccttaggaatcggataagtgaaacgcacaatcaaataataaccagaatctaacaaaataaaaaacagtgaaaagagactcagagatttaaggatcacctgacgacgaacagaggaagatgaagagaaagagaagcagagtacccaaaatctaaaacagcatcggatgcgatagtgctacagtagtattaaagaaaaaagcttgcatctttgtttggccgcttgaaaagggtctccggcgacgacggtcgaagagaggagagagaaaaggccggagaggaaagcaacggctacaagacaggcgccaagtttatagtaacacatttcctttcttgcagctttttctggttagccaatgataaactgccacgtcatctaataacgtattaaattttaatatataacgtcataaatttttggaagctgctgggtcgttttcatatgtatatgtgacaataaatattcgacaagtaaatataaaatgacttttggactctctttgataaaatacataaaactttatttaactgaatcataaattatacatttatgtagctttattactattgtttagtcatgattaaatattgggagatatgatgtcttttgttcttttggattaacaattttgagcaaagcgtgtttgctggactcgaatatcatcatcatccaaggtaattttccttcgaactttccatattagtgtattaaagtttagtcatctgctcattgtaaaagatgtgtgtttgttgaattcagagatcatatccaacttatttcccctcatcaatccaatcgcttcttttctcacgttaagacaaatatagttatcatagcaactaccaagaaagaattattctattaagtgtcacatccaatttgtccattagtcaaaaacagtgatgtgtgatattattcttgctagttgcacatgattttccattaaaccaaacatagctaaacacatattaactcaacttaatccttataatgctcttacaatatcatcgtaacaatataattttgtttggcaatatatgaaaacgtatatataagcaaaaatatactatttgatgagttccaagtggtttagatgaaaaagcatcgaacgctcagtcaaaagtaacttttaactaagcttttttctctcaaatttgttctttcaacaaaaaataataaaagtaaaacgaaccatcaaatagattattggtcaataattcaatttttgagtcatactaaaattaaacaaacatgaaattgcaagtaggaacttttttttcatcatgcctttgttaaagagacagtagtggaccactctaaactagaagtatcttatctattactaggaaaataaacatttacgtttctcaccattcatatgtttacatacattattgatcacttattatcaccacgtcaattgttttctttttttgggataactcatcttcgaaaaccatcactactattatcctcgcaacaagttgtcactacttaacctattgatgagatccgcaattaaggacgaaacaggtctgcaatttctggcgatttccttacacggttttaatataaataaaaatgggttaagatagaaaaaaatattattgatgcttgtgatatatacgaagagttccaaaagatatgcataaatatatggtgacagagctcaactaacatgctgacgttttgtttctctcgtttaacaaggtctcccgtcattttcctgtttctctgacgtttgtaacaatatactaatttcatttaagattgcatgtgaagaagatagacacaaaacattatctcgtattatttttccaagcaacgatagaaacattgtcaacttgaccaaaatttgttatcagctttcattctttttttttcatcacggtaatttgttcagagaaacattgtggtaactcatatagaatttatagaattcatggcttaacaggtggaaaatgtgacttttcaaatgttttttttaggattaacatatttgactagtccgctagttcgtataattattggaagatatttaatgatcaaagtggtcatggagattgggatatccaaccataaagatgggcttgattctataaatatcatcttggatgactcaagttgaagcaaaatttcagtgtctgacctgtgagtgaaagtattgatattctttacacagctcacatcggcgttaggacttgggagtgactaaatgtcacatgtaactcactcataagctggattttggatgggttctacctatgggccttgttgggctgggttagatttcatggaaatcatgtcaactgtatttatcatgcataagtttatgactcttttcttggaaaaatggatatgtaaaaaatatgccattatgcagcagtgatggacatagtctatagagccatagaggcaaaggtagaatcctgtcatgtttcttccatcacatcttaagacttgacttcaaaaccatgtaagtaaataattcctctgtttcaaaagtggcagaaacagagtacccttaagactttattttcaaatatactattatgttaattatgataatcaatttaggctatttagctatgaaattacacataaaagtatttgaacattatctaaaaagcaaaaactagcttcatccaccggactcactaaaaattagtgaatcaaatgatttccgatggtgaggatagagaagaagcaagagaaggtcccatggcagaaggagacatctcgccgcctgctggcatgtcttgaagaacagctagaatcctgcggatactgatggatctcgctgaccggaaactgtaagctctcttcatcgtctttgacgtagagaaaacgctcgaagatttgctgagtatgagatacacaagcccttgaatcagagcaaaaatgctcactttcattaacatgccttcaaagcttccttccattgatgttttaaagattcagacaagaattatcggtacgttgacttttttgttgttgttgttgtcttaagatctatgagttagagattgatgtttctaatcagacagtcgctggtttatatagagatcgaaaagagaagatggccttatttgaccagaggcagagacctcgaagctacgaaacacaagtaaacaatttaatttatcgcatatgtagaagatttccatttaaactttgattttgacctggtcaaagtagacgtgagttttttttgtgtatgaatattatacatctactagataattcgaactcttgtacaaaaaaaacattctacaatcggaaacaaaaagacaaagaacatgttgtcatgagatacgttttgtttattaaacacgtttttttccggaaaaaaaccaagtgcctctaagaacatcaatattcaaattgtcaatttttagatgatccaaatgcactttctgacttaaagtcaagctccatggtattcaaacagaatttcacgaactagcaaacagattttccgcgttatcactctttgagagtagtcgtcaatacacgttgatgtcccaatggatttccaggaatgtttctgcaccgttgctgcctcggtttaacggtattattgcttgtcatcaaatcattattcgccgatgaattcttcatccctcgacataatttcatgtgtgaatgcatcttctcaggtttgaacaacttcccacattgcctatattatgaattataaacgtcacaatataaatttaagttatgaacataatgagtgatataaagcagagcttacgagcataatggagccatggaaggcttgcttggagcaacctttggtttacaaaactcaattgtctctttcatctttatgccactccatgctccttcgaagctttttctataatataaaccaaacaaaatgagaaaatctcgtttttaccaatttgaattcaagtactataaggtatagtcgtataaagataataatattaatattatatgatatagcataagattagtcccaatcatatatagcattaacagtgataaagtaactaattttaatatttgattaattgaataaaaatatgagtaatggctactttggagcgtaccgagcattgtgctgttggtggtattggtatctgcgttcatcttcccaagccggaccaaaagccccagacctagacttattcaaaggcaccaatacggcgtcgtttgtgtccaaaccaccacacttcatcaagttccgtaacacgtgagaggcacgtacgctcgaatagctcttattcttgatataactcgaagacgacgtcgtagacgatacacttggtcgacccgactccacatcgttacccgacccgttctccgtcgaaccgtctctctggccggagactgttttcggatcttgtttcttaagaacgaaaccttcttcgttcgtggtggattcctccgtgactgtcgacgttgttgccgtcgatctctgtgagcagaagaccggagactctttttggatcttctctgacgttagtttcaacttctggagtttttcttcagcgtctattccaccgtttcttgtcacccaagctttcttctccacattaggataatcctctgtttttgagaaaccctaattagaaccctcacgaacaaattatggaatctagtaataactacgtgacataccctttggagagcttagaagaatctcagatcctttgaggacatattcattatcagagataggagtgataagatcatcgtccaataaatcttgccatacataaccattcttatacctcctgcaatatatagattactagataaatatcgtaatcaagaatgtgacaaaaaatcattcttttgataaaagttatacctcttacaagaccaagaaaatgcatcaggcatggcatcgcctcgtgcgtctgctaaccatttcttcacatctgcgtttttaagcacaatttagacgagattgatcgaaagaaaaagagaccaatagagaaggactaattaagaagagggaattaacctcggagaaagactccattacgagagagatgatgaacacgcaagagatgaggatggtcaacgtgacccgaacggctaaggaaataaactaaattcactcttcttacttctcctcctccaccattactttccatctctctttctttttgttttggtcttcgattttattctctgtgtgtcttttacaaaagaacttatataagccaaagctacttagatttttcaaaactctcaaagagttttcacttctctgcttttgagacaaaggatcggactaaaacaagggctttctttcttttgttaacttatatacaccctttttcaattaaattgatttgtacacagaaaagtttagcttattcccaaaaaataattgaattttgaatgttattaaaatatatttgagtaaaaagacaaaaagaaacaatgagacatgtttgtggagacaaaaccaaacatacgcatagatagagatgaaaaagtctttgcgggttaacggaaaccgcacatttctcggacgactccaaagaacaaatatagggtttcgagatcactcaccttttgtttattttcttgataaatatatatcttttggattttctttctcttttttctcttttaatgctatgataaggcataaaaatctgaaaatatatcttaaagagaaaaaaggtttagtaagaagagagatcttgtaggagagttttatgggttatggttaatttggtcttagtctatgtaaagctaaagatagaaggaagataacgtattctcagcagatttatcgtgatttagcaacttaacatatacatacacctatgaaaaaaagaatggtattttataagcagaatgtttacatatatggtatgagatgattttgaatatctaatcttttagttcttaccataacgacaaatcagaagacaaaaaaaggcataaacaaatcccgaaaattgttatctgtacgtacttccgtagtctattaagggaatgttgcatagtctagggatacggaatcgaagatggaaattaaagaacaactatttatttgcagtgttacatcttaaaatgagtatactagtattttatttttggaattacgccaatatacatgtacttgattctattcttgtctagcattttcatgatgatttaccattttccactttataaaatctagaaaaatatacttaaaaatcttgtacgtatattgaaaattaaccaagttcttataatattgagaattattatcttgtatttcataattgatctcaatattggttttgagagcattataactgatcatttcacaatgagaaaatggtaaattatccaaactgaatccagttacatttttcaagaccattcgcattcgcattggctaatagaaagaagaagacaaaaacatagattcaaagagcatatacgtataaaactcattacctatgaattccatattgatgatcctcttcatcatcttcatcttcgtcttcatacatagacttcataaatggctcatgagcatcacgagtcatcttagcatcaccaccagcggattctagattgttacctgtaacaccggcgaccgctcccataacggttgttgcggcggctgctgtgactgcagcttgtcttttagtggcagagtattgttgaatgactaataccgaagcatgcattgtgaaattcgacgaagctaatgtgtcccctattgtgcctagctcaggactactgctccaatcgtttaaaccggcagtcaccggagaatctgagttatatcctcttcccacaacgtaaagatcataagaattgttgtcttccatttctctgatcgtagctatcgtgtcttgaccatcgttgaccactttctctatatatttaacggaagaatcattcattgtcttgaaattaaattcgtagatgcattcatcgtcgacttgtttctccctctcgtactccgctgcaactttcccggatgagattagagcttcgcgtcctgggacgaatcttaccacagtgagtttaatcacgtgttgtccgaccattcgccaagcgtatgataacgcctcgcggtcgtctggaccaccgacgaagagcatggcgacttctcttttcattgattcaccacggaacgactcagaccggaccatggccatgccacggtccaccaaaatcccgaccgagcaaggggcgtggctcaaaacgttttggttaatttctgcgtgagaagagtttccttctcccatccgaccgtccggtgtcaagtgtttgtggtaaggcaatatgatgaaacaaactcgcttgtcctcggctaacacgcagatgtcttcgtgcatggttgcgtaaggagagaccgcggtgatggtctgaaccgtcattgcgtcgttgttgacttccatagcttcgaaggtctcagcgatttgatcggactctgctctgactctgtccgagaagttagcttttggtttgcattcgtcgttcatgattagcagagaggccgtggttcgaccggtgagctccacgaggtgaatggcgaaaacgctgagaggtgattgtttggttgcgtttgagacttgtaagagatttgtgatcccagagacattggggagtacatggacgcaagctaagacgcgcaactctgtttctcctttgatcttttgaaccgtacggtgcttgtaatgagcaagttttttcttgggcttgtatgcaaacgcgagaagaggctcgacgactagtgacatcactagaagcgcgatcgtcatatgagtatacatcggactatccagcgcctgcaaatggtttttttagttggagaaattaaataaaattgaataacgctgaaattttactatttgaaaaaaaacaatgaaaattattgctgacaaaaacaaacatactttgttctatgagtaaaataatgtttagaagaataatgattccttgacaaaaaaaaagaaagaataatgattaatgaaatatttctctaatgttttcactcattcgtatgttattcaactttatacttccctagactcgaaaagtgtcatatgcaataaaagaacgttgattgattgattagtaccttagtatcgcgaccagcattaagaacgacgagcgataaagttcccttggtgttcataagggctcctatagcgaatgcgtcacgcataggtatatgcataaataaagaggtgattacggtagtcacgatctttactaagaaggaagagcagatgactacaaccatcatgaacttgtcagtaaactggagcatgaaaccaatatctgctcgcaacccacaaatgatgtagaagagaggcataaggatcccggaaaggaagtcatggagcttctcctcgatcatgttacgtatgatgtggtcgtgcggaatggagagaccgaacaggaacgccccggttatggagtggaccccgcatgcgtccgtaatcaggccgcataggaccacacctcctaaaatgaaccaaacgtgagtgtctccgacgtgacctgccttcacggtcttcgcgaagatccatgcaattcccggacggatcacaaagatgcagaggaggacgaagattgcggtggtgattatcacgaacggcatcattttgttccatgtccctttttaaccaccaacaaaaaaaaagaacaacgaaaaaaatcatcagaattcttgaattaccatgcatatttttgctatatttctttttcgaggaaaaaataggattcattccattttcggccagtggatatttattttaacggttgtaggtttttgggtatgagtttgagttttggcatggggtcccaaaaagtttgaactaattgtaggaatctttacctgatttgctaaaagaagcaaacccaaaaacaaggaggacccatgtgcacaaatcagtgacaatggctgcacacatagccgtacgacccatatcggaccgcaacagcttaagatccgcaaggatccttgcaaggtcagggaagttggtacaggctagcgcgacagaccagaagacgcaaccagagatgatcttgtctggatggccatttcccgggagatagtaaagaaaggcaccaaccggtaaagcaacaagaagccctgtaaaagcaatgatgaccggtttgagctcggtgatccgcaccatcctcaggtccatccctagaccaaggaggaagatgttgtagacgagagctaagttagcgaatgtctcaagaaccattgtgaatctgtaggggaatacatgtgcgattatgaaacgtgtgttcccgagcacacttgggctaaataataatccacactgcaaaaatacaatcacaacaaatcaagacacatacggaactagagagctaaaaaattgatgtagcaaaaattgcatacgtacgaggatctgagctacgaaaggaggaagatacaagggtcgggttagatagtagaggacacgatagctaaggttcgcgacaaagagttgcgttatgaagaacggaagggaagaggctagcgtacttccgctctcccatcccttttgttctctcttctcaaagagaagactttggtcataacacacaatctttccaaaacgcgattcttcaatatcatagttaggatttgtcacattaaggggggctccggaagacatctcctcctacgatggctggtcggaatccccaaaaaaaatgacaatactatctgcctgaacccaacgttaggttcagacgaaacattgggttcatatagactgcaataacaactaatttgcaacctcttccaagttttagttcagacgagatggctaattatagatgatgtattagttgtcattggggaattcattaaccactcgttttaaaatgggcttatcagatttatgtttttgctgttaggtgcttttttaaacggctggttgaaaatgatcacttgtttcaacatatttttgtccgatttctaattgtacggttacaaaatctgcgaataaattattttcaatcaaacttatagatgttttttttcttaacaaattatacaagtttttttctttctttttttttgtttggcagttcttaacaataataagatagtttagtctattattaatttattattaacataagacaataagattcctttttaataataattaaaatagacaagtagtagaatacaataaatatgcaacgagaatttttttattactataatgcaaaagtatcaaatcaatccagaatccagatcttctggaagcaaagtagttcacaagactttgtagagtaaagacagataagttttgaacagactgaagcaatttttagattcctcaagtcaatttctctccccaaacagcttccgtgaatgacaaattgctaaatctaagggtaatactctgttacagtttctctcttcgctttcagtttttcgtttttctgcaattccaattacttctaagctctctctgtccttccttactatggagatttgataaacaaccaatcagatttgctgacgaaccccatttatcatctagggtttgcttcagaatgcttttgaaacattaaagttcaacacttcagcacttgggatcttaatgctgtttcttgtttactctgatctaggagtgtagcttttaccatttacttgtgtctgtttttggtgctgttgtttgatctgtaatgcatacttcaattttcttttcttgtagattgatttcaagaacaagtcatgctaactctttccaagtttcatgtgatactaatcccaatactcttcttcattacgcttctttcgccattgttctccattgctctacctatcaacatttggccaaagccgagatttctctcatggcctcaacataaagccattgcactctctccaaatttcactatccttgcccctgaacaccaatacctttcggcctctgtaacacggtatcacaacctgatccgttctgagaattactcgcctctcattagctatcctgtcaaacttatgaaaagatacaccttgaggaaccttgtagtcactgttaccgatttttctcttccgcttcaccacggtgttgatgagtcttacaaactctccatccccattggcagcttctccgcgcacttgttagctcattcggcttggggagctatgcgtggccttgagacattctctcagatgatttggggaacatctcctgatttgtgcttacccgttggaatttatattcaggattctcctctgtttggccatagaggtgttttgctcgatacatcgaggaattactatggagtagatgatataatgaggactattaaggccatgagtgcaaacaaactcaatgtgttccattggcatatcactgattcacaatcttttccactggtgcttccttctgaaccttcacttgctgcaaaaggatctcttggaccagacatggtatacactcccgaggatgtctcaaagattgttcagtatggttttgagcatggtgttagagtacttcctgaaatagacactcctggtaagtccattcttgattttctcttgcacaagaacttagcttggttctaatagatactgttaaaactccacaggtcatacaggatcatggggagaagcttacccggaaattgtgacatgtgccaatatgttctggtggcctgctggaaaaagttgggaagagcggttagctagtgaacctgggactggtcagcttaaccctttgagtcctaaaacatatgaagttgttaaaaacgtcatacaagatatcgttaatcaatttccagaatctttctttcatggaggtggagatgaagttatcccaggctgttggaaaaccgatcctgccatcaattctttcttgtcctctggtggaacactaagccagcttcttgaaaagtacataaactcgacattaccttacatcgtgtcacagaaccgcacagttgtttactgggaagatgttctgttggatgcacaaatcaaggcggatccatctgttcttcctaaagagcacacaatcttacagacttggaataacggtccggagaacacaaagagaatcgtagctgctggttacagagtaattgtctcttcatcagagttctactacttagactgtggtcacggcgggtttctagggaatgatagtatatatgatcagaaagaaagcggtggcgggtcttggtgtgcaccatttaagacgtggcagagcatatacaactatgatatagctgatggtttgctcaatgaggaagagaggaagctggtgctaggaggagaggttgcattgtggtcagagcaagctgactcgacggttttagactcacgtctttggccacgtgcctctgcgttggcggagagcttgtggtcagggaatagagacgagagaggtgttaagagatgtggtgaagccgtggaccgtttaaacctgtggaggtataggatggttaagagagggattggagctgaacctatccaaccattgtggtgtttgaagaatcctggaatgtgtaatacagtccatggtgctcttcaagatcaataaaaacagatagtttcgaaattggatccgagtcaaagaaagcataaacatgctcttgatcaggctcttttgattgttgtatacatactttgctttgtagttgtgggttgtaattctcaaatcctgaagtatgcggggtattttgtatgaatagttgaaagttatggggcaaaaatggaaagtttctttatttaccgtactacgaaacaattatcacaacctcttccaaagtctctgcctttacgagactgaacttgaagaagagacccctaaaatccgatactgaaatctccaggttattgaaaaatcacaactttgaaaagttagatggcgaaatttgtttaatttgaaatgattttggtttctagggtttagactgttgactcgtgttcttatcatctttaagctgacgaggcgagattgattgtgcaggaaatctgattccttgatgtgacctgaagagatttctgagttatcatgagtgttgttagatggccaagagttctaacgccaagtcttctttctcaaatcctaaagaagcagaagaatccagtgacagcacttaagctttttgaggaagcgaaagagaggtttccgagttacggtcacaatggctcggtgtatgctaccatgattgacattctcggtaaatctaaccgtgtgttggaaatgaaatatgtcattgagagaatgaaggaagattcttgtgaatgtaaagattcggtttttgcatcggttattcgtacattctccagagctggaaggctggaagatgctatttctctcttcaagagccttcatgagttcaattgtgtgaattggagtctatctttcgatactcttttacaggagatggttaaagaatccgagctcgaagctgcttgtcatatcttcagaaagtattgttatggttgggaggtgaattctcgaataacggctctgaatttgcttatgaaggttctttgccaggtcaatcgctctgaccttgcgtctcaggtttttcaagagatgaattaccagggttgttatccggacagagacagttacaggattttgatgaaggggttttgtctagaggggaaacttgaggaagccactcacctgttgtattcaatgttctggaggatctcacagaaaggttcaggtgaggacattgtggtttatagaattctattggatgcattatgtgatgctggtgaggttgatgatgctattgaaattcttggtaaaatcttgagaaaaggattaaaggctccgaaacgatgttaccatcatattgaagctggtcactgggagagtagcagtgagggtatagagcgggtgaaacgattgttaaccgagactttgatccgaggtgcaattccctgtttggatagctatagtgccatggctactgatctttttgaggaaggtaagcttgttgaaggtgaagaggtgctccttgcaatgcgaagcaaaggctttgagcctacaccatttatttatggtgccaaggttaaagcactctgtagagccgggaagcttaaagaagcagtttctgtaatcaataaggagatgatgcaaggtcattgccttccaacagttggagtgtataacgttcttataaaaggtctatgcgatgatggaaaatccatggaggctgttggatatctcaaaaagatgtctaagcaagtttcttgtgtagcgaacgaagaaacatatcaaactctagtggatggtctgtgtcgagatggtcaatttcttgaggcgagtcaggtcatggaggagatgttgataaaatcacactttcctggtgtcgaaacttaccatatgatgataaaaggtctttgtgatatggaccggcgatatgaagctgtgatgtggttggaagagatggttagtcaggatatggtaccggaatcttctgtgtggaaagctttggctgagtctgtctgcttttgtgccattgatgttgttgagatacttgagcatctaattagtagcaaacgttaatcatataactaactacctgcttgatctgtgaaactttacaaagtttgatgatgctatgtgagtgagagcaacattctattgtaaaagtttttgtgaaatgtaattgtttcaattagtaacaggtttgttgaccatattaatttcattccttggtgacatgtaatagaaatgttttattttacattgaaaaatgatggattttgtaaaataggaaaaaaatcagaggatggagtcgttcgggatcactgcgtttcgaagtatgataatgattccttctcttattacgtatccttgagcttctcggtttccttcttcaacattgtctctgttgattatctgtgaattgtatttatcaagagaaaaaaatatttatatatatatataacctatagaaattgaattttgtaagttgaaatccatgtagttaccataacgtttttaccaatcctggcatttttatcaacaatggctcgtcttattcgactcttttcaccgatccctattcgaatctctatcttcttctccttcccttttcttctcacatcttcttccatctttaaaacacatttcgtgaccaaaaaatattgttttaaaactttataatatggtattaattagtctaatttcgatccaagaaacctggtttacctcataaatatcagaaccgacaatgatcgaatcctctacaatcacttcatcagcgattcttgttctcattccaaccaccgatcctctgatgacacatttctgcacatacaagaagatgacgaaattcttcaagcttttgattaacaacggctgctagggtttcaaggatttgaaagagagttttgcaaattacatctagaatgcacccgtctccgataatactgttggttattacagctacactcatggagcttggaggcaaacaccgaggcattgtgtacagaggacattgtctgtcgtagaatctgtaactacaagaaaagaaacgttaacttgaatcacaagttattttatttcgaaccatttatctctcacaagagtttacattacttgagatccaatctacacctcttaatactctccatgttagctctatagtaagctccaatgctcctcacatcttcccaatatccatcaaacatatgagctttcacctgaaaaacagagtttcagacaaatctatagcctatgaactgcttcttgtctctctatctcttaacctttaccttcattccttcagagatcgcaccaggaatgatttcgctggccaagtctttcgattttattaaacattctctcagaagcttcaccatctgttctcgaccgatcacgtaaattcctgcgcttgggacagagcaagaagacgttccatcacttcttgtcgctgttctgttcgccacctgcattataacattagtcggcagatgattctgaatcatacataacattctagaaatatctaactcacagagattaaatcttgttgacccttgatagtgaatctagtgacagcatttgtggaatcaacttccatgaaaccgaaaccaaagtcatggtctgtaacagagcttagtccaacaatggttatatccgctctgcttcttctatgatcttcgattagcatcttataatccattttgtatagatgatgcccaggaagaaccaagaactctgtaactggaaactcttcaaatacccacaagcatcttcttatcgcatcagcagttcccttttgttaacatacatagagataaagatttcgtgaagaacacgaaacagatctaaaaacaggggaaaagggattttaaagttttactaaacctgaaaccatccttgatcttctaggctctgataagcggcaatgacttcaacgaatctgtcttttccgagtccaaatccactgtaagctttggagagatgtgaattgagagaagtggaattaaactgagtgattgcatagatcttggtgatgccactgttgatgcaattactgatgactgcatcaataagtctatagtttgctgcaatagggattgctcctttggatcttgttttggtaagtggataaagctcagaatctgatcctcctccgaacacaatggccgcaacactctggttcaaaggaaggtgctgagagtttgaaacagagaggtttggaatgaaaagctgcttcaagttatagttatgtctccattgatgatgatcactagtcgatcttaccatatggagattggtaaatttggtaataaaagaagaagaagaaatctgcattttcgattatgagcagagatgattcaagaaacaagaaaattgggtttgagatttgaggagataaagtgctcgtttttgttttcgagattgaaacgtgtgatggtgaaaatcgtccgacattttctgttccagacatattttagctttgcctttgcttgtgaaactatatcttcttaaaacctctttaacttgtcctgtctcttaagatttgattcctagcttcttcttcttcttcttttttttttttttttgttcgttattttaaagaggcatattcttatattcgatctaagctaattacaacagcaaaagagagaagaaaacgaaaaaaggagatctaggagaagtttgaaaaagaaaattcgtaggttttgagatgaagtgtctgtatcacatgaatcatgtgcaagtgtgaaactcatataaatcttataataaatatttttaaattagtttcatagatatataagaaatattcaaatatttgatacaaaaatattaaatccattaaactttttctatcttatgcaaaagcaaacatttttaccaaccaatttttaaccatagcttatagtttttttatatgcttatgtattttttgtctaggcgcaattagttttcgtcgttttaaaaagtgaacactcaagatatatatttttaaaataaatagtaaaattaacatagttttagttaagaatttattaattattttctgaaagtttaagcgttaaaattgttttgaattttggtgaaaatcgttattatttttaaaaaatgagtttaagtgttaaatctatattacgcgaaaaccatattggacttcaaacaccagcttacggaccaactaaggacatgatgcgtaggtacggttagttttcgacgtttttaaaattgaacacttaaaccaatttttaaaattaatattgaaattaacatagtttgagtttaatgtttttaaaagtttaaacgtttaaaatcgttttaaattttacagaaaattattcttattttttaaaattgaatttaagtgttaaatctatattacgcgaaaaccatatagaacttcgaacaccacttacggaccaactaaggacatgatgcctaggcgcagttagttttcgacgtttttaaaatttaatacttaaactagtttttaagaagttttaacatggttttcgttgaaaatatgttatttattatttaaatattttagtgaattaaaatgggaaattcgtttcatcaagaagaaggaaagtttggtggctgcaaaaaaaagaaaaggaaactgatcacaacggttagaaaagtgaccgttactgttattttttactgcagaacaattatttattagagaaaattaattattactaaactaaaatcattaataatatcaaatattcaatgaagcaaaaacctaaacacaatctcgagactcctaatgagaatttgaatctaaataaaacgaagctgatgatatattcttaattaaaaaaaaaacccatagaacctccctaaaaacacacacccgagcttacttgtgcaccaatccatcattagctttgtctttgatcgttaaccggactcagttggcgtaagaggaaccatagcgagattgagctggtcatcaaagtggaaagaccagatgcgaatctcattgccttcctttagacggcatcctttgaccacattataccgccctgaaaccaaaatgtatagaggagaggtccccatgttccatctcctcaaattcaacatatattcccttcgatcaaaatttacgagtatcacgtctactccttcttcacgttccttattggcatgttcttctatgatccttttttcgtcggggttcaagaattcaaaatctatgatctggctgaaaggcatggagagacgacggtgatgtggtttgacattggttgcagtcagttctttatttatgacatttataggattttctccgtactttaccctcatcaaccgcaccagccactccggtgttggctctctcgtcccagaagaagatgctcctgcatcaaaacgacagttggccttgcgtgttgctatcttaggtttttcttctgttggtgggagcaaaagaggacatctcttgcgctttgatgtagatttcgtttgtggtccatcaataatattggctttaggagggtcctctttagtcacatactcctctggtgcactaggtagagataggaatcctcaaggttctcttccttagtggaacttgaatgaaaactctggcttccctctctattgcctccaaaacactctgtttcgtctccacaggcagtgaatggctcatcatgaatagcacccatggtgcaccttcttcctcttctcgactaaccatcgtttatccttctcgtacgtgtcttaaacgcctaattaatatgccaacacacacacatatatatatatatagggcaagagttctcccaattctatcaggatttggaggaggtcaaatagcctaagcttttttcttctgttcctataatctatatgggattagctagagaagcgaatttcgagattatccacttttttttaaaaaagaaaaattgttttccttcgtttttaatgaataaaacaaattctagtgttagcaaaacaaaagattagggtttaaggtttagctataagcctataagggtttttcaattggttaaaagagatattcaaaggtcttgttttgcttacgggataatccatattaaattaaaccactcacctaaaactaaaaccacacactctcttcctcttacatttctgtagcttatttcttacagctcacgtaacaaaaagaaacggtcatgattcgttgcactcacataaggtaaataaggaaaccgagtctgacttatatactgtatgcctctgagagacaaaaacagagccggtattgtgtaagtttttccggtttggtacatttttctctaaaccaaaatgacatggaccaagtggtaaaaaatcacacagaaccggtagaaactttgttgagaaaatctctgttgccaaagcatcatcatctctaatgtagtagatccgtcgagagtaagaactctgactagaaaaatatggaaagagataatggaaaacgtgactgaataaaattcgatttgtttatacaataacaaacccacgtttgtagacttggaaaagagacaccttttatttttttttatgaactctttggtgctagatcataattgtattccaaaagttttttctgttgtgtgtaaaaagcccggatttagagagagatttagttttttttttttttccggcacttgggtccttcaaagtctccgccttctgccgtgttgaagttcgatggcgataggagaccgcaagaagattatcatcgatactgatcctggaatcggtatatacttatctccttttcattggattcgatttggatctctgtttctctactgtcattgcccaatatctttgaatcttctcggatttagaaaattttgggttttactggattctctccacttagtggaactacttggttttactgaatcttggtttacgaaaactctgggaaattagagatctgagtttttttttaagcgtttgactttacttaagagagctatcatgagtttattctcactggatttgatgatgttgtagatgatgcaatggcgatattcgtagctttaaattcacctgaagttgatgtcattggcctcactactatctttggaaacgtgtataccactctcgccactcgaaacgccttgcatttggtaccatttctacaccatttttctcatatggatctcattacgaaaatgaagtcaataacatttcttggttgatctaatcatcattgttctatatgcatatctactagttggaggttgcgggtaggaccgatattccggtggctgaaggaacacataaaaccttcttggtatgtttccactttatggcctttgatatgtttttgtgagaaagatggatgctatgtaatgtgtttgagattcaatatatgttttctagatctttagtaagaataataattcacacaaatgtgtttagttccaatctgtgttataaatcaaatggtaagttatattgtgtctttttcacatgtcataccacttagattttttagcattgataacttgttgtcttttcttctctaaagaacgatacgaagcttcgaatagctgactttgttcatggaaaagatgggcttggcaaccaaaacttccctccacctaaaggaaaaccaattgaaaagtctggacctgagtttttagttgaacaagcaaagctttgccctggtgaaatcacggttgttgctttgggaccactaacaaatctcgcgttggtaagactttctcatccgcaatttttatattccggttcttacttatctctgttcctatcatcttatcggagatttcattaccttgataatgcaggctgttcagcttgatccagagttttcgaaaaatgtcggacaaattgttcttcttggtggagcatttgcagtaaacggaaatgtaaatccagcttcggaagctaatgtaagttccttcacccgttaaagtaatgtgatattcatacacataacacatcactttctatcaaaaactcttcttttagttttcacatctgtttaaccaattttttggttagggtagatttttggcgatcccgaagctgcagatattgtgttcacatgtggggccgatataattgctgtgggaatcaatgtgacccatcaagttattatgacaggttatcttggataatcttttttccttatttgatgttttatattgaaaatatacaaatgctgtcaacagaaccgtgatgatcctgattgttgcctttatggctcgaggttttcattacttgttgcgaccaagaacataatttagttaaacagagctttctaatggcttttttcccggtgtttctgctggatttagctgatgacaaggacaaactagcatcatcgaaggggaaattagctcaatatctctgtaaaatccttgatgtgtactatgattatcatctcacggcttacgaaatcaaaggtacgataatgataatcatttgtatgtgtgtttatttcatttggtaataagttcagttgtacacaaaattatataacaagaatttccacgactacgtatttttatcttaacctcttcttttttgtgtgtgtgtggggcaggtgtgtaccttcatgatcctgcgacgatccttgcggctttccttccttctctattcacttatacagaaggagttgctagagtgcagacaagtggtatcactaggggactcactttactgtacaacaatcttaagaggtaagtttttttcatacatacaatacaaacattcaaaatagacagttgtgttatatataatagaggatgtaaatgtcatgtgtggtgatggaaaaaaacttgttgttgtgatgtgaaccaggtttgaggaagcgaacgagtggtcagacaaaccaacggtaaaagtggcagtgacggttgatgctcctgcagtcgtgaagctcataatggataggcttatggagtcttaaaccatcttgggtcgttaattagttatctctttctctttgatgtttcactattgcgagccatttctcttgttaaaaataaggctcctcttgctgcattatttatttattgtttaatctttattaaaacgaatattattatgttaccaattaccaataataaagttaagatttttcctccgattccatgactcttctactacattcaaatctgtcacatgattgtcccacttgatcctagtaaggaacatgacaagtagtaacatttaagacattttgatattaactacaacagctggaatagaagaaatcttgagaaaagtcgttacacattcattacttaactgacgaatgatattatgtgaaaagaaaacattaatagtactatcttaagataaaaaatgcaattatgaaatttcatattgcctgccaattgaaaaataatgttacctattgttgaaataagatgccatgcattcgcattttgcacgatctgcatgtaaataattaacaataaaaaaaaacgagagaaatcagaaaactaaaggacctaataataaattaataaaaataaaacaaaggaacgtgacaaggactgagagtataaatatataataattatctgtctctctctctctcaactttgactgcgtcttccttggagaatcacaaaacaaaaacattcgtttttttgttgttgttgttgttgttgtttctcttgagaagctctctgaagaagaagactcatggaaaccaacaaagaccaagactttcgcttccgtacacttgtcgtcttcatatttctctctccctcttctcttctctttctctctctctctctcccaccaccacgacgtgctctcctctcattatcattctctctcactctcccttttctcttcttcaccattcgtccccattcccatattctctcgttcttgaattcctctgattgtcgatggattcgctaattatcgaagaagaagacgaagaggcgttggccacgctcgtccctgttcctccgcggcgtaaaacgcattcctatagcctacaattcgatcacaagcctcaccatcagatccgcaaacacagcctggacgaggttcctagatccgctacattagcatccgaagccgtttatttcgattcctccgacgacgaattctccaccggaggtaacatcacagaaaacgccgctgatgaaaccaacgccggagctgaggagtacaccatcgttaatcctcctcccaatgtcggtcttggggatgacgacaccgagccattacctgaatttatcggcgctggtggcggttccgggatatttaaggtcccggtgcgcgcggcggtgcatcccggacgtccgccgtgtcttgagctgaggccgcatccgttgagggagacgcagactgggagattcttgaggaacattgcttgtacggagacgcagctttgggctggtcaagagaatggtatcaggttttggaatttggaagatgcgtatgaggctgggtgtgggattggtggccaggtcccgcgaggggatgaggatacggcgccgtttcatgagtctgttactacttctccaacaatgtgtttggtggctgaccaaagcaacaagcttttgtggagtggtcacaaggatggcaaaatccgggcttggaagatggatcagagctctgtttctcatgatgatgatgattctgatcctttcaaggagcgtgtctcctggctagctcatcgtggtcctgtcaattccattgtcattagctcttatggttagttgtttttgctttagactatgattgattgatctgaaaaatatgttctttctctaatcttgcttatgcttgtggttgtgatgtaggtgatatgtggtcatgttctgaaggaggtgttataaaaatatggccttgggatacgttagagaaatctctgctgcttaaaccggaggagaaacacatggctgctctattagtggagagatctgccattgacctaaggagccaagttactgtaaatgggacatgtagcatatcttcctcagaagtcaagtttttgttagctgattcagtaagagctaaagtgtgggctgtgcagtcactctcattctcaatctggtaagtaggcttttatttttctcacattggttgaaggactgggtcttttcagtcacttgttgatgatcattatgagagatttatgtgcgcagggatgctcggagtaaagaccttctgaaagttttaaatgttgacgggcaagttgagaatcgtggggatctgccacctatacaagaccaacaagttgatgatgaaatgaaactgaagttcttctcagcttcaaaaagggaaaagccacagggctttctgcagcgatcacgtaatgccataatgggagcggcaggagctgttcgccgagtcgccactagaagtgcaggagcgttttcggaagatactaggaaaacagaagctatcgtgttagctgtagatggaacaatttggactggaagcataagtggcctaattgttcagtgggatggaaatggaaaccgcttgcgagatgtgaatcaccatcaccggcctgttttgtgcttttgcacttttggtgatcgaatatatgtgggttatgcaagtggctacatccaggtcttggatttagacggaaagctaatttcaagctgggtttcacacaatgaacctgtgataaagctagcagcaggtggtggtttcattttcagtctggccactcatggtggagtacgaggatggtatgtgacatctccaggacccctggacaacataatccgaacggaattgtctcagaaggaaactttatatgccagacaagacaatgttagaattttaattggtacctggaatgttggtcaaggaagggcttcacatgatgcacttatgtcgtggctgggctctgtcacttcagatgtaggcattgtcgctgttgggttgcaagaggtggagatgggggcaggcttccttgccatgtctgctgctaaagaaacggtaactccttttattccatttgactttatttggactaaaactttttccacaacgcgaagcacttgaaggtcaaagtatcacctcatatttgggacgcgtgtaggttggacttgaaggaagtgccgtggggcaatggtggattgatgcaattggaaaagcccttgatgagaaaaacactttcgagcgtatgggttcaaggcagttggcaggacttctgatatctctttggtaagtgaatgttctgtcatgacatgttgcattctcgtgcttgtcattcaacacttttgcaaggtttccaatcagcagttgtgtatcatctatgattaaccaacctattgtgtgctgtaattttctgctttagggcgaggaaggatattagaactcatgttggagatcttgatgttgcagcagttccatgtggttttggccgtgccattggcaacaaggtatgtcttacttcaattcccacttcttcaaatctgattatgatactacatacattcaggcctttaggattcagtacttcagtttttatttgttcttgtgaagttgcaaatgagaaagttatatatgaaatgtgttgcttacttacaatgtttatgacccactgaatgataacacaattacaggaaaaaacttagccttttgccacaatgtgtaatctcttctatctggctaagatgtagatgacaatgcgatatagatgttaattcaaatttagttctctatgaggtacttgttccgtttacacgcattaatgtcctacttgtcaaatagggaggtgtaggtctgagaatcagagtttatgaccgaataatgtgctttgtgaattgccacttggctgcacacttggaggcggttaatcgcagaaacgcagatttcaatcacatttttcgattgatggtcttttcccgaggacaaaatctaagtaacgctgcagctggtatggtgccgtacctgtttttgtcttgctcacttggcttttccacatatttattttggctgctttattcttctggtttgccatgggccctctctcttgcagctggtgtctcaacttcagcttatacaacaaagagtaacactgtatgttcttatcatatcacctttactcctgagtttatgttgtttgctccttaaatttgtatttaacatgtttctctgttttccagattccaagcaccggcgctgaagaaatcaagtctgatcttgcagcagcagacatggtcgcattttttggcgatttcaactatagactgtttggtataacctatgatgaagcaagggacttcatttcacagcgatccttcgattggctcagagaaagagaccaacttagagcagagatgaaggttggaaaagtcttccaaggaatgcgcgaggcattaatcactttccctcccacttacaaatttgaaaggaatcgctcaggccttggaggtaaaagtggatttgatacataagatatgaatttgaaaaaattgaagcagttttgctctgctctgttctctgcattttttcctctgttttgtaagagatggtggctccaaaaaaactgaatctttctgtgctgtgtactctccaggatatgattcaggggagaaaaagcgaattcctgcgtggtgtgaccgagttatatatagagacactcaatctagcccattctctgagagcaatttgcaatgccctgtagtttcatcagtcataatgtatggtttcatgacgacctttctgatgtttctcgctttttccggtctcttcaatgtgttttctccattctaacttcccacctgcgtgtttcaacaggtatgaagcttgcatggatgttactgagagcgatcacaaacccgtgcgctgcaaatttcatgcgacaatagctcatgttgataaatctgtgcggagacaggaactggggaaaataataaggtctaatgagaagattttatccatattcgaagatttaagatttgttccagaaacttctgtgagcaccaacaacattgttcttcagagtcaggacacagtcatcctaacaatcacaaacaattcacccacgagccaagccatatttaacattctgtgcggtggccaggctgtagttaaggatgacggagaagatgctgactacaatccacgaggctcctttggtctaccacgctggctcgaggtattaaattctcttttgacgccaaatgaagattcttgtagtattcaagatttagtgatatacaagaatttttttcttttaggtttctcccgcagcagggataataaatccagaaggatccgtagacgttaaagttcatcacgaagatttttactcaatggaggaatatgttgatggcatcccacagaattggtggtgcgaagacactcgagataaagaagcaatcctgatggtgaacattcgaggaagctgctcaacaacattgagaagccactctgtcaaagtccgtcactgcttctcagccagagtatgtctccttgagaacagacccacgaacctaacaaagaacttaggtggttcacgtcgttacccaacagatattacccgtaatggaagcactagaccaagaactgaagactcggttagacgaggtaaaagccggtgatgagctcttgtgactttgacagttttaactagatcttagagcagaagaacaacaaagtcatcacaagacaaatgcatcaggtgaagaatcgcttttattcattcgttgattctttagaaaattcattttgtgtcagaaattgtagatttgctttgagactgttcctcaggtagcatgtattcaacttttgtatctcctcacttgaatctaaactacaggtacgtgacccatgtatacatttgttactcttacactaaattgcctgttctggagattttagtctcagagtgcatacattctcttgttgaattcgccgttgagaatctctgactctgaaggcatatgagatagtgagaaagatttcgatttgcttctctctttccttaagcttttcagtttagattcctcgatcctatgcatgaccacacagtaacacattgcacctatcgtggttagcataatcgtcccgccaataatcgttgcacaaatcgccagccaaatgtcctccttacccacaacgataaacgaaagagaaacaaaggctacggatatgaacaaacaagccaaccacatgagcttgttgatcacaaacacaagattcttctttgccttctgctcaatcaccacaactgaagtctgcaccacaacaacagccaaagatatgaacagcgccaagctgtcaaatatgaagaagactaaaaacggggctttgccggctatgcgggcttctcctaataacaacagtccctttgttctgtcttcttcatattgcccaggaatggtgaagattgctgcaaatgcaactgttgcaattaggacagccacaacggttgcagagtttatagcgttgtttaaaccattgatgtgaagcttcttcagtctctttgcgattctccgcaccctaacacccgtttggcgagactgttggagctgagactgtacctcgtgtttaatgtcactgaccgtttggttaagttgcttagccgggtttcgaggcttcccaagatctttagctgttgcagctcctgcttccttcagaaccgacacaagctctggatttccaatcttttcggctatatcaagtgcagtatctccagccttattcatagcattaaggttaattccatcaaatgataccaaacatctcactatctgcaagcaaaggcaaaatgcagttcatcagaattcttgtagattgagaaactgaggggagggggaattagcgatgatgataccttaatacggcctttgtttgtggcagtgtgcaacggcgtattccctttactatcctcaacactcaaaatcgcaggatcaggtttcaccaactcaagaacaatcccttcgttctgacctttgacagccatgtgaagcgctgtttgtcccttcttatcagttctaaacccgatgcttgcatcattacctatcaaagacttaaccacttctctgtgccccattcgcgctgcagaatgaagtgcggttttaccattgttcttagctatcttagctaaatgagaatccgtctttaaaagaagattcaccacatcagtgtgtccttgtgaagcagccgtgtgcaatgcagttgtacacgatagatccaccgtcatagccagattcggaaatgtctccaacaatttcttcaatgcctctgcaaaagacagcacacattcaaagatatatgtcaagaaggtgtacaacaataacaaggtcttcaagttattatcagattctctaaagtttcatttaccaatatggccttgttttgcagcgacatggaaaggatcaaaaccgttgcgagctttaactgatgcagtatcaagatccatatgtttcaacatctcttcaacaactaatgaatgcccattttctgctgcactataaagaggggtctctccttctagattctgctttgatgacaactccttcaactcttcaatgccgttacaagctcgaatcaattccataacctttcccaaattccccgttcgagctgcgagatgaagaggagaatctcctcttttaccaggtgagtcagtcttcttcttcctctcaccaccaacattcatgaaacttaactgtctctccattactaccctaaagcttttctgcttctcaacaaacccacgaaagcttctctgcctctccattgccctctcctgtttctccattgctcttcctttgattccatgtttctcaacaacattcacagctaggaaactaacttgcttgtccaaagctcttccctttctcacctgattctctgcaccaacgcatctgagactctgctgttcctccacagagttacctcgaacgctctcttgcttctccataacaggaaccagagaactcatggtatgcttctcccttagattacacaaagatcttgaataacaactttttctcccaaatctgaaagatgccaactttgtttgaagaatccgtgagctcttttccagcaacccgtgtttcgtaataacagaaccagcttgaaaatggaaaaccctgacttccctgtgatttccagatttcttgtaaagattcaaaccgatgtgatgaaagaagagagagaaaaaaaaaaaaggttgcagctgatttcagtagagtgtagctgaaacccaatagattgatttgtaaatctcaatgctttttgtgggcaaatcatgtaagattctcaggatatagagatagagagagagactgtgatgagtgactgcatcttcagctgttttctttattaatttcgctaaacttccaaaatctttagtaatattagtgattactttttcttttgagttttgaagcaacaaattcttaattactatgtcaattatctccagtttaaaactttatatccagttaaagcttcttttctctaatttctttatatttttgttgtccaaatcaaagaccaaaaagcaaaagcacaatgtgatggtgacaacaagtcaaagtcttccactttgttggttactgaaaataatattttattaataaaaaaaaaaaaattgtatgttacagaaattggtgatcatataccttgttacagaaaactatttgaaaaatcagtttcctaataacatttcacagtgatatcatcttaaccccaaataaattcatcgatttagacaactagtaggttgaataacaccaagatttttcccaacagcattgaagcacaaggaagtagcaggagttcctttgttgtaagtaagctttatgtcttgtaatgtgattcccgtgcatggattgctcttgctacacaccagcttcattgcttcctgcgtcgccgaagttccttgtatgttcttgtacgtcacttgggttatcttcacccccgaatgctaatacataccataaacataataaatctttagttatttgactaagttgataatttgatatagcatatttgattagtctgaaattgatcaaaaatatgatatggatatacctcagtagggcaaccttggttggacggacaatagttttggtcgattatgatagggttttggacgttcctcatgattagattttgaaagaagacgtttctaacgaatccggtactcggcctcgcccatgactttatcctcacgccgttttgtgatccggtgaataccgaactcgatactgtcacgttctctactccgtcttcgtttaactgctttgccaaactcccgatgctgccagtcatcacatcatcatatgagttgtgaccagagtgagtgaaggcaatattgctagttttttttttgttggaaattcatgattcctaacaattaatgatatatttacataatttactctaaggaattagacggtggtgtatacctaaccccgtgacctgggccacaagcaagcttggaaattaggaagttgcgggtcccctgaccgatagcaacacaatcgtctccggtctgaacggtgcttccggttaatgtgactccagtggagaactgaacggtgaagccgtcagtgtttgggctgtctccgggagccaccagcctaatgttacggacggccacattggtgcaaccgttgagggtcatatggctaacctggctgttcatcgatttcactccacttatgatcacgtcttttgcggagttgaacgatattgactacagtaattaatatataaacgccatagattaataataagattataaatatttcattttattttgaccaaagaatccatttccttgtccaaaaatcattatcataatagttattatatgcttataaaataaattcctaaaaatggcatggatagatcatattgaaaattaaatgtgcctgaattaatatagttgaaaactatcaactaattcctttttttttttaatcgtaagtaaatgattggaataaagatatgttatttgactattaaaaaaaatatattgacttatttagttattactaatcaataatgattaaagctatttgttgctcttttgcattctggtggcgcttatgtatgaatgtcagattgttgtttttatttacaataactatagatagaggagaagcatatgtaccctaacaccgggaggacaattctggccagatttccggcaagaccagaacccactacctcgagcgtcaaaagtcccaccgaccagtgagaatctgttaaccttgttgaagagaatccaggaaccggaattgccaaaggtcctataatcttccggagcaacgacggttccggtcacttgaaatgtgattttgctcttgcatggccctccaaacgttattaccttcaacaaaaatgtccccgtggggaccaccaccgtggctgatgctgccgagccacaagccccttgccatgcctttaggaatgctgctgtggaatcggtgactccgtctggtttggccccgaagctcacgacgttgaaaacaatggaggcgctgctcgagacatcgatgaaggtgagaagtgtgaagataagtggaaatgttatagctgattttgtcattttttatatgtgagtttgagtttatgtttgtgtttgtgtttgtgtttgtgtttgaattgatttgatttgatgcatgggtatatatagggagagagagcataattattttggttcgttattggagtctatggtacaattaagtacatgtgatatctatatgataagaggttgtgaatattttatgattgataaaagagtttacatttccaatcattaggtgcacacatggttgatatcgtacttttaggagcaacggtcgttgtatgaacgatgacatttttgcacattatcaatttcccatataacatgggccatatacgtatgtgtatatgtattatattcttggtacatgttgtttttatatattgatgaacaaaataaatacgtggaaacccactcagcgattgattagaacataaaccgtatataacgttaattctatagagaaccaacaatactaaatgaagaaaactatcatttgtgcataaatagaaactcagccataaactaagagaaagaaactcaaccaaaacccctatagagtgcagagttgatttttttttttttttttgttatcgacacaaaatttacaaactcctgaaagaactaccataaaaataggaattctttataaaaaaaatagtagtaacaaaattaaatgaataatatctatcctaatctttagagtattctttttatcaataaagtattacttttctccaagaaggtaaaatgatcatggaacaaaatccttaaaaactttaattttatcaaaatttcaacaaagagaagaacaatataatccattaaaagaacaatttgtcatctgccatttccttgcagctatatgcaaaacttatgttttggaagtattaggaacactttcagaaccaagattttctgatcgaaggccaatataaacaaacattaagtagttgagcaaatcttacaatctttcgatttgtacatatatgcacattacgggtgaatgttgttatagttagccattttatactctctttttttttaacgaccatatacaaaacggtaatattgtgaaattaaatttaaaatgtaggtaaaaagtgatcaaaatatgtataaatgacgacatcacctcatttttatatgagatgacatgtgatcaacttagcagttgaccgaaaaaaaaaaagacgtgtgattaactagctcacaaattattgaaaccaacccaatcatattcgttaatcattctgatcagaattacagaaagtcaatattatatatattagctaattgtagttgttgacattttgaattcaacagccctaaatatgattcttgcgccgctctagttgaattcattgattggttgttgttgtatctacagaatgaataagaggtaagacgagagaagagacaacagtcgaacggagaatctgctacaaggtagagagaccgaggaagcaggtgattcccatgtgagattcttttagtcctaagccctgaagagtgtgaccatctttagctcttaaactatttagcaaccatatacatacacattattccttttcttttctttattaattaaaaaaaaaagtttccaaaatatataatcatcacaaatgggctttgtaacgggccaatacaacttctcggattacaaaaaacggaagcagaagctccggcaaaaattctttttctcagtttcttctagatttgtcttatattttgcttttaaagccagctctctgctgaccggaaaaaaaaacaagtactgtacaatgttattgtgataagtcaacgtcttccagtttctcagttattaaattttatttactaatgaaaatatagctaaataatttgtaattgcttgacaaaaaaaaataaaaaaaattgtaattttgttgagaaaaaaaaattgtaattttgtaagctgcagtttttttttttttttttttgaaaagttgatcagttgttacagaaacaagaacctttggtactctcaaaccgattgatatccaaaactgatttgcatcgaatcaccgttctaattaatctaataatcgtcacggtaacattacaattgaaagatgaaaggtcaaatccctaataacattttaccatttcatcttacaacaaattaaataactttacaccaagatattaatttgatatcatcggtttagacaactagtaggttgaataacaccaagacttttcccaacagcattgaaacagaaggaagtagcaggagttcctttgttgtaagtaagcttaatgtcctgtaatgtgattcctgtgcatggactgctcttgctacacaccagcttcattgcttcctgtgtcgccgacgttccttgtatgttcttatatgtcacttggcttatcttcaccccagaatactaatacatacgaaaacataattaatcgttagttatttgactaagtcgttataacatatttggattgatctgataaaagaatgcgatatggatattggatatatacctcattagggcaaccttcgtgagtaggacaatagttttggtcgattatgattgggttttcgacgttcttcatgactaggtcttggaagaagacggttctaacgaatccgttactcggcctcgcccatgactttattctcacgccgttttgtgatccggtgaataccgaactcgatactgtcacgttctctactccgtcttctttcagttccttcgccaagctccctatgctgcaaatgcaatcgtcatcacataatcatatgagttatttgctaacttgagtttgaaattcattattttctcagagttaataatttatactatttgcaatttgttcatagatcattatgaaaattaagagcgtgtgttgtgtatacctaaccccgtgacccgggccacaagcaagtttggtgatgaggaggttgcgggtaccagggccgatagcaacacaatcatctccggtctgaacggtgcttccggtgaatgtgaccccggtggagtgctgaacgtggaaaccgtcggtgtttgggctgtttccaggagccactagcttgacgttacggacgaccacattggtgcaaccattgagggtcatatgggtgacctggctgttcatggatttcactccacttatgatcacgtcttttgccgagttgaacgatattgactacaataatgcatcaaagattttatgagattggtttcgccggtcaaattttaatatagtaactaggacgtagccaaatggagtttaatacataattaaaaaaatgtttgcttattcttttcttttttttcaatgtttgtttattcatcttacaaatttagaatttttataatatattggattataaatatgttattttttaaataagcctaatattttagttgacgtacatatatttatatatcacgcatatatatgtaagtatgcatttaaattcaaactagagaggaaaaacactaaaaagttcaaactagagatagaggagagatgcatactctaacaccgggaggacaattctgaccagatttccggcaagaccagaacccattagctcgagcgtcgaaagtcccaccgaccagtgagaatctgttaaccttattgaagagaatccagaagccagaattgccaaaggtcctgtaatcttccggagcaatgacggttccagccacttgaaatgtgattttgctcttgcatggtcctccaaacgttattaccttcaacagaaatgtccccttggggaccaccaccgtggctgaagatgctgagacacaagccccttgccatgccttgaggaatgctccggtagaatcggtgactccgtccggtttggcaccgaagctaacgacgttgaaaacgttggaggcgctaatcgagacatcaatgaaggtgagaagtgtgaagagaagggaaaatcttataactgattttgtcatttcttatatgtgagtttgagtttgtgtttgaattgattttgatgcatcatgcatgggtatatatctatataaagcgagagagagcatgattggttcgttattggagtctatggtacaattaagtacatgtgcgttacgtttttatcaaaaaaaaaaaaaacaatacatgtgcgatttatatgataaggggtttgtgtatttttttttcatgatagataaaaagagcttaacatttccaattaatcattgggacacatggttgatatcgaatttctaggagcaaaggacgtggtatcaacaatgacatttttgcacatatttatcatatatttgtatatatgaattatttctatttctatttttatttttattttttcttgaagcgcgtccaaaatttactcaacggtgacttatgaaacataaatagaaaatcaactgcagacccaaaaacctgttatggataaaatgttctattgctttagtgtcatagcatcaatttatcgataaaatacgaactcttaaaagaattacaaagaaagcaagaaattctttaaaatgtaagaagtaacaaaattaaattaataaatatttatcctagtgtacatctttttttctacacgaaggtactatagaatgatcatggaatgcatcattacagcatttccttatttctgttttgaaaatattaggaacacttttacaatcaagattctctaagtaaaatccaagatatacaattctggacttgagcaatctttgcaatcgttcgattatatacacgtcacggccaatgtaattaattagccatatctataagcctttttttaacggttattataccgttagttgtgaatttttaaaatatgttttaaaatgtataaaaaggggtaaatatatatgtgtacatgacgaaatcgcacacaaaatatatcacatgtcatgtgattaactagatgttgacccaaggaaaacatgtgattaactagatgttgaccctaagaaatcatgtgattaactatctcacacattattgaaactaattcaatcatatcgttaatcattataaacaaaattacagaaagtctatatatatgagctcattttttaaaattatatgttatatttgccaagttatatttatgcttgattattttgttatatatgtaactcttaccaaccaaactattcttaccaaaatctagattacgatttgggcgatgattttatactttgttgggttaaaaaatggtctttaacctaaaactacttaaagataaattgtgacattcagcgtaaaataactaaaagaaacaaaaaaaatggcatgcttagaagattcggataatatatgtttgaagtaaaaatacactaaaaaaacaaaatcagcaacaaatataaatggaattatggaagtaataaagaaactttcaactaatggcatgtgattgccggagcagttgacggagaaagagacgctggagctgtcggattattatgctatatagaattatagaatatcaatacatgtatcccaaatttgacatcttactatcttagtaacaatgttaaaattgtaacatttgttcaaatatgacaaaagtatcacaaatacattttgcataatgctctgtttctacacgtcatcacgcactctgtccaaaatcttacaccaagaaagtcttgttcttggattggcctaaatgtgtaatgtgaaagtttcttcatgtaggtttaaggactcctggagagatgatgtggctcttgtctgcaaaatctgaaaagagagttatacaatataaagcagtcctgaaaaatagagacataacttatagtcttatactaccaaaaagaagaaataaaactagtttaagctctcttacatcttcttcactgagaagtccttggtgagcattaacaacatgatgtaccatgagatcagaagctggctcaacaggattaataaacatatccctacaattaaaaagcagggataagcaaataagtaagaagcttttgtgtgattagaaatccttgaatgtcatttcaatttcaaggaccattgttttctttttgttacctcgaagagcactaacagggtctagaacttgagatctggataggaagctgatgaaaatcgccaaaatagagcagttgcaccagcatcagttcttttttagcaaatgataaatcagtaagattgtgaacctgcagaatcctcacacataagaaaacaaacatgaacgttgaaggaggagttcacagatactcttgtctaaagatgcaagttgcgtttttggcagagcagcaaaatcctcctgaactgctgccggtagctgtttaatgcacaaaaaggatcatctgctaacagattgatcggaagcttattcttggtgtcaatccaaagagctccttaacgacctgatgcttctactactcggaaacaggcatcaatgtttcctcgaaaaccacattcattctcactaagattaacttctgagttctgacctaccaccagctaattggctccccttagttgctcatctacaaggtaattctctattatttcatcaataggatctacaattgtatctggcctcttgcccttgtattttgtatcactgaaaaagtcaaaaatttctttatccgcagctaatccttctcttctcatttggtcaaacacttctcttgcctccaagaatttcttccttttcaaaaaacctttaatgagaacgctatatgtgctgacagagacactaaatcctttccctttcatttcttggaataaaaaccatgcttccttcatgttcctagccttgcaatggcctttaactaaattctcatacgtcttaccatcaggtcctactcctcgcgaacacatgtccttataaattgcagttgctgccttcaggttatttctaatacaatattgcttcacgagagaattaaatgtggttgcattaggcgctataccctttgccaacatccaatttaatagcttctcaccatcttccaacatcccatgcaaacaaaagccattcattaggacgttgaatgtgacaatagtgggttgaagccctttgccgagcatctccttcaaaatctcttgagccttatccatctcccctgatttacagtaggcatccattaaggttgtataagttacagtgtctgcattaagccccgcagcttcaaattctccaacaagtttaactgcctcctcaatattacccgacttacatagaccattgacaatggaattataagtaaaaatatttggctgaagacctattttccacatttcatggagaagttcattcgctgaatctaagtccccttccttacaaagcccatcaattaatgtggtgtatgtaacaacatttggggagcacccagcctgaatcatgtgattgtggaccctaaaagcatctttcatatgccctgctttgcaatatccatttataagttcagtaaaagtaacgctatccggctctaaacccttgcaaaacatttcatgaaatagtttaccagcctctaccatgtcgccaatctgacaaaaccctgatataatagcagtatatgtcaaaacatctggtgtaatatcccgagagtgcatctcataaaaaaacttcgatgcagcccgaatatcccctcgcttgcaaaaaccatcaataagagttgtgtatactacagtgtcaggaagtattccctgccttatcatctctgaaaaagcctcctctgcttcggctagcttacaaattctgcagagcaaaccaattatactaccataaatataagaattcggcttcagccctttccgtttcattacttcaatgagcttccaaaccttgtcaagttccccaaacctacagtatccatttaccactgtactgtaactgattacatcaggtgtgtagcccttcaactccataagcaggagtagatggtgggcttcttttattctcccaagttgacaaacaaaatgaatgacgatgttataagaagcaacattccagcaaacacccacttccggaaactccctgaatactatgattgctgttgcagttttatagcaatctttagaaagacgggtaaggtacacgttgcaagaatcaacagacaaaaccaatccgtagttcaacatcttctcaaatactcttctcgcctcacggagcaatccgaaatcaacaagtacttggaagaaaacatcgaatacacgaggatccgaaccccagtccttgtaagtgtatactaaaagatcaaaaaactgtacaaaggaatcagtaacattcaactttggtctctcccagaaactacttataagagactgagccacttttagatccttagacgccacagccaaatgaataacaatgcaaagagattcaaggttggagtctctgcgggagcgagcccaatcaaagaagtcaagaaccaacctgtaatcacacttaatcttcatcagaacccaaatcaaatgatcagttttgaatttgcattcataaggctttaaactcctcctcaaaggctcagccctacgaagcttaatcacattagtgatttgatgtacaaattcagtgtctctcactgaagctttctttggtgaataatcaggaaaaggtctcgtatcggttaaagttgagaaactgagtccacgagactgaagtgaaaagagttgaatgaaatttctgaagctagaaagagtacctctcttcatcaacaagccagtgaatggcttcttcatcgctctatcataaacatcaaaaactcaccgcgagctaagtaggtagtcgagtcctgtggagaacaatcattcgctgatttttcgaaaacccccaaagtctctgcaccaaaaaaaattgacccgactcaagcgggtgatgggtttcgacgtatgttgcaatgagattgagaacttgaataaaaatacaaactttttgtttctctctttctctgtctctgaagagaaattctgaaaatgaagggcacggcgtgcgattaaagacgacgatcgatttggggattttggttgaaacggcgtcgtatatgcgaacggtcattttaacgaacaaaacgattcgcttttgagctaaaaccacttaaaagcccattaagaatatcacttaggcccatattaaacaacacaatttcaatcattcaacaaaacatagaaacaaactcattgatgttcttatcagaactacctccttcagaaacagcctcttgagccaacactttccatttctcagcattctttctaatctctttaccttgctctgcctccataacttcttccacacgtctcacaaactcttctcttctcacgaacccatcactgtctgctttaaccctaactccaactttccacacatcctccatgaacttagcatttgtaggctgatctgcccaatgaggcataccaatcattggaactcccaaactcaatccctctaacgtcgagttccatccacaatgtgtcacgaaacaaccgatcgatttatgtgtaagaacttcaagttgtggactccagctcacggtcagtcctttctcaccaatttcctctatatagttttctggaagttttcttctctccgtctctctcacaacccacaaaaagaaatgtccgctctgtttcagacccgccgctagttctatcagttgatctttttttagaaccaccaagctcccaaatgatacataaacaactgaactaggctgctttgagttgagccactccatgcattcagcgattttcgcaccgaagaggctgaatccgtagtttttgtcttcagccagtcgcttatctaaatacattgatggaacagttggtcctatgttcaggacaggccacacgcttttaatccatttcagcaactaaaagcagcaaaaaagaaaaaagaaacacaagacaaattaaccataataaacctttaagagcaaaaaatgtcaattagtatagtatcacaattctttttgtttatatcaaatctaataaaattttctatttatcggtaccttttcttccaatttatcgaaagtgttgcacaaaactatatcaactcgatcaatgtttgagagctgatcgatcacagtccttagaatatatgggtaagaggaagattcacagaggaaagacggcaaatcattcgcattcagaatcggtaacgaagggaaagatgctaacgtcgagtgaccatactttgtagacggtacagagaacgagcccttgaatacatgatagtaaatagctgagacaagccaaggctgcgtgaaaaacacggcaccgctcaaaccataactatgagctacatccagaagccacggcatggtggagtcgtacacaagagccctaggaggatttcccgatagtttcatgtcttctatcaacttcggtaagcggtttttgatgctggattctactctttccatgtactcatctaggtcttctgatcgttcctggccttcttggaaaccattggagatggggacgacagtgattgtgtcgtgctctgttttgtacggcggagagggcttgtcggagacgaggacaagagtgatcttaagactttttgaggctaagcgtttacagaattgggacattggagttatgtggccttgtgctgggaaaggcaaaacaataacatgagatccttctctcatcttttttttttttgtctttcgttcttactctgactctgttatgtgtgggtgtgtgtatttataaggttgggttagaggacgactttgattttacgacttttcttgtgactactatccaaaaaggtcaaacgtggctaccaagatgtgtggggatagacatcgatgataattcaacctaccatatgacctttgactgcataaggccgtcacatttaaagtagctttaggtgtgtagtgtatatttcatttttaaaaaaaaatgagatgaatttttatagagttatgcaaaattttatccggcttggatattttattaaaccctggatttttaactcacatgttatcatttggaacttggaattaatagagagctgaagacaaatgagaaactatattattagttattactacaacaacaacaagaattacaattggacttgcaaaagacgatgtacttttgaacatatcaatttaaatcattcaacaaaacatagaaacaaactcattgatgctcttatcagagctacctccttcagaaactgcctcttgagccaacactttccatttctcagcattctttctaatctctttccctttctctccctccataacttcttccacacttctcataatctcttctcttctcacaaacccatcaccttctgccttaacccttaccccaaccttccacacatcctgcatgaacttagcattcgtgggctgatcagtccagtgtggcataccaatcattggaactcccaaactcaatccctctaacgtcgagttccatccacagtgtgtcaagaaacaaccgattgatttatgtgcaagtacgtcaagctgaggactccagcttacaataagtcctttttcaccgatttcctcgacatagtttcttggaagtttgtgtgtctctgtctctctcacaacccacagaaagaaacgtccgctctgtttcagacccgcagcgagttccaacatttgatcttcttttagaatcaccaaacttccgaatgataaatagacaacagaattaggctcctttgagtttagccactccatgcattcagcgactttcgcattgaagaggctaaaaccgtagttcttgtcttcagacagtcgtttgtctaaatacatcgatggaaccgttggtccaatattcaagactggccacaagctttggacccatttcaacaactacaagcagagaaaataaaacttaaaacacttcctacaaaagacagagacatgttcctctatatggatttatattctgtaccttttcctccaatttatcgaaagtgttgcacaacactatgtcgactcgatcaatgtttgagagctgatccaccacaatcctcagtatattcgggtatgaggacgattcgcagaggaaagacggcaaatcatttgcagtcagcatcgggaacgaagggaaagatgctaatgtcgagtgaccgtactttgtagacggtacagagaacgaacccttgaaaacatggtagtaaatagctgtgacaagccaaggttgcgtgaaaaacacggcaccgctcaatccataactatgagctacatcaagaagccatggcatggtggagtcgtacacgatagccctaggtggatttcccgacagtttcatgtcttcaaccaacttcggtaaggtgtttttgatgctggtttctactctttccatgtaatcatcgaggtcttgtaatggttcctcgccttcttggaagccgttggagatggggaagacagtgattgagtcgtgctctgttttgtatggaggagagggtttgtcggagacgaggaccagagtgagcttaagaccttttgaggctaagcgtttgcagaactgggacattggagttatgtggccttgtcctgggaaaggcaagacgataagatgagatccttctctcattttctccttctttttaatcttgtgttgttactgactctagtttttgttgtgtgggtgttgttggtgtgtgttatggatatatatatgattggattagagaacgacttcgattttactacggctttggtgggggactcattaattggactacaatccaaaaattgtctatgttccgtggcgaccaagatgtgcggaacagtgaccgaggtcgatgataatgcaattcaccgatatatgttgacataattgttttagtttattagtttatcgttagcatgtgacttatgacatgtgatatatcaatatgtaactcgcaacatacgtacgtgtatatcagattctttttgtcatcttccctgagagagagacactgcatctcagcctctcagctatgtattactgttgatgtcattgcttatgcaatccgaatccaaattgtaaaatcaaagaaaattttctatttctttctatttacattacctgttaattcgtccccaaatatttttgatgtcactcattattacaaaggaacaaaataaggaaccgaaaacagaaataatgggaaaaaagactacttcgacaacttccggcctttttatatttaacgccgtcccactttggaacccaatctatccacgtggagctctatcactggtcattcttaattctctggagttcacaaatttatgcaagaaaataaaaaaattgattttgaccgcctccgagtctttttacaactttttaattcgaattttgataacatctatatatacatttttggagctattttagtaaataaatccttaagttgggacttatttacagtggatgtcattgatatttaattattataactaattaatattcttaattattagcatttctttatctaatatatttccatcaattctaattacttttaaaaaggagaaatcttaggaatttattaatattatactttattaaaaataaatattatagttagttaaacatttaaaatatttaacggaaaaacgttttataatatttataatatgtgaaatgtataaaaattaaataatcatttgaaataaaacttttaaattgatgtgaattataaattttttaataaaaatattattcaaacaaaaaataaaaaaataatgtttaattttaccgaacgagattagatgataagacgggtttataatatttataatatatgaattttaaaacaattaaataaccatttaaaataaaacttttaaactgatttgaattatatatcttttaaattaaagtattattaaaacaaaaataacaaaataatttttagtttcgctgaacggggttagatggtatgacgagtttgggtcgataggtaatacgagacagtatagcatgggtgaaatctattagatatgtttaatttcactgaacgagattagatgatatgacggctttggatcgataataatacgagacagtatatcatgggtgaaatcatatatatatatatatatatatatatatatatcaaaatatcattatattaataaaattaatataattaaaatttgaattatttagttataatctaaattttaacttaataaactgtgtgttattctttctatattgttaaacagtaaaaaataaacatagtaattgtatactaaataatatatatatatatatataagagttgtacatttagaaaatattaaaatgaattatatttatttaatctactaaacaaattaactttttagtttttaaaaaagatataaccccgcggtataccgcagattaaaatctagttaactgataatcttgctgcataatatagccaccactaaatttacggtttactatcagaaatctgttttgttctaaattaaattaaattccaagatctttattttcctttacttgacacaatcgtttaattatttgtcattttattttcttaatttttaacctaaattaattaaaaaaaaagatgacttgacccttatttcattatttgtatcatattaattggtcggtcgtcggtgttatattttcaccggctagtcggtaaagataatgtgcttatatttggtgacaaggattcactaactttgatctttggtgcaattgaagatcagccatatgtatttcaaccttatattatcccccaaatcattccaacttttattttataaacattcgtggccttcatttttccactctgttgttttctcatacttttaataatttcttttgcccatttgtctttatcattcgaagaactcagaaacaactaactcttcattcttgattctcccacttaaacgacggcgtttttgcttaacgtttatgtatgcaagcaaatttacatacttttcgtgacctttggtttctgtgttgtgtgatatttactacgaaaccacttgtcaccaaaggttcttctttctgttagcgttgggttcgtgattccaagatcaatggttgtgaacttcactagttagagatactgaatcaaagagatgattcttccgagaattgggtaaatcttcgattctgattttctgggtaagaatgatcaagacccttcctttattttctttttttgttcttgcctaataattcttattctctgaatttgatttctttcttttaatgactcagaatcttccgtattggatgtttttgttcctgttcttgataatctctttatgactgtatctctacctctggattctcactgtcactgatgttcatgtctaatgaagcttctttaatttagtcttgttcgtgtcactgttcgatatttttaaatcaaaagttgctaactttgtgtcaatgatttgcttaagtaggactattttgagtttatggacatttgattcttaaattctgaggttgcatcagattagggaacttgaatcttggttactgtaaatttactaggagaaacctgagattgactattaactctgatatataacttatgtttgcttcttgcatttgatcttaacagattaaagaacacgtaacctattttcaattcgcgggtttgattccatagcttcttcagatcatacattctcgcaagtgttcgatacgggagtagaagaagaagagtctttctatgctcctgatcatgatgtcttgactctgcttcaacctaacttcaccagcaacgatgtctagtagtaccaagaacattccaaaacctcctcctcttccttgtattacctaccagcgttttcaatctagtacaaggaaaccttcgagcttaatgcgccttgtgcctaaagaagcacttgaaacttgggataagcttttcaaggaaggatctggagcagatacatatgttgaaaccgataacaagtctcactttcctgcccattcaagtgtcctggtgagttttattaactggtaattgagctcattttccgggcttactgatcaatattacaaggtttttgtcttctgcaggctgcagcctcaccagttatagcgacacttctgaatcaatcgagggataagaatgggaatacatacctcaaaatccatggagttccttgtgaagcagtctacatgttcattaggtttctatactcttcctggtatgttctatgtgttacaaatgctttcgtaatgcttgtttctcctttgaaccatgcctgatattaaaacctacagctacgaggaggaagaaatgaagaagtttgtgctccatttattggttctgtcacattgctactcggtcccatctcttaaaagactttgtgtagagattctcgatcaaggatggattaacaaggagaatgtgatcgatgtgcttcaactagcgagaaactgtgacgtgacaaggatttgctttgtatgtctttccatggtcatcaaagacttcaaatctgtatcttcaacagagggatggaaagtgatgaaacgctctaatcctttgctcgaacaagagctcattgaggcagtcatcgaatccgacagtaggaaacaagaaagaagaagaaaactggaggagagagaagtgtatttgcagctctatgaagccatggaagctcttgtccacatatgtcgtgaaggttgtgggacaattggacctcgcgataaggcccttaaaggaagccataccgtgtgtaaattcccggcgtgtaaagggcttgaaggtgcgctcagacatttcttgggatgcaagtctagggcttcatgttctcattgcaaaaggatgtggcagcttcttcagcttcactcttgtatctgtgatgattctaattcttgcaaagtttctctctgctggtaagttatatcgcacatttcagacaacgccaacaaccttaagatacagatggtaatcgttttcttaaccttgtaggaatttcaaggagaaaatgaagaagcttagcaagaaagaacaatctaaatggcgattgcttgtagaaaacattattagggcgaggaacagtctcgggcccttctcgtcacgttcttctggtttgatatagaaacaggttttagattttagtgtatagccagttagacacaaaaagaaaacgtacataggcgcagggtatagtgtatattgcgcaccaatacggcgcacaatagtggttttgaacaaacattgtctatatcaagttggttgttatatacatgccgagtcgtgattcgtgacagtaatgtgaagaagtttttgcatcatcactcattttatgttagaaattcaaatcaataatattggtcctaaacgactttatttagaggcagacaaaaaagatatacattaatgttatttatatcatgattgtcatgacttaacatatttcaagttgagttatctagtgaaaatatatatatcctagttcatgaaaaatgaaaatcaaccttcttgagtgttatacttctttttgtaaggataataattgatatatacggcgggtctctcgttgacttttgatggtgatttgactttgcaatgtcaccaagagcaagtagctaatttaaatcacttttaacttccaatttgtttatgtttggtcttcagactttacgtcagaataattatttttgtgtctttaaatgaaaacttcaaacttcatcacatcaaaaatctcaaccccatttttagttgtcttctttttccttgtttttcaagaaaccagacgaaaatggaagagtttcgttttctctatttgatatattcagcagcatttgcattgtgtctcgtcgtttctgttcttgctcaagaccaatcaggttttcttaactgattcatttatctttcaaactattttctagtgaagaaagtctaatcctttattcttttcataactttaactcgttgcgtgatcacaggtttcataagcatcgattgtggaattccaagtggatcatcgtacaaagacgacacaacaggtataaactacgtctcagattcatcctttgtcgaaaccggagtctccaaatcgatccctttcacagctcaaagacagcttcaaaacctgaggagctttcccgaaggttcaagaaactgctatacattgattccaatacaagggaagggcaagaaatatctcataagagctagtttcatgtacggtaactacgatggagaaaatggttcaccggagtttgatctgtttcttggtggcaatatttgggataccgtcttgctcagcaatgggtcgagcattgtttccaaagaagtcgtttacttgagccaatctgagaacatatttgtgtgtttgggaaacaaaggcaaaggaactccatttatctcgactttagagcttaggtttctcgggaacgacaatacgacatatgattctccaaacggtgctctcttcttctctagacgctgggacttacgctctctcatgggttcacctgttaggtaaagctctgtttcttgctctgtttcgtgctctgtttcatactctgtttgatgctctgtttcgttagctcaaagtttactttttaccagttgaaacttgaaatctgaagcttttttgtggatcagatatgatgatgatgtgtacgacagaatctggatacctcgcaactttggctattgtagagagatcaatacctcactccccgtgacctcagacaataatagttatagtctttcaagtttggtgatgagcacagcgatgactccaataaacacaacaagacccatcacaatgactttggaaaacagtgatccaaatgtcaggtactttgtctacatgcacttcgcagaggttgaagatcttagtctcaaaccgaaccagacaagagagttcgacatcagcattaacggagtgacagttgctgctggattcagccccaagtatcttcagacaaacacgttttttctaaaccctgagagccaatcgaaaattgcgttttcactcgttcgaaccccaaagtccactcttccgccaattgttaacgctctagagatctacgtcgcaaatagtttctcgcagtctctcactaaccaagaggatggtctgtgctagtataacatgactagcaaagttcaatcttttttctcagtttgatcaatgcattcaattgaaacttacaggtgacgcggttacgagtctaaagacgagttataaagtgaagaagaactggcacggagatccttgtttgcctaatgactacatttgggagggccttaattgcagttatgatagtcttactcctccaagaatcacatcactgtaagtgtagtctaattttaatcgcttcttgatcagtcggtggattttctatattgagtaggaaaaaaatttacactattggaggcaggaacttatcatcaagcgggttaacgggtcatatatcttcctccttctctaacctcacaatgattcaagagctgtgagtttacctaattcaagattctgatgatacctataattttgtattttgttaaagagttttttctgacttgaacaagacaactctattatcagagacttatcaaacaatggcttaaccggagacattccggagttcctctcaaaactgaagttcttgagggttttgtaagttctggacatatcttaacaaatgagatcgataattatggactcttaactcttaacaacatctgcagaaatctagaaaataacactcttaccggttcagttccatccgagttattagaaagatcaaacaccggatcattctcgctaaggctaggagaaaatccaggactctgtactgagatttcttgcagaaaaagcaacagcaaaaaactcgttatcccgcttgtcgcatcatttgcagcattgttcatcctcttgttattgtctggtgtgttttggagaatcagaaaccggagaaacaagtccggtacaattacaaatctatctctatatctttccttttacattcatatctatctgttaatcacattaccaattgttaaaactttcttttgcaaagtaaactccgcacctcaaaccagtccaatggcgaaatcggagaacaaattactgtttacctttgcagacgttataaagatgacaaataacttcggtcaagtcctcggcaaaggagggtttggaacagtctaccatggcttctatgacaaccttcaagtagctgttaaacttttatcagaaacatcagctcaaggattcaaagagtttcgctctgaggtattgtagtagaacttcagatatgacaaatgattccaaaaagatatacaaatcataaccacctaaatacatgtaggtcgaagttcttgtgagggttcatcatgttaacctcactgcgctgatcggttatttccatgaaggtgaccaaatgggattgatctatgagttcatggctaacggcaacatggcggatcatctcgcgggaaagtatcagcacacattgagctggagacaaaggcttcagattgcacttgatgcagcacaaggtatgatgaaacaaagtgtcgatcttttatatactaggttattaattaatccaaaagtttaaatctttaacgaaaaatctatgaagggcttgagtatcttcactgtggatgcaaacctccaatagtccacagagatgtgaagacttcaaacatattgttgaacgagaaaaacagagcaaagcttgcagatttcggactctcacggagttttcatacagagagtcgttctcacgtatccaccctagtcgctggaactcccggatatctcgatccgctgtcagttttctctcttatgtctgccatatttgccaaacatggaatctttttttagtgattgtatgctccgttttgcagatgctttgagacaaatgggctaaacgagaagagtgacatttacagctttggagttgttctgttggagatgattacaggcaaaaccgtgatcaaagagtcacaaacgaaacgtgttcatgtgagtgattgggtgatatcgatcttgaggtctacgaatgatgtgaacaatgttatagattcaaagatggcgaaagattttgatgtaaactctgtatggaaagttgtggagcttgcattatcctctgtttcgcagaacgtctctgataggccaaacatgccacatattgttagaggattgaatgagtgtcttcaaagagaagagagtaacaagaactattgatgtcacaacgcaaagggtgtagaataagtcaaggggttggaaacagaaagatgttgaaaacttgggagtgtttatatatttaaatttttgaaaggctttttaaagtttgtgttgctaatgctatatctaaaagcccaaagtaataatgtaatggaatagaaaagaatccataataaataggaaaaaacaaagaaaaagtacctaatccggtagccacaaggaaaaaagaggacaagaagatggtgacaacaagacaaagaccgaagccgcgtaggaccccaaacgtaccttttaaataaaacgctgattcctttcggacttttgcgtcgcacggtctgtgccgctgtccccacaaatctctattttttacacacgcaatctctacctctgcgtctgcgtttcgaaacgtgactcttctaaccgctccacgtgagtgacttttagagcgagtttggtgtccgaaaccacgcgtgcgcgtctcctcaacgcctgagtctctctatgaagttgcattgacgtcagaaaaattaaatttgtcttacttgaaacataaaaatttacagtagtaaattatcattttcataacacttcatttattctcttgtagttaaacaacggatatactaatgaaatgaactcgttcaatctaattaaaatctcattattaatggtagacgctagagaatctcattattgtaggtgttaatttatgaaaataatacatcactttcaatcactgatttgattagattgatggattttatatacagcccatgtttttaacctctctagttgaaattttggttgattttaaagagaagagaacaaaaattcaaagacgaaaaaagcaaaaagtggaaagtagaaacaaaaagactgatggtgcagagagctggtcaaatatgttgacaaaataaaataaccttacaatgtcactatcatcaataaatgaaaaaatagttctctctatctatctataataataataataaaagcaacttctacctgggactgatattaactacgaagacctctcactctctcaatgggttgtataatagctgtcaaattatgatgtatttagtcacaagacaaaagactgattctgaacactaaagcctaattagggattagtctttactctttagtcatctgtttcatctttattattaaagtttgcaggagttgtagtagatggtgtgggggcaatatatgcagaacatgcatgcttccaaaatgtcctaactacgtcacttaaggttccatttttttctatctaaactaagaaatacttatgtatctattaatctacatctaattggttgtcaaaaaaaaatgtatcatagaagtctttggagcacataaataaaacatctggagattttctgaacataatgtgaggtcaagaatttgtgtgcaaaattacaattttcaggcatgagtggctctgattttgaccatttgaataaatttgtagcttgttataacctttacactcgtaaggaaaaaattatcaaaaaatattgatagtcgataaaattgaaaactctagatttatacaaatcaataaataaatttgaaaataattaaatgagaagtaaatgacattacttcacccaaaaagagtctagacgaaaaagacagacataaaaataagtccccttctatttgtttggagcataaacaaaaacagacacagtttcttctctctctctctctgtctctttccttttctcacgccgagatttctgcgactgctctaatcttacgaccttataagaaacgacgcttattttcactctgcttgagctcttcatcgtgtcacacagcacgatcttggacgtcgttttaagcgcaaaacaaaggaaaaagactgacgtttatacatactaaatactggtttggagttttgccttttggactcagaaaactcaaaagagagagagagacatttctgtatcttatcgggttttgtgttgtcagaaagaagctcaaggacaaaaaaaaaagcaattatttttagggttcaaacgaagcaaaatttggaactttcagaagttgtgggtggtggcttcttgaacaataaagctttttcttagactcttcttccaatttgtgactctacctatctctctctccgtaagctctttctctctctctttattcgttctttctttatttgctctgtttctttactccatttttggcttaattacaccaaatttagtctgctaaaagctaatttcaagcataattacttatctctcctcttcttgttgctaaccttcagttggattaggttttgatttcgtttatacgacaatccccgtgactgaaaaagttaccaactttgatagatatcgttaccagattctactcatagttttgttattgtaatgcaagaagttgagttcttgtttacattaacttcaataattcactgagagtgactttttgttctcctctgatccgtggaggattctctatatgtgttttgttttttgggggggttttctcctgtttttagggactctattgattcatgcatatatgatgttattctctgtttatgagtttatgcaaataatctaagcaaggtatgataacatatttaatctttttgtttgagcttataattgtgcttagaaatcttaaaataatgcttaagctgatgtgaacttgaggcctagcctctgaccacaaatcctagcctacttcgttgaccatacctttgtcttggcttaatattctaaatttctcttccaaatcctgtctcccaatgcattggttggtccaaaacaagatcatcatttcatagatcttgtaatctttctggtctgtaatttgctctaggatggtaaccttgtaccctatgtaacatgtcttgttagtataaattttgggtcatgttgtgttgatgactctttagcgcatttcttattgacaaaaggtatggaattctctagagacgctggaatgatgatggagaataagcggaatgtctgctctctcggagaaagcagtatcaaacgccacaagtctgatctctctttcagttccaaggttttgcttatcctagctagttttcatggatttctcggtcgaaatagtcttcggtacaacaaattgcatggtaatgatccgtccatctttgttctcttaatggcaaacaggagaggaaggacaaggttggagaacgtatttcagctcttcaacaaatagtttccccttatggaaaggtaactttgttttttttggcaagcaaatcaaaagaatctgtctctcagctcatacttttctctaatgttcacagaccgacactgcatcagttcttctagacgcgatgcattacatagagtttcttcacgaacaagtgaaggtctgcagttcaataccaagcatgattcattcatctttatctgagttcccatgttcttttgtacaggtgctaagtgctccgtatctgcaaacggtacctgatgctacgcaggtgagtatgatcttgaatctcaacttcatttatacttagttcactagttctactctgcatctgacagatcttcacttggaacttgaataccttgcacggactgattttcccgtcttttgtaaccaggaggagctggagcagtacagcctgagaaacagaggattatgtcttgttccaatggagaatacagttggagttgctcaaagcaacggcgctgatatatgggcgcccgtgaagactcctctatcaccagctttcagtgtcacatctcaatcaccctttagatgaccaattcgactaatcacctactacgatctttgtgttaagcctaaaaaagaatgaccaattgttatttttctgatgatgcctctgtaacatatatagacagagagcacatgatgttggtttagaacagctcatggttggcaatgattgttattattattcgactgcttaatgcatccccttactttggacttgtgtaatatgcccaaacaggaaccaaatgattttaatgcaaagtaatctttatcccaaaaaatgcctcagatatcttaagcttttctttgtgtgattcttacctacagcatccaatacattattctagatctaaagacccaaggcaagctttctttcagtgctgaaggtatgatcgtggatttccctaatacatatagctttctttcagtgcttgtaatagtgccaaactgctgaccacagaattaagattatcctttcataagaacattggattaaatacattaccactgagaattgcaaaggttcagaacatacagactgttgataccaagggaccaaatagcttggacaaagataagataagtcggtcataatgtgtttttaactactagattgcaatgctttggcatatgtaaatgtgacagggaggatcatcctcttcagctctacatgggataaaactaacttgctgcagtaggcttgaccttctctcgcatatactgcagtagatgttcgcgtttccagttgtcgattctgcaaaacaagcaaatcaagaaacaaagaggtcagctacaaccttggaggaatgaagttgtgttgctgatagaggatgaggtgttaaagacatcacttattcatgctcacaacgagaaaatcctttcaaaaaccaatttaaactagaggtctaagtaaatgatacagcagaatgtaacagagcaacgagagagtgagaatagaaactgctgcagatccatggatagttatatttttatctaccaagctaacatggatatatcaggtcaccttgaacgtcttaaatcaggtcaactcgttcccccacccaaactctaatactaaagattctagcaaggagttgagcaaagggggttataaagcaacttacctaattgattccttatgttcaccgtcttcgtcgagcatgatcaacttgggtggtgagttgaaaatgtactgaactttgacgctagggaacttttctttctcttcttcaatgaaaccaacaatttcaggatagaaaaccaacttcctcatacacacctctaatatagcgccagaataggtaacctgcaatggcaaaaaaatgtaaacttctcttcattcatatccatgttataggagatgtttctgtattcatctaatctattcccattaaaattcaaaagcactacaaattacatgcctagtgatcgtaccttgctcatggaatcctcagaatcatcagcacaacatttcaagcaatcagataccaactctgcaaacaagatcaatcaatataagataaccaatttagtaattccactcctcaaaaccaactttagagagaatgatctagctcataaaatacacaaaaactaaaatatagaatcttttgggggaaaaaaagcaaaactgcagtaattgagatcaaataaagcacgcatagaaaggcacgaaccttggtccttaacgtattcagagagtgagtggcaatcggagcagagtgcaagaccgctaaaccctagatcctcacattctttagtgctgagctgctcttttgctgagatcgtcgatgccaatatcaaaatcatcatcgctgataaaacaaccatcttcgccatctctctctgtttcatcaacagatcaaagtcttcgcagatccgacgctactctaactaatgtcgctgccttgctatgatccgatccggtcaattccggttttttaagtatccgaaaaagcaatcttggtatagaggaaaccatctccggttataaataaaaaagtcttaaccgacgtgaaaagtgttaaaaccccaattcacattagcctgttgcgatctaaaacctctaaaaccctagaatcaaaatcgcccattcgagatcgagagagacgatggatcacatagcggcagcggaggagcaaattgtaacggagaggattagaagaaaacttgaagaagttaatgcaactgctcaatcgcaactctctcctattcaagatcacatcaatttcacccttcaggtatattaacaatcatatacctttttgtagcattcctgatcctcctactcataggtgtatgttatttgtgtgctcgtgttgattttgattcgggtgaccaatttaccaattctgaaaaagccgaaattttccttcaacttgtaatcgcaacaaaagagaaaaacttgtccttttgttccatatattgtccaattcaaggcattaatctgttctagttaagttcacttgtggacttgtggtatatctcttttataatgggttttaactaagttttctgagctaatttttgctgccctttgatacaatctgtctagttaataacatgaaagtttgtagtcatgttaagttcctggaagctgtgtcttgttgtagtcatgttaagtagttcctggaaacttaaacttgacagttttcattatatctctacagctatattagtataactcaagttgtatgaaagcgtattgttttcatatttatttgttaagttgatgaatcaaacccggaaaattgatcaattgcagcaagcctatttcaaatgtgcatacgagtgctttgacagaaataggaagcaagaggagatagccaactgtgttgagcactgcagtgttccagttgtcaatgctcaacagcatttcgaaggcgaaatgtctcagtttcaggtataatataatttcaactcacaaaaaatgcataattttacaatggactgagaaacttgcaattgtaattatgatgcaggaaaggatgaacagatctctcatggtctgtcaagacaaatttgaggctgcaaagctccataagaacaggggagatgccgccaaagctatggagagttgtgtgaacacatccattgaggatagtctcgatacattgcctcatattgtgcagagaatgaagacgtcattctccattgccgactaataataatcctctgttgggaaaaaggggcatctttacttttgtctcttgctaatcatattcatgccctttcactatgactcaatagataaacacaatggatggtaggagttgtgtagtggtaaagtatatcagaccataactttatataagattatgaggatcttgaacaacaagcttttcacagtatgtggtatgaggaaaaacaaatcaccagatctgtattcaactgaaagatcttaaaaccaatgtgtttcgaagaggaagaataggtaaagcaaaccttgtagttgtagttgtactttctttaaagctgaggagctaattgcaggaaccaaaacgtcagtcataaataattttgaatcgaaccaaaccccatccgagtttattcggtttcagtttatcctgaaggggtgttttttgtcttgtcggtcggagaacctcgcctatataaataaatgcttccaatttgaagagcagctaaaccctaaccctaaaatctccagagagagagacgatggatcgcatggcagttgcggaagagcaaatcctattggagagggttaggagaaaaatcgaagaagtaaatgcatctggtcagtcgcagctctctcctattcaagaacatatcagtttcacccttctggtatatatatatatatatatatatatatatttctacaatcatttagtacaagtattgctatatcttttaacaaactagggcagaaaagttaattagttttacttttgagtttcgctaaagatttatgcacctttgattgatgatgaattgcagcaagcttatttcaaatgctcaaacgagtgctttgagaaaagaagaaagccagaagtgacaactaactgtgttgagctctgtcgtgttcccgttgctaaatctcaacagcaattcgatagcgatatggccaagtttcaggtacaaaaatagtccttaactgatcccattaagcttttgccatgtactgagaaacttgcatttggttaactaatgcaggataggatgaacagatctctcatggtatgtcaagacaaattcgaggctgcaaagctactgaatatgaacaggattgatgccgccaaagatatggagggttgcgtaaacgatgcagctgcagcattacttggcggctaagcaaccaacggtgtttattagggcttttaaaagtttttttgtatttctatacagttgatttggatttacttgtgctgagatagactatcgtttaattaaaatcttaaaaccggatcaaaccggattctattttacccggtcttatgtccaaagtcgggtttagttagagataaaaggaaaaaatcaattttaaaaagtcaccatctcaatcgaatgggtctccttcccgtcgtcggaattacttcgccggcgctcatcacccacaaaaatcacgccaatccaaagatacagagacataatcaatctacctccgagaccactgtttcatggacttctcgcatcaatctcctcacgcgcaatggtcgattagcggaggcagcgaaggaattc

SEQ ID NO: 16 - DNA, 79554 bp, Arabidopsis thaliana
taaaaagtcaccatctcaatcgaatgggtctccttcccgtcgtcggaattacttcgccggcgctcatcacccacaaaaatcacgccaatccaaagatacagagacataatcaatctacctccgagaccactgtttcatggacttctcgcatcaatctcctcacgcgcaatggtcgattagcggaggcagcgaaggaattctccgatatgacactcgccggcgtagagcctaaccacatcactttcatagctctactctccgggtgtggtgattttacctccggaagtgaagccttgggcgatttgcttcatgggtatgcttgtaaacttggtcttgatagaaaccatgtcatggttggcaccgcaattatcggcatgtactccaaacgcggccgttttaagaaggctagattggtttttgattacatggaagataaaaattcggttacttggaatacaatgatcgatgggtacatgagaagtggtcaagtcgataacgctgctaagatgttcgacaaaatgcctgaacgagacttgatttcttggacggctatgataaatggctttgttaagaaaggttatcaagaggaagctttgttatggttccgtgaaatgcagatttctggagtaaaaccagattacgttgctattattgctgctcttaacgcttgcacaaaccttggtgctctctcatttggattatgggtacatcgttatgttttgagtcaggatttcaagaacaatgtgagggtgagtaattcactgatcgatttgtattgtcgatgcgggtgtgtggagtttgctcgacaagttttttacaacatggagaaacgaaccgtagtttcgtggaattcagtcattgttggttttgctgctaatggaaatgcacatgaatcattagtctacttcaggaaaatgcaagagaaaggctttaaacctgacgcagtcactttcactggggcgcttaccgcgtgtagccatgtaggtctagttgaagaaggtcttcgatattttcaaattatgaaatgtgattacagaatctcgcctcgaattgagcattatggatgcttagtggatttgtatagtcgggctgggagattggaagacgctttgaagttggtgcagagcatgccaatgaagccaaatgaagttgtgattggatcgttgcttgcagcttgcagcaatcatgggaacaatatcgtcttagcagagaggctgatgaagcatcttaccgacctgaatgtgaaaagccattcaaattatgtgattctctcgaatatgtatgctgctgatggaaaatgggaaggagcaagtaagatgagaaggaagatgaagggtctcggtctaaaaaagcagcctgggtttagttcgatagagattgatgattgcatgcatgtgttcatggccggtgacaatgcccatgttgagaccacttatatccgcgaggtcctggagcttatttcttctgatttgcgattacagggctgtgtagttgaaacccttgctggtgatctcctcaatgcttgaaatccaggaacctccacatcccattttttgttcaagtcctgagcgtgagcatttgctcaaattggttgaccgcaaagaagccttacagtggtcttagtcttagagtcttagagatgctgaacgctagaatatacctcattacataaccattgtcgcttcctccaacctttttgccaggccctaccaataaagatctgggtgtatatcgctatttaaacctgctgaatagaggccacacaaggatatggtgctcccgtgttttgtaagcttcgaatccaagctatgtggccttggcggccgtctcctcgtgctaataaggtaacctgaatctatgtgcattcttctgtgtcttgtcatgttatgttgatgttattgctggttactgtcaagttagtaaacagttcaataactcccacattttgcaacactttggtgttctgtttgcgtggattttgtgataccttggggcattttctagcatttgtttacctagcagtgatcatagcacaggattgattcagcgaaatgcataggcagtacaacatctataagacctgctagcttgagtgtaattattcccaacaatatccttgttaatgcatttttcgaagatagtgagttctgttctaggtacatctggtattgttaatgttgtatcataaaggttaaagtattttgacgattatatgttacacatatcagtttattcatagaagaattttcataattaagaatgtacaatcagcagaatagagtcgtatacaaacactttcagcccagtacaatttttgactctgtttcctctgcattgcccgtatctattttgggtagaactgtttttgggcggagataaacaccaatgtactgtagtcccgaggcatcataagtcccatggaaaccgccgaactgaggagatttcccgagtttaaaagcaaatttgtcgttgctcgaaccggaggtgccaaaaggaccgtactcgctagtgttggtattgaatttgagagacctcatgtgaggattgttggcttcatacttgtaatactctccactgattccagttatgtactcatgcggatagttgagctctatctgctgggtccaaatcacatattaagttataaaaaaaaagttataaccatgttcttagcattttagttggaagtagaaattgtgacggagaaaaaagaagagtcaaaaatcagacttacaacgtcaaacatgttgccggaaaatggaccgtgacgatcggataaaacgagttttccgtccatcacgaactggaattggatagacataattccagcgacgccatgagatagaaaaatctgagagatgaagccatcgtgagatccttcgtcccagtttacaattgtagtgcttctagcatcatgcttccctacaggtcctatcttcattttccctttctttttttttgtacgaccaaaactcaaaagctcttttgtttggttacataacgaaaatagcataacattaatatatatacatgtagagattcaaagttctctaactctgaagtctcagattggaatatgcctatccaatttgatattagtaattcatcttacgattcattgttttattgcatttatctttgcttcttctctccattacccaatttgttttaatgaaatgactaatagatttgttactagagattctttaagataatgttcttattttgacgcctcagattggaatattcgtttacaatcttgcatagcttcatctagcaaattatttcctttctttcatttgctttgacaaagagtcgaattttgaaagaatgtattgtcggatgaaaattatgtaatgcaatgattatcttagtctgttaaaacgatttactacgttggtcgagacataagtatagttttttctaatgtcattacaatttcaattgtatttggctgtttttaaagacaaaaatattcaagttttatacacatatttagactatatgtatttaactcaaaatagggttttatttgcacgcctcagtagtcatgattaataagttatttatatacataaatcttgcaggataatatgtatttatttgaatgtctcatattagaattatttcaaagaaaaaggattctagtaattattaaaaaaacttggtgcggaggattctagtaatttttgattaatacatttaagagaattttaaattagcaaaatgtttttccggatggaggttatcccaaaaacatcttctgatagaaaaataaatctgtgagatgtcgttgttgagacttgagagttgagaccatatggtccctatattgaggattaattgtgtttgtgggaaaatatattccctgctgggcaacgaggaatatggttgaaccaatgattatttatatgcttaatgcatgtgtatatatttacagacgcatcacacacacgtaaagtaattttattcatacaaagttcgaaagatattgatataaacgcatgtagaggctgaagaaggtttaagattaatacacaatttcatttaacccaaaacaatgtttgactcagtttcctctgcattgcgtgtaccggtaggtttaacaattgttggttggagataaacaccgatattttgtagtcccgaggcattatatgtcccatagaaaccgctgaactggcgaaatttccctagtttgaatctgaactgttgttcgtgattccaaatcgaagactgagagctcgagccgccaaaaggaccgtactgattaaggttggtagcaaatgcaagagaccttatctgagggccgctagcgccatcggacttgagatactctccactaattcctgttatgtactcatgtgggcagttcaaaagtatctgcatagcccaaaatccacattttaatttatattaaccatgttcgtgagatcaatatatataattaagtacattaagttgttgttagtaaatttcgaatctagtgattcgtgtactaatgaagaaaaacaaaaacagaacacactcacaacgtcaaacatgctgccagtattctgaccgtggcaggaggataagaaaaatgtatcgtcgagcatgaactggaactggatagagaaaacaccggtgggaccatgagatagaaatatttgagagatgattccattgtgacttccttcatcccaatcgaccattgttttcttacctgaataatccgttcccactggtcctatcttgattttcccttccattttcttctttatgtgttttttttgttccctcttactttaaggataatgcaagagttaatttcttataagtcggtgtttttaggataatcttgttacatgatgagatattccaatcttgcataacttgtaaacaatatatattccttacctttattccatgtctatctatttaataagtcataaattgaaacatatcaaataatcaaaccgtcaaaattaattgtagtacaaaaaaaaccgttaaaattaaacaaaaaccgtcaaaataatcttagtaaaaaaataccgtcaagattaatgtttgtaccgtcccacgaatcggcttataccgctcttacaagcaatcttatttaacccgccgagtctaagaccgagagtgcactcgctagatccaacgccggactcaatccatcccttaaccctgagcaagatctgtgtctctcgattcctgatttcatctaaaatcaatgggctctcgatttctgtaaacttcaattcggtggttttgccatggctggagttatgcacaagttccttattgcgtcaatgttcatgtggattcttcctgttgccatattatacggattcaaccacaatttgcttcctggtaattaatctccttgttttattgcgatcctctccaattttcttttggttgagttttatcttctagttatgctgatgcaatttcgagttggattcattccaatattgttgtgtatgaagttcacaaatgtgcaacttttcatattttgttatctactatttagctttatagttggattgtaaaacaattgagctaaatttcgcatcttagctttagcttcatcgcttcttaggagtgaaaagcctaatgagaatatggatgttttctatgagtttgtaaagatctctctggtgatcatgataagtatctctctggctcttcatcttcttgatctttgactcttcctcgaagctgtccttggcgcactttctttgatttagaaggcaacaactgtcaattccctaaatctttcttgacaaatcataacaactttggttaaaaggtttcgaaaactcaacctcttcttcagtctctctctttccaaaagggaaagactgaagtagagattgggtttccgataccttttggcccatgtcgttatgatttgtcgaggaaggtttgagaaattgaaagaagatgcgctaggacaacttgaaggaagggtcaaagatgaagaagatgaaaagccagaaagatccttatcattatagctagagagatcttcacaaactcataaaaatcatatatattcttactagggtttccactcctaatgagtgaagtcaatgatgccttgaagcaaaacaacttcatcttcttcgctggagatcataaactacacaaattcttgaaatctttggcttctacgtacactcttttatgtagaacttttctcatgaaagcagtttaatagttccttttacttggctatggtggtagttttagaaattttctctattgtacaactttttgaaactgtactctcttagaattgtcatatcaatatagctttttgatgatcttcacattcatccaatgctcgttgttcctttggcgttgtctgtcccacataagttttatgtattacttgctcagctcgttaatgtgataagctgacctcaatactcactatcagtgttttgagcttgatctttaacaggttcaacgacattgtctcctcattctctaattctcttgagcggatttcttgcggtggtatcagtgaacacagtgatcgtgttctacatctgtatggccatgaaagaacctgcagataaacacaaaccagacgctgcatttctcgctgaggccaaagatagtgtgaacaaattgacaaaaggagccacaagcagtgatgatcatgcactcaaaaaacaagagtgagagctttcttaatccaattatgaaatgaagaacaacatctgggttggatcgaatggagcagacctcgggttatcgaaatagattattacaggattctgtgaaaattgaggtttagggttggttaaacaaagtagcagaaaaacatgtcgtgtatgatgaacagagaactaatgttataacacaaaactacgaacactcttggaaggattagacatttgccagttatttctttcctcaatacgtaattggtgtaatgaattattccacaaacgaagaaaaattgacataagaacaaaaacaaaacacaaaaacttgtataaaatttgtaggaattttttttataaaaataatttgaaaattcaaagcaatttttttctgataaaaaactaaagtactaaatttacgtatgataaaacaaattgaactatcaaatgacgctacccaaatcccagttagttttcttatagttttgtaaatctaaaactaaaataaataaaaaatattaaatatacataacgattagaaaacaaaatgaaattatgaaattgctaacgatcaaatgactacgtcaaataacgagatccaaagtccggttagatttcatatcattttgtaaatctaatctaaaatacgcaaaaaaaaaaacaaattgaacttgtaacaaaatgactagatcaagtgacaagcgttttgtaaatctaatctaaaaacaaatcagaaaatgctaaatttacataacgattagaaaccaaattgaacttgtgaaatcgctaacgatcaaatgacggaatccaaagtccggttagttttcatattgttttataaatctagtcaaaaacaaaaaaatgctaaattcacataacgattagaaaacaaattgaacttgtgaaatcgctaacgatcaaatgactaggtcaaatgacgggatccaaagtccggttagttttcatatcgttttgtaaatctagtctaaaaacgaaaaaaataaaatgctaaatttacataacgattagaaaacaaattgaacttatgaaattactgacgattaagtgactaaatcaaataacagaatccaaagcccggttagttttcgtaccgtattgtaaaaatctagtctaacaaaacaaaacaaaatagaccaaaaaaaaaaaattgtagaaaagacttagaaattcacctgaaatcgttcttgaattgatgtaacgcgtaactcttttccttatttgatacctctcgaagtcgtcttatctgagtcatcatctcacgaatctttaccgtagtcctcctttgttgttctccatactcaaccaaattccaaaaatagcccttgtatgatgacatcatccaaaagagccgttgtgtgacatcatcacaaataatctccgacgaagccattaattgatcgtagtcagtttccgtcgtcttgtctcggtcatctcacgaatctccaccgtagtcctttgttctccatactcaatccaaaatagcccttgtgtatgatgatatcatccaaaagagccgttgtatgacatcatcacaaataatctctgaagaaaccataaatctatcgatcgttgtcaatttccgtcgtgttctgtcatatctcggccacaacgtcatcaccgtaactttgaatcccttacgtataactataattccagattcaccttctttaaacatctccttgccctctctaatgatcgacttaattaaacatgatcggagaaaaaaactgaagagatacgaataattcccaaagcgatcgagaaagagattcatgacggcttcgatcgacatatataatttggtcgagaagaaactcaagtttttaaaagaagaaggagcaatttagggttttgctcttcgaagaatgagaagtttgattcttaagaagagatgagtggggttaataaggaaaggttatcatcggaaaaaaaggaaattaaggtgattgatcacgtggctataatgaattaatctgattgcccaattaaaaaaaaaggaaatttataaatattaatttttaaaaaatatatatataaatattaattttgatgaaaaggaatttgtaaagaagcggttctcgtaatttttcttcggaagttgtcaaagaaccggcagatcctcgctgctcttgcattcgctcactacggtaacactctatcatctccatctctgttttgaattcgagattcgaactcaaagatttcgttttggaggattgcaatcttttcaatcaaaaaaaaaaagtaaaaagattgtaaaattgatcgttgattgggtgcggatgatctttggtcttcttgagcttaacttgggttgacatcagtttactgttttaagagatgaaaacccacaaggcatataacttttctagggtttagggtaattatattttaggatcaatcttctcgaaaaggaagaaaaattgaagcttgctatgtctctttaccttgagatatgagaatcacaggtcaaattatgttcttgatagattcagttgttgagttcatgtgtggtgttggaagaagtcaaaactctagttctagatataagcttgaaatttggacatgattttgtagatgtaagcttgaaaatggtttaggagagatgttactagatgcttccttatgccttctctgagactttaacattttgttgacacttttgttcttttttatctacatcttttgaatcatttgtttaaagcttttgcttaactcaaaagtaatttgtctcagcttttgcttaatggtgcctttttcctctggcaaacagatctcagactacagttaccaagatggtgtacgaaataactgagcaaaaaagtaattatttcttcacaattatcgctgtatagctttttcttgtgctgtttctgatgtacaactcttttggcaacggattttcgttagttctaagcattttgtcggtcctgtcgttcacttgtctttctcttgtcttataaacattactgaacagatcaaggtagatactgggtcagatttctttatatacgtgttatatctcttctttaggaattaaatcagtaatagaaatcacaaacttcatttttctttgtcttatggcttccatttcctgaatgtttgcagaagttgggttgggcctcattggttttggtttatcctttacgtttctcggagtcatcttgtactttgacagaggtttgctcgctctaggaaacgtgaggatatccttgttatttctaaacattaaatctacacaagggtccaacatttgagtctcatttggcttttgtgttcagttattctggttgataggtgttggccttttacttggttggcagtcgacttggagagtatttacaaatgttaataacttgagggtacgcattggactaattctaatctctgttaattgtttctcttgatgaacctttcatatggacatatcaatatgttcttgcaggggactatctgtttcgtccttggactctttctaatatttgtacgttggcccattatcggcattatcttggagatatacggtgtcattgtcctattcgggtgagtgcatttgtttctgttgctcatagtttcttatcgagtttttcacacattgtgcttttagatttgacatattaaagcagactgaaaaatgagtaaactagtggttctggcacagcacactaggatcttttgcctacagaatgatgatgtttgactaataacaatccatatctgatgaactcatttcctttcaccagtcacttattaattttattcagcttcttgcttaaagttttagcctgttacagtgtctaaccaacatcacatgtactaactttgcagcggattttggtcaacagtaaaggcatttctttcccagattccttttgtcggatggataatacagtatcctctcatggtaagtaatccacaacaacacttgccttttcctctaatgctcctttcttatgctttttgtacattcagagcttcctgtcagggccttgttcttgaacaacatcccgtgctcctgcctcaatttattcagtcccttgtggtagcttaagttagcctttctcggaaatggatagacccaatggacgtttcctgatatttagtttgcacatgatatagggatgaacataaaatgatttagagcgatggactgaattttgttttggaatgatctgtttatttttgcaggttcttgagcaacttgtaagaggtgctcgttgaaaaagatcaatctcaatctcatggctcttcagccgcttaacgacatcaaagcctttctttcttttttgggacatgacagagactttgctctgttttttgtttttttggtaaacctcacctttgctctgttttacatgtctaattttgctgtatatgccaaaatacattttcccttaaattgatttatcttctcgttaagcaagtattttcaactataactccaatcttgtgccaaatttaatcaaattcagatgataagtttttttttttaaacctccaatcttgtcccaactcaattttcattatgtaacgtgcggataataattaagtagttttgtaacgaatcaacgacatatttaacataaattaaattttaacagaataaaaagtgttcacgttattaaattttgtttttatttgcgtacggacataagttcctaaatgtgtcagccaaagatcaaattgttttcaggatcagacagagatcatcgagtgcggatttttctcggagagatgtctcttcgtgctttcttgctcggcgaggcattgacctaaacccgcttaataatctccgacgaagatccaggacacactcggcgttaagaggggaaagaaccaaaaatcaaacaatcatgtggatttcgaggttgaagagagttaggagaacgattatggttctgggcgttgccaatttcgtcgtgattgtttccggctgcgttcttactctcgtttctgacgcagattgcgacagccccggacaactatttcccctcttcgccgtttgtttcgctgccggcgtcaaactcgccgccatggttaaggtcggtactactcaggaactcatggctatgaccattatggattctcctactcagaacaaccaccaaagaaaggttcttttctctatctctcttcaattctcactctctctcaattctgaatttcttctttttaaaaatcaagtctttcttcaaggattggcgttgacttaacttaatgttagatagagaattggttctgagattatgcattctgttatgatttatctcttcttgtgtgttggatatgcagttgaagtataagacctggctttggtggactcggtttgcaatggtgattactgtattgcaatttattggtgccacttaccttttattccgtctcgccaaatatgtttcccgtgatggattgccaaggaattgcgttttaggtaaactaacacattttacattcatgtgctttgtctaaagtcacatacttggccatttataatcttgagatatatatttgtttgggttaaacatggcatatctttttgtttctatgcattttttcttgcttaagaatctctttagtaacttctttgctcagggttatctccggacactggtgggtggaagcaaacacttcaggttaccttcttgatcactgtttgctttgttgcgctggcacaatgctttacgggatcagatatattgcaatggcggtctttctatgcaacccaagatgatgcctggaaagctcactaccaggaagtatttgaccatggaattcgtgaagttttgtgctgtcttggacgtcgtgaatatatgcaagttttgttttcctgatttaatactgaaatcatttatactcatttgtcctggttctggagatttatagcaactttactagttcagactcttagaatttgattgtctgcttcaggggtgttattgaggaagacgaagtgtgttcagttgcaagactcttaggtgatcttgtttcatatcgtgcatctggcactggccatttggaatttttggcaggttaatatctgaaacttatataagcttgtttggtgtcgatgattttgtttgttgttgtcaattgttagtatttaagaaggaaaaacgtggagaagtctctcaggctttgaagtttcagtttttctaatattagagtactggggtctggaagtcattttaatcatgccttgtcatagttgacaatatttgaagagaattctaactctctgaaaccttgatcaacagtcggcaactagattttgtgatattgatcaaaccagtgacttctctcttctgtcttttaatatttttctagagtcatggtattatgtcatcgtagattacctgagtgatgaagagagttccctaaagaagtgcttaaattgatatgctatgatgtacactttgtgttgtagtctcttgtcactactcttcttgctaagtaatctcagtgtgtgaaccttattatctattcaggccttgctctgctgcaaagtaatagccagtttcctgaatcatatgaggactgtatggaagctccagcatttcatcttcaggaggctgctatgttgcataaatttgcagaagctgcttatactgtatgtttgacaacacaggctccaaaactcttcttaaaatggtagatttctctaaccttcacgtgttgtgcaggggccgctgcttgatgttgggagaaatcctgctttatttttatgcacatggatttgtagacaagggattttaacaccttggagccgtaaatggtatactatacctggttagctcgtttgaagaaactcaacttgtttctttgaagtttactctttccagttttcatacctttcccttgtgtctgatcttgatacggacaaatacatattatatcaatgtaagaaacttccttgcaattatttgcaggcggcctaaacttgatggtgataattggtggcgaggtcatgcagctgccttccttaagttcataaattttcctgctcatgttcttcgacgaggccgaatttgtagggtaagtttcttcgttttcatcttctgttccaaaaccaagaatgaaaatggattcatatgaatgttgtgcctcctttatatatggttccacgaccaaagcaagccatggcagaaaaatcttgtatgccttgtttcatttgacattaaatggaaacgggttcacagtaaaaaaaataatttttagtagaaaacaaactgttatcgaagttgtttgatatgttttgcatttatccatcagaatctttctcatctattcgtttaattattctattgtggcaggagaagtgtaaagcaacatactttgttgtagtcttacattatcttagatgtgttgtaattgctgttcgaggaactgagacggctgaagacctcataactgatggtttaggccgtgcgtgttcactaactgttgaggacttggatgggctaacaaagtcagtctctatctctttcttatacaaaaacaatatttatgcttgtgagtttggattcaaaatcaaaaacctacggtttcacaagttaactaattattagttgatgtgtaaatctaaaaacatttctgcagttctgttagtttagaactcaaaacttcgatatctgatgtttcaagtcacgcatgctttctctttcttctgatttatgttgaggtctcactacacactactccgcctgtcagtagtaatgattctcctttttgctgtttcatgtgtttttctgtcagtcatgtacatggtatggatacatctcgcaaacactatggacattcaggaatagtggaagctgcaagagatctatttatgcaaatagaaggagaccccaaatctggaggtacgagttaagctataactgacccttgatgttgtacctttgtgatatgtgttcataaattgccacaatacaagcttctttacgctaatatacaaatgactacgcagagtcagaatcaagtgggttcttgtcctcattgattggtgatggttgtgagtgtgatggctacagcattcgcattgttgggcattctttaggaggtgctatcgcctcattactgggaattagagtacgtttttaattaataaaaggttacatgcctttctttaacatatctttcgtttctgagttcttttctttttgcgggtagcttcgttgcagattccctaacctatatgtatatgcctatggacctctcccatgtgtagattcggatgtggcagaggcatgttcagaatttgttacaaggtaaatttttgatcatgctgattttaatggtttagattaagtcactaattgtttagccccttgatgcaattcttaacagcattgtactcgataacgaattctcatcacgactttcatatggatcaatccgccggctccaagtagcagcaatcaaagtactgtctcaagacccaaaagctgatacagcactcattttcagactcgcacgccggttcttgtctgcaagcaaacgccaacgagaaaatgttgaagaaaaaacttcagaagaagcaatagatggtaacaactttaatctcactctgatactcattcttttagtttcccccatcaagagaaattacctaatgagaaatatttgcttcttcttgcttttcttggtaagttaacaattcaccggaaagccaacacgatcaaatatacccaatatgggaagaagctgaagcagaaatgcagcaagatagcgaagagttcataaacccatttcacggtatggcctcagaggataatcccgtgtctcagtttatggaaacaggaccaacaaaagaagacgatgatgaagctccagagatgttcatgcccggtttagtcattcatattgtacccgaaggaaacaacatgagtgtgccgatatggcgaggatggccaatctgtgatgtgacggatggttacaaagcttatgttgcaaacagagagagcttcaaagaaattatggtttctccatcaatgttccttgatcatcttccttggaggtaactctctaaaacacaactttgatttttttaagtcaaaacagagcctctctgaatcattgctactgcaatttattgacttcagatgtagacacgcgctgcagaaggttctagaatctcggaatctcttcttcgatctgacaagtgagactgatatagtataacacaagacatgaacaggtttctctaaacttcgattgaacaacacaatgtgcatatatgttcttcttattgaaacatcaaacaacataatgaatgaacttttcatatatatcttcaaaatcaaattcgttttttttttttataaagttgtttggaggccactaagaatttcgagatgcttgtacaactgtacaagggatcgaatcgaacccgcttgacgtgttaggacgaaactagagatgtagattagcattgtcggctggtcgttatttatataatctttttcgtatatagatcattacttttgtagcaagttatagctttatttagaatcaaactcaagaaccctcactgcagcttccttgaagagaagactcgtctctcaatcttcaaaagtaaggaaaatatgaataaacctcgaaccaaatttggctgcaaacacttgaattagtcatgcgaacaataaaagacaggagaaaagcaaaagtaatattcaaacaaaggtttttaggttaatatctcaagttgcttaggatgctcttaaaaatccacagttttttaaaattggggaatcatttgataattattcctttgcataatattgaaaattaagagttgaaaagaagagaagctgagtatttggactctttctatatatggactatggtctatggaggctcttctccttaataaccgaaagttttatcagttttgaatttcttttcccaaaattcgacagtcttccactaaactttgtatataagatggctggtcaagtagtctcacgaatgttttctttttgaaattcaaattgagtaatgtggcatctaaaacgagaattaccaattaaagattatcatgagaccttttaaaaacattcattgtacttgaaattaggtgtatataaactttgatcatttaaaccccttggtctaaaattgcataacattgctccggttttgagttttgactatcattctatgaatttctttaaccgtcaacagttctttgtttacacaatttttgtgtaattcgatgacgttgtaaattttttagactttgcatattcatttacgatatcaaatcatcgaataataggtgaatgttatttctgcaaggtactaataattaaatccaaagaggaaaacataacaagtgaacataattttttttattaattatatgcatatattaattcccaagaatatgattacgtaatatgctataaagtttaaaataaataacgaatctcattatagacgaacatatatacattaatcatatcttttaactcgaacttttttgtttgagttgatcatggatttactgtcaccgttttcttttcattttatttttttaaattctctatactaaaacaaataaaaaaaaatattgaaatattatatgctcctattaaacaattttttctttgcagacacatccacactactgttaaggtgatactatttggaattaattagggcttgaattatgaaaggtaaaataataagtattgaaataagtaaaataataagtattgaaataagtaaaacggttaaaagtgtcggttaaaaataataagagtgtggtgagggacaacaggattcagtcttatgtcgcagcagggcatcctcattggttacatggtctctttgaggttgagagaacttctctttctagctagctttgttctcttttccaatctttgtcgtcattttttggtgagatgttatagttataaataacatctcatggtaactctaactaatcttttgtaaagagaacttatcagttctggaaaatcaatataatcctttcagtgaaaaaaaaaaaaaaagtaaaacggttaaaaatgaagaagttgggagttccacggacggaggaataagtcaaataaggaacaaagcaaaactgaaacaaaactttcagctgtagcttttcagtctatctgtctcgcgctttgctcaattcccaacagttccaaattctaaagtcaactcatttcctcgccgcgtaaattcttccttcgtaattcgtgccaaacaaattacacctgtttttttcgtattttttcattggttctacttttgtttacggatatgaaataactgatgttctagtataaaattaatatatttgattgtttctggaattttgtgttttgtgaatctatcgtaaatattattttaaataaaataacatgcctattaaaagacaagtgacattaatattgtacaagatttttcttctcttttctactaatatatatatatatataaatgtcaacctcatggtgaaaaatatgtcaacctcgctaggagaatgtcaacatatgtcagttatactattgtgtcattaacataattagaactttagctaaggtagtgggtgaagtcctcgaccgataccgtggcccgtacgtgtttaacttactttttttctttttccatctcgataatggatttgcccttaacctatgctttcacatgatcactcgacgttaacataaattgtgtgtgtaggtcagttattttttattttatttttgtgacagcaagggttagtttgtaactaattcccacgttgaattttattctactcgttaaaagtatgttaattatggcagaacatgcagttgatcatgatacctcttgaatttttactgttctccaaaaacaattttttactgttcacaaaatggtgatccatcaatttagctagtttccactataaatataatgaatggtttttctttagtatcaatttacgtatcaactagcaagcaaaaagatcccaaaatgcaaaagtaaaaacgataacttagagaacagatagcgttaggattttgaccttaggaaacaacatcgaaaactccagtgtacctttcttttgtcttttagatctcttgctttcttttctttttgtcagcttaactcttttgccctttcattagatctcttatcctttttatacccttttcttttacatgtgaattgttttataaaacaaatataacgttttatttttagattgtaaataatgacgactacttcatcatttataagccatggatatttacgatcttcaatatttacattattttctactatataatattttaatccgttacttaatgtcaatttgacacttcgactgaaaatctcttaattgataatatacattttttgttaatttttacattcatttgcagtaaattaattcttagctttcaattaaaatctatttccgttttgttcaagtatgatttacctcagcggcatttctgaatttaatcaaattatggaaagactctaacaaaaacttaccatatatgatcaattttttgtaaaaaaataaaaataataatgattttaaaggtgcagatttattttcaaaatttcatatccactatataaattttattgttgcatatcgatgaccacaactagcctaaatcgtaatcgaataatacatagctcaaattattgttaagttctttctttttgtctttataggatagtatagaagagaagcatgaggcgtgaacagaaattataagattaatagaaaatgtttaataattagaaccgaccacataaaatattaatacttgtctcccaacatatgaatattattattaaaacttgtaccaacgataacttttgaatagtttaatttctcagtcaatactcgccaaacatattgtagctttttctatctccatgatctccattcacattttcactctataaatacgcatctcactcgttgtctctctttatacttcaaccaactgctctctatctctgtgtttccctctctctatactgccgtccattaatggcggccaaagtcttcactcagaaccctatctattctcaatctctagttagagacaaaactcctcaacagaaacacaatcttgaccatttctctatatcccagcacacctctaaaagactcgttgtctcttcttctacaatgtcccctccgatttcatcttctccactctctcttccttcttcttcttcttctcaggccattcctccttctcgagcacctgcagtgactctaccgttgtctcgggtttggagagagatacaagggagcaataactgggaaaatctcattgaacctctaagccctattctccaacaagagatcactcgctacgggaacttactctccgcttcttacaaagggtttgatctaaaccctaactccaaacgttacttgagttgcaagtatggaaaaaagaacttgcttaaagaatccggaatccatgaccctgatggctaccaagtcaccaagtatatctacgccacaccagacatcaacctcaaccctatcaagaacgagcctaaccgtgcacgttggatcggttatgtagcggtttcttctgatgaatcggtgaaacgtttgggaaggagggatattttggtgacgtttcgtggcactgtcaccaaccatgagtggttagctaacctaaagagctctttgactccggctaggcttgatcctcataaccctcgtcctgatgtcaaggtcgaatccgggttcttaggtttatacacatccggtgagagcgagagcaaattcgggctagaaagctgccgtgagcagcttctctccgagatctcgaggcttatgaacaagcacaaaggcgaggaaataagcataacacttgcgggacatagtatggggagttctctagctcagcttctagcttacgacatagcggaactcggtatgaaccagagaagggacgaaaaacctgttccggtgaccgtgttttcgtttgctggtcctagagttggtaacttggggttcaaaaaacggtgtgaggagctaggagttaaagtcttgaggatcacgaatgtaaacgatccgatcaccaaacttccaggtttcttatttaatgagaatttcagatctttaggtggtgtttacgagcttccttggagctgttcttgctacactcacgtgggagtcgaactcaccctcgatttcttcgatgttcaaaacatttcttgtgtccatgacctcgagacttacatcactctagtaaaccgtccgagatgctcgaaattggcggttaatgaagacaattttggcggcgagtttttgaacagaacaagtgaactgatgttcagtaagggacgacgtcaagcgttgcattttacaaacgcagcgaccaatgcggcatatctactttgttctatatccaaccatatgttgtattataatatattttaggtctagattgatccaagctaaaattttggattcttttttaagataggacaaaataattattgccctatcttttacgtagcataagaaatgtacatatatagatgtatatgcaaaacctaatacaaaaaagtatattttccacatccaagataaattattgcgtctcatctatcacaatgtgaacaaaaataattattttcttctcttagttactatgagttcacaatataatacttttctttaggttaaagctctcaactgttgatgaagtacaagaactcaaaattgtgaatgaaaaaaagggacatcatccaatatcaggcgtgtacatattagcattgttgtgtatctttttatattatagtccattagtcctaatcgatagatgtatttttttttgttttattagttataaaaacagacatctattattaatttgttatggttaattggttattgtatattattatagtagaagtgacgtgaggtaccaacgtattagattataaatataaataatggccaaagacaaagccatttgtcaaaacttcaacgtcattataacctgtaagattaaaaatgaacaataagaaatcatatttagcaaaaaaaaaaaaaaaaaacaataagaatcatttgtcaaatcttcaacatcgttacagtgtataatttatattttgattttttgttctaaatgatcaaagttcatatataaagttatttatatgctcaaatttaatcatcgaatatatatacaatttgtctatgttatttgtcaaagacaacgtcagcaatagttccatatactctctttttctttcggagtctttatattactcacggagatattaaattatatttattttttcactgagatatttttttttttttggtttaatgttaataaactcactgagatattaattaatacatgcaatctttatctatatttcccatttttatttgtaaatgtgtcccttctcgtgttatgcgagggtctttttttaactttttaatttctcatttggaagctttcatctataaatatatgcactagcttattctatatataacataaaaccgaaaaaaggttttgttcacgatgtggattctctgttcacgagaggttttgttgaaaaagaaagaaagaaaataattcaacttgaatttggaagtttggttacagatcacatcattcgacaataaaaataaagacatatataacaattagaacagtaactaatttgaatttcagcttcgatttcttacgaatcacatggggtcaataagggtggggctagaaaaacacgtacgtttggagaccaatgtgtgtatcattcctgcatgcgcatcagatgtgtttcactcttcagaaaaacgtttattttattttgcatgtcacagtcgtagctaattatccgtacgcatcttaattacgactccattttacacaccaatttatggatatataattcagacaagatgagttctcgtttaattttacttctttccatttgtggaagttcatatactattgtgaaaatttgaaaataactggtgaaagaggaaacgtccatatttgtgggctctatttataataataacaacaatattaattgtttaggtaaaaattaacagaactattttgaattacaatcggaaaaaggtttgcgtcaaaaaagtattgatgaaccatgcatttgatataagcatttatgtttgttcaatttactattaagcaattaagtcgaattttatcgaatcattttaatttttacctttaacatttctgtgatcttgaaatctttaaattaacaatgtgagttatatacactagagaaaaataattgcattccactgaaaacctcaacatcttgggaaatttaaacttaatcaaagacatcgcaaatgttgcttatctttttatcaagcccagcccacatattcgcggccccaaagcccaaaggttaagctgactcgttacaaaataaataagtattaataaaggtttttgattggcttatttcggtttaaatttaataccatatctttcggaagatcacgtgagacacatgtgacatccaacgaatagccaatcgctgaaaagtgaagactttttgttaccccataaacaaaagcatcatctctctctcatcttttatttttcttttagaaaccaaacttttcagatttctctctctccatttggcgatagaagaagtcatgtaccaatcatcatcctccacgtcatcatcatcgcagagatcatcgcttcccggcggcggaggactgatccgttacggctcagctccgggatcgtttctaaactctgtggttgacgaagtcatcggaggaggctcatcaaacgctcgtgacttcaccggctatcaaccgtcgtcggataacttcatcggtaactttttcaccggagctgctgactcatcctcgctgagatccgattcgacgacttgtggagtcaacaactcatccgacggacagaaacagctaggcaataacaataataataatagtaataaagatatcttcctcgacagatcctacggtggattcaacgagatctcgcaacaacacaagagcaacgacatcggaggaggaaacagctcaggatcttactctctcgctagacaacgtagctctcccgccgatttcttcacctacctcgcctcagataaaaacagttagtcctttttttactcaagaatagtaactgtgatgagatatatatatttagacagacaagtttactcattttcagaccatttttccttagaatttgccaaaaatcgtaatgtagaatatgagctatatagttttcagtcattcaatcattcattgctcaactaaagatccgttttttggtgaaatgaaaatctaaccacgagggtattttcggtatttctcactgtgaagtatctagtttcttacaagttaattaacgactatgtatataaaataagttgacattgtgagctttgatatttagggtcgttgctaaattagcttggttggtacttgtgcaagacgtgatcctcgtattttcggaatgacgaaaataccatttgatccctaaccacgtgcttgaaaatacagcaaaaatgtggctcggttacccttaatttgggatattatttaaatcttcgaggattcctatatctcaagttgcatttatttatttagaggatggattttttcgttgatgaccaatagtttctctgctgagatggcgaaatatcattggttgtgatgaagattattcaaatagaaagcgatgtagatctagttggtggatctgatctgtccacttttatattattttttccttggtcctgatgattcgtgctttgcttcgttgttatctaatcataatatcttccaccaagcctggatgtgacttcccacacctaaccggtcaccggcctgaaccggaattcaactatccatattatccaaaaatccctctttatttacttacattatatggtttctaatattttggatgtgaatgtgaattatttttaaaaataattttcacgtaatgtcattataatatagtttactttgtaaatcagatttctcgttgaaccaaccaaccagtgattatagtccgcaaggagggtctaatgggggacgaggacattccagattgaagtctcagctaagcttcacgaatcacgactctctggctcggatcaacgaggtcaatgagaccccagtccacgacggttcaggccattcgttttctgcggctagctttggtgcagccactactgattcttgggatgacggttccggttcgatagggtttaccgtgactaggcccagtaaacgatccaaggacatggactctggtctcttttcgcaggtacaatttatttgtttccatgtgggattcctttttttttttcttcatgtgttattactataaacatgctactttagtcaaattatatgaaatttcaaaatttctagaaaaggacaaaaaaatgtaaaatatttgttttaggatagacataaaaaaaaaaattaactagtaaaggtaaatgcagcaaaactctttagtggccatacatttttgttggtggccaattcttaccgaatatttttatcactggttttgcagtatagtcttccttcagacacttcaatgaactacatggataacttcatgcagcttccagaagattctgtaccctgcaaaatccgggccaaacgcggctgcgccacccatcctagaagcatcgctgagcgggtcagttataaacactttttaatttatttagcgatggataattaattcactaaatttagcaacaaatttgatcgtccctaatcatgtagaccctattctttttgccatcctcctatcttaacctatacaatatgtttatattataggagaggagaacgagaataagtgggaagctaaagaagctacaagatcttgtccccaacatggataaggttactttatatcaaatatatatagtatatatggtaacatcattttgaaaaagtgttcattacctcacacacttgttgctgattttcttagcaaacaagctattcagacatgctggatttagctgtacaacacatcaaaggccttcagcatcaacttcaggttcccttatcttactttttctgtttaggtcagctgaatccatttccagagttctctctagttcatgatccatattgatacataaacacattttcatatacaaacgcagaatttgaaaaaagatcaagagaattgcacgtgtgggtgcagtgagaaaccaagctagctcaaacccaaaggtagggtcatcctaattttatttgcattgttccgattttatcatatgagagaattagagaagatgtaaataaaatagattatattaaatgtctaatcctcttataattaagctcctcattcgttatcattataagatagaacagtgacaattgtccattatgtttttgtttcaagtttatgttttgagtgtcgcctattttgtaaggattatgctatgaattctgaaactaattcgagttatgatcataagcaaagcaagctagcatccattatatatatgactttctaatttgatctctcttttctttatacttcttcataaatagttcctgaattgaatattgaaattaaaggtacgctaatttttcttatttttaaaattgaagaaatggaccaaataccaaagttacttgaaccaatgaaaacattaataagcagaattcacgtaccaaagaccaaagtgaatctcgttgatcatataatgaattatgatatatttagtagtagttagaaacatgcaaatagatataggttgatatgaaaattggcataaaatgtatgaaccggaatactattagtagcattaactttcctattattaacaaaactagcgtgtatgcacgttacagagaaagatttattctttattagagatgaaatttctttagttatacatacactttggttttgtaagttaaaaaaatataactccctcctacgttaccaagaagtccaccaacgtggtggattttaaaataactaaccaaaaacacaaatcagggaaaagtcgtaaattaaaactgataatttggaggaaaatatagaaaaagaaaaaggtaacgacattaaagaaggtgcacttaatgcgcagtatgtcctcttgtgccagcttgttgcaccgtcttccgtctcctcctctttccctctctctctctctccaaaccagtcctacttctctctctagaaacctagggaagaagaagaagacggtgaagcgagcgatgtcttcggacgacgaaggaagagaggagtatctcttcaagattgttgttatcggcgactctgccgtcggtaaatctaatcttctatctcgttacgcacgtaacgagttcagcgctaactccaaggcgacgatcggagtcgagtttcagacgcagagcatggagattgaaggtaaagaggtcaaggctcagatttgggacactgctggtcaggagcgtttccgtgccgtcacttccgcttattaccgtggcgctgtcggtgccctcgtcgtttacgacattacccgccgcaccactttcgaaagcgttggacgttggctcgatgagcttaagagtaagtctcgatgtgaattatgcgattgactatcgatttaggggatcctcatgatctaattaggtcgtacggattgacttagaattgggaaattttgaatctagttttggtagattatagaatttgtgacctagctagaacataacagaggattattcaagaaccgcttaggaaagtatctcataatgaacatctttagattggtctgagatctaaaattgattcatttgctcttttcttggttgtttcagtccattcggatacgacggtggcgagaatgctggtggggaacaagtgtgatctagaaaacataagagcagtgagcgtggaggaaggaaaggctctagccgaagaggaaggactcttctttgtggaaacatcggctcttgattcgactaatgttaaaacagctttcgagatggtgatacttgatatctacaataacgtgagccgtaagcaactcaactcagatacttataaagacgaactcaccgtgaatcgggtaagtcttgttaaggatgataactctgcctccaaacaaagctctggtttctcttgttgttcttccacttgatgatataccacaccaaaataatccttttttatttctcacaactgtaactttattatataaatttttgtttttttctttgactcatggaagaaaagaaattcatgaactgtaatttatttggtcacattaattttccttttataattttggcaaacattcaaaagatctattcattctacttgggttatttcctattttaaagaaactaaatttgattggttggttttgtgatttttgtcattatttgggaaaagcgagggaaaataaatccaaataggggaagaaaaaaagagatggcttttcaccgagttttctctgcttttgtaacaacgaacatgaaccaagaataatcttttctttccctttttttgtttgtcccacaattcttcaaattttcttctctctatctaattctcacggtggcgatgtctttacctccgtttacttgccgccttctcgcggcggcggcggctctctatctgataggtctgctgtgcgtcggagctgacacgaaagatgttaccgctcccaaaattcctggttgctccaatgaatttcaaatggtaacaggtttccccaattcgagttcctaatcattaattttatggaatttcactttttaatttcgtgcgaagatttggttaaaccggaatcgtttttgcctttgtctaacggaccctacgtatatatctcattgattgatttgaatcttcattggaattgcattcaaccacaaatgcagcttttgttaaatttcaataggtttaggttaaatccgttattgaaatcgattgatgatgaggatggggtagtttgttcattgattttgataaaaattgattgatatgatataaagcattgttccttttccccacaatatctatgtgatcaatattgaggtttctctgtttctgtttattaccagttgtctataaatagattcatgtacaacaaaacttctctacattatcagatcgctcatgcaactactgattattgaacattgtccaggtcaaagttgagaattgggtcaacggagaaaacggtgagacttttaccgccatgactgcacagtttggcaccatgctcccgtctgataaagacaaagctgttaaacttccggttgctcttaccactcctttggacagttgctccaatttaacttcaaaggtcttcctttttcttttccatcttatatcgtacagtcctagctaggactcaaataccactgttgtgaagatgagtttttttgttgttgtgatgttttccttttgcagctatcttggtctatagcgttatctgtacgtggcgagtgtgctttcacagttaaggctcaagttgcacaggcaggaggagctgcagctttggtgttaattaacgacaaagaaggttgagattttgtgtttaatacctcaactgtttttccatgttgatacatcttgttttgcggttctttgtttcgatgagcctctgacaactgtttctctatctttgctttttttaagagcttgatgagatggtttgtggtgagaaagatacctccttaaatgtttctatacctattttgatgattacaacgtcatctggagatgccctgaagaaatccattatgcaaaataagaaaggtaaggtctaagccttttatatctgtgacgcatatatgatccagagagcccaattttctattatggtctatctgtttcttttgttaccgttcttttgatgtctatattgtttcctctgagttttttttttttgatgcagtggagcttttattgtatgctccaaagagcccaattgtggattatgcagtggtcttcctctggctaatgtctgttggaacagtttttgttgcttctgtttggtcacatgttaccagtccgaagaagaatgatgagcagtacgatgaattatcacccaaggtttattatactctgcttttggggcttctactgaaaccttgtttttggaactgagttctactgaaaataaacttcactttaacatctgagcatacaagaaatcaaccaaatataattttcttacaactgacaagaagataaaataatctaattagctcgttctgtctctaatatatctgcctcttctattgatacacttgtctaagttatacactaattcttgttctttttatattttctgaaaattttggcagaaatcttcgaatgttgacgctaccaaaggtggtgctgaagaggaaactcttgatattagtgctatgggtgctgttatctttgtcatatcagcgtccacattcctcgttttgctcttcttcttcatgtcatcgtggtttatcttgatcctgaccatatttttcgtcattggtggtatgcaggtaatgttagctaatcttgagcatatccttagtttcatggttcaatagctagaactatgatcaatgtttggtaacaggttgatagtaaactttctttagcattgtttccttcccttgtaaaaatacataacatgatgaactctttatgtgaaatgaaacagaggcctgctaagctaagcattattatgtcaatatcacaattattaatttattttctatctcagggaatgcataatattaacgttacactcataacaaggtactctcagaaacccaattaagtttttgaaccgtgaaagagctctattccagctagttaaaagcatcatgtgatgttttctctttattcatgtttatatttctgcaggagatgcagtaaatgtggccagaagaatttaaaactacctctgcttgggaatacctcgattctctcactcgtggttctgttattctgctttgtggttgctatcctctggtttatgaatcgcaaaacttcgcacgcatgggccgggcaagatatttttgtaagtccattttagcctggtaattttacagttgtctaaagccaaattatccctatgcattttggttcttctttgatttttttccgtatgtctaaacacaacttctggcttgacgcactcaacatttactttcacttcttgctcaaatccaactcaaggttctgttttgttttcgacatttatcggttgacttctgtaggacttagcttaggatgcttttggttcaaaattgtccttagttggctttctaaggttgacgtgtcatgtgacagggtatttgcatgatgattaatgtcttgcaagtagctcggctacctaatatcagggtaaattttctgtatgtattttcctactaaaattcttttgtgatccctttgtatgtgttctaatgggtgtctcacacttaggttgctaccattcttctctgttgtgcatttttctatgacatcttttgggtattcatatcaccactaatcttcaagcaaagtgtaatgattgcggtgagttttcgttattttccttcatttaacaaattgtgtgtcttacaccttaatatttaattctgtttctgcaaggagaagaatatttagtgttgtttcttcaaaaatccatcaaatcatatgattcttataaacttaagcctcatcaaaccagagcatgtttaccattagtgtgttttacttttactccggagcatgatttgtgtcggataattgctcaaaaccccaaagattgagtttgagttcacttgttgtataaaatgtttgcacatagcgagaacgaagaaggtcgatgataggttaactaacctcaatcacgttctagttgattactatattcttctgtttgtgtaaatttatggcataggttgcacgtgggagcaaagacactggagaatctattcccatgcttttgagaattccacggctttctgatccatggggtggttacaacatgatcggttttggagacattcttttcccgggccttctcatatgctttattttcaggtaaccctcttatgcatgatgcattggctcaataacgattatggttcacgacaccaattgtgaacacatcatctgttacaaacgctgtccgtattcaatatgccccatctcaatatgttttttgaccgctttttaactcttttacgtctcagatttgacaaggaaaataacaagggggtctcgaatggatattttccgtggttgatgtttggctacggacttggcctcttcttaacatacttgggattgtatgttatgaatggacacggtcaacctgcattgctatatcttgtcccttgcacgctcggtatcttgttcatctcatgaaaaactctgaattttgatgattagtcccctatatatgcattccattgaaacccaaccaaatgcaagatttcttacatattgagcggcttgcaggaatcacggtcattctagggttggtgaggaaagaactcagagacttgtggaactacgggactcaacagccttcagctgcagacgtaaatccatctccagaagcataaattgcttcaacatacataactcaaaactctggagactgaagaacaagaagaagaaacatcaaaaaagaaacaatttttcttttgcacataaaaaattataagaaatatacacttttgtgcatacacatgtagtctcgagcccaccaaaacgtatataatgtaatgtatatgtatacatacacacaatcaacaacttctgattctgaaatgaacaagtttttgtatactgtacaaatacgaatttgaatttttttttcccctcaaaaaaatataaaaccagctttaataaggatttgaaaagtttccaagttcatatatagataaaccgaaagaatttggatcaaactataatttttaggaactggaactgacacttatcattaagacaacaagagacagattcgattaaaagagaatcttcaggcaaaacggcgtcgtgtcttgtttacacataaacagaggttattaaaaagtttgggaagagcagatctggaagaagaaagaagaagaagaactctctactggttaattttagccggcgggtaaacggatatttttggaggaagagcagctcttctctcaaaaccatccctctttctctaaaaccctaattctcgacatccttcaaaacctaacaatttcaatttcaattaacccaacaactttcttactctcttcctttgaatgatttcaatgtcgtgtgtcccaaaagaagaagaaggagaagatacccaaatcaaaaccgaactccacgaccacgctgctgataatcctgttcgttacgcctctcttgagagcgtttactccgtttcctcttcctcgtcttcattgtgttgcaagaccgccgctggttcccacaagaaggtcaatgccctcaagctcccaatgagcgatagttttgagttgcagcctcatcggcgaccggagattgttcacgtctattgtcgccgtaagaggaggaggcggcggcggagggagtctttccttgagttagcaatacttcagaatgagggagtggagagagatgatcggattgtgaaaattgaaagtgcggagcttgatgatgagaaggaggaggagaataagaagaagaagcagaagaaaaggaggattggtaatggcgagctcatgaaactgggcgtggattcgactactttaagcgtctctgctaccccgcctttacggggatgtcgaattaaagctgtgtgtagcggaaataaacaagatggatcttcccggagtaagaggaatactgtcaagaatcaggagaaggtagttacagcttctgctacagctaagaaatgggtcaggttaggattcaccaaccattaattctgctctgtgatcttagatataagttatttggttgaaatgtatatgccctgttgtgttgcacttgttagttatggcgttcacaatatagacgttttggtgataactggcacgctatttgttagttttctcttgtatgatggacgagttttggcatggcaggttgagttatgatggagtcgatcctaaacatttcattgggctgcaatgcaaggtaggctttgagctatagagttgttttctttagctatttcattctctgtttatgagatgggcttgttaactgttgattgttgtctaattgttaggttttttggccattggatgctgtttggtatcctggttctatcgtcggatataatgtagagacaaagcatcacattgtaagttatttctgtctagtgtatctgtcacatgtctttaattttggttttttggtgactgttagtaaaatttactacaggttaaatatggagatggagatggagaggaattagctcttcgtcgtgaaaagatcaagtttttaatttctcgtgacgacatggagttgctaaacatgaagtttggtactaatgatgtggtcgttgatggtcaagattatgatgaactggttatattggctgcttcttttgaggagtgccaagattttgagcctagagacatcatatgggccaaactaactggtgaatgctttaaaccgaaccgatttctgtattcttgtacacgtattttcttagcttttgttgaaaatatttaggcatataacctacctttatggtgtaagaaacatgatgctgttaggaagtatattagtcaccttctttctctttaatacctaattactggaatctgctgtagaatttcgtggtgcttagtaagcatctattgcctagccgaataattttctgaagaaaactaattatgcatcttgaaaaccatactgctgtgtgttaaactttttcggacaggtcatgctatgtggccagcaattatcgtggatgagtctgttattgtaaagcggaaaggtctaaacaacaagatctctggaggaagatcagtcctcgtacagttttttggcacccatgattttgctaggtgagcagatcttcttaaagtctgtagagatctagttatactaccgaactgttgaaattaatgttacaaatcataatttcgaagtggaattgactatatttcctttggtcatatagaatacaagtcaaacaagcggtctcatttctaaaagggcttctctcacggtcccccctgaagtgcaagcaacctcggtttgaagaggccatggaggaggcaaaaatgcaagtttctcttgcttttcactgacattctactttttttttatttcctaatatagtgaagttgttaacaaacagaccatttccttatcttaatctgaacaaaaacataattcctgtgttaaattgctgtaacttacctcatccaggtacctaaaagaatataagcttccaggaaggatggatcaacttcagaaagttgctgatactgattgttcggaaaggattaatagtggagaagaggacagctcaaactcgggtgatgattacacaaaagatggagaagtctggttgcggccaacagaacttggagattgcttgcatagaataggcgatctgcaaataattaatcttggtaatgtttgaaactaattagtatgttggatcatccttagttggaatggactctgctcattatggataggcgtatatcacttgtctttgtctgccaggaaggatcgtgacagactcagaatttttcaaggatagtaagcatacttggcctgaagggtatacagctacaagaaaattcatatcactaaaaggtaaattatttaccagtttttgtgctttctatattaatcaggcagttttgtctcatatatgcgcgatttcttgctttgactttaagcagatcctaatgcatctgccatgtacaagatggaagtgcttagagatgccgagtcaaagactcgccctgttttcagagtgacgaccaatagcggtgagcaggttaggtttctaggtggaaagcttgtgtggatagaaagtttgttatagccatgtgtaaaattgatacttgatttttggacagttcaaaggggacactccatctgcctgctggaataaaatatataataggataaaaaagattcagattgcttctgataatcctgatgttttgggtgaaggacttcatgaatctggtacagatatgtttggcttctccaacccagaagtcgataaacttattcaggtttgtcttcttgaatctgaaattatatgtggtggttttagttttgtctccttttactccttcattcactgaactctcaggagtttttggttaggttctccgttgtactaatttcgggaccctgaaaactttgcagtgctctacccttctgctttgaagttaaaacgcataattaggcatcttttatgtttggcgtggaagtttaatataatcaagctctaggcattaaatctttctccttatctctttgtcggagaaattctaactcttatagaaactaagaatgtgtcctggtctgcattttatatatgttgtgcctattataagtcttgacctgccatgcaggggctattacaatccagaccaccttccaaggtttctcagcgcaaatatagttcgggaaagtatcaagatcatcctactggttaccgacctgtacgggtggagtggaaagatcttgataagtgcaatgtctgccacatggatgaggttaacagtgcttctttcttgatagaacgttttgtatgcaaatctaatcttgtatctttaatatgttaattctgatttagattttcgtgtctgcaggaatatgagaacaatttgttcctgcaatgtgataaatgtagaatgatggtattactttctctgagttgttcatactatgatatatcctttaagatctatactctatagtggctggcatcctttcttttcctaggtgatgttcagttcaaatatttttttgatcctggactaggtccatactagatgctatggccagctggaaccccataatggcattctgtggttatgcaacttatgtcgtcctgtcgctcttgatattcctcctcgatgttgtctttgtcctgtagtaggtgattaacccaaccctttcggtatggactacggagtctctatattctttattaatagccaacaaaatatcttccagggggcgctatgaagccgacaactgatgggcgctgggctcatctggcttgtgccatatggatcccaggtataatcttcaccatttgatttgttactctgcatgtttctgctttctactaaggattttggacgctttacctttattatccaagttgtatgagcaatgattgtgatattatccagaaacatgcttattggatgtcaagaagatggaaccgatcgatggggttaagaaagtcagtaaggtttgagctctattctttttcagtttcccttacatcaattgtcttaaatggagttagttaccttttcaactagagaagcggagcatagtctaattttcagtagccatgtgatgcttgaatagttgtctttttttcttcacacttcaaaacaggatcgttggaaactattgtgcagcatctgtggtgtatcttatggagcttgtatccaagtaagaattattttgatggcaagaaaaagctgaatcattgtgtaccatttacacatgacaatatttgaaatcttacataaatattagtcactgataagtatttaactagaacaatgatgccgattttcagtgttcaaataatacttgtcgagtggcatatcatccgctatgtgcacgagctgctggtctctgtgttgaggtactttcatatcctacaggggatcataaggttctgcgtttattatatacgtttactgaaaacacagatttaacaaaagagctggttctaactatgatagcattcttgtaatgtcattgtagcttgcagatgaggataggctttttcttctatcaatggatgacgatgaagcagatcagtgcatccgcctgctttcattttgcaagaggcatcgacaaacgtcaaattaccacctagaaacagagtacatgatcaaacctgctcacaatattgccgagtatctcccacctcctaatccatctggctgtgctcgcactggtatgcagttgcattgatcaatacttgctacaaataaaagtgtagatttactgcacttatgtgggatggaattgttttgctcaaaattctcttacctcacatgtggcaatgtgtgtcttttgttcagctttaatgatgttacgttcttttatattttattctcagagatctaatctcatgtattctcacattgtgtttgcttgtattcatgttcacatctaaaattcataaaagatggcactgtataggtcagtttatagctttatcttgcaggattattaacgtattttccctcggtttctggtagagccatataattatcttggaagaagaggacgaaaggaacctgaagctcttgctggtgcttcttcaaagcgattatttgttgagaatcaaccgtatattgttggcggatactctcgacatgaattttcaacctacgaacgcatttatggatcaaagatgtcccaaataactactccgagcaatattctatctatggccgagaaatatacattcatgaaggaaacctacaggaagagattagcattcggtaagcgtttattcagaaatcgtaaaatatgctacaacttgtcaaagttgctgctatgatgcctcggtttttcatgcctttggggggtttttgaggatcaaaaatttctgtaagaagataaaattggtgggacttttttttctacttgaattcttgggatgtatggtgcattactgtgatgggtctctggatatagtgatcatttttacttatttaggattagacgggaaacgtttcccataaaacctaacatctctatcataactaataactaattttatctgaaccttttttgttttcctttaaatgatttactttcttctacagggaaatcgggaattcatggttttgggatctttgcaaagcttccgcacagagccggagatatggtaaggcattcttatattttactgtccattcttgcttagtataacgtcatgactgacaatgttgtgaattgggtgggtgcaggtgattgagtacactggtgaacttgttaggccaccaatagctgacaagagagagcatcttatatacaactcaatggtggtacgtatctgactttgtacattttatacttcttagaaaattctgaacaatattggacctaattatcagcacattgatctgtggcttttctcatctagaccgatatatcactttactttgatgtattttattgaatgatttctctggctcgagccctgaacattctcttagcattccctttaccactctgtgttgttagtatacacatcttcctaactttcactctcttatttttagaatctgatatttttggttatgagtactgagtagttagttatcaatttaccactcctttatgatatagggtgccgggacctatatgtttagaattgataatgagcgggtcatagacgcaacaaggacaggaagcattgctcaccttatcaatcattcatgtgaggtatggtcaagcagttttgacgatttgttatttaatttacttagtatctgcaatatcatcacattacttatggatatgcttctgtacagccaaattgctattcaagagtcatcagtgttaatggtgatgagcatattatcatatttgcaaagagagatgtcgcaaaatgggaggagctgacctatgattataggtttatcttcgtgccctttagttctcgggtgactttgaaattccattattacctgattctttatctataaatttgcaggttcttttcaattgatgagcgccttgcatgttactgtggtttcccaagatgccggggtgttgttaatgacacagaagccgaagaacgacaggcaaatattcatgcttctcgctgtgagttaaaagagtggacagagtcctgagaggtaagctatatttgttaatatgttaatttgggaagagtttgttctttgcagctactgaaagctagtttccaggttagtagatgtcttatctccattgaagaagatgacttctttaacctgtcttgatatcttcgctaacggcgttatttcatggtgaggaatgcattgcaaataggattcattagtcacaaaataaaacttttatctcaatgcaagttgtctaatttacttgcaaaatcctgctgtttaccattgaatggaagctcctaaccatctgtttcgacttgcatgtgcttacttgatcttcacatctgccatttctacagtctgcacgagatatttgtgaggacatcacacatttgcgaattctcatggttctggctaactttcccctctacagatgcagattaatctccctgaacacatactgttactctcaataccctgacttgagatcgttcattctattccaaggttttgtaacaatccatttcttgtacagatactaattatttcttactcagtaaagctttttgtaacaagaggcacattacaatctttgggtaaatgaaaaaagcagaattctcttatttctccagactcaaatgagccttaatctactgtttcacttattgatcaggttctttatacacgatggttccactaatatccatatcatcatgctaccaaacatttgatatcagaatgtgattagagatttaacagaggatgatgttgttgagtcagaaatatgaggtgcattgtttttttcagtctgacacaacatgtgaaggaagaagtccttaccactcctttaagtcctctgtagtctagctttattcccacctttttttggttatctgtgcatgtgaccattattggtcgtatcccttgacccattccctcacacgcacatacacaaacgcacgtgtatacatgtttttgtgtcactgtgtctgtgtatatattactcagctctggagtatgatgcttctgtagttcagtttacttgtgtccaaatgtcaaaacctctcaagttccttctttggtcatctcttgctctcttgcttcttcaaataggtaaattcaaagcttaaaaacttttcattgtaattttacatatagacatgtgattggggttgtatgtataggttctggggcaatatgtgagggcaaaagcagcgaaccggcggtgaggcagacgcaggtgaagtggagagaaggaaagaagttcagagtcgaggtaatgaacaaatgtcccatgtgtccaatcatcaaccttcgtctgaaatgtcaaggatttcctcagtcgcttgtggaccccacattcctccgtgttctctcctcttccgccggaaactgtgtggttaacgatggcttgccactgagtccaatgcagactctctccttcaactactccaacacacaccagtttgctctgcgacctctttcttggtcttttcagtgcgagtaaatcaataaattagttaaatcaataaaatggtcatcatcaatctgctgggtttcttcgtattatctatatatcagacctttttctttaccattttagcaaaatgttgaatctatgtacaaaagataaactataaggagtctctaaaggaggaaaagagtcatgaggagaagtaaagaaaatagaagacacatagaggtatccaaaggtaatgcagaagagataaaatgtgagcctactagatgaactgttcctgtgccttcgtcttttacttttatgcttgatgagcctgcaaagacagataaaacaaagataaaatagttttaaattcgaaatctttcccactcacaatgagacatgaatcgtttgagtgtatgaatatagcacttacagttgtattcagtccacccaatgagctgattttcgagatcgtagagaacaagcttgtttgaaagcaccaaatctgcaaaagagaatgtaagatattgtgggcattggattaaatcacacggggttcattgtcactgacagcaagagaacacaatgggctttttccacaaactgaattgcatgcaattaaactttgtcactaagtcatgcttttgtataatgtgactgcaaactatgtatccaatttaaggtacctcccaaaagtgtcatgtttctcctatctctggattgcattgcgctattttgccaaccaatgcaccacattccttcctgtgaaattttggggttatgagtttggtatgcaatggatagaaagattgagggtaaaatcaggttgcaacaagaatattacaagagccaaaaatcaaccataaaggctgaagatgcttacatgagggaacagatagtcatgaggataaaccctgaggaaaaccgagttctcgaaatggaaagtgacattcggaaacccctcatcaactctgcagcaaaggtaagatgtggttttcacaagaaaactattgtgtgatacgttgacatcacaatgagcagttgcgtacatgcaaaccatccacaatgatgtccaacggtattcttggcagatgcctatttgaaaattttgtagtgtaaatcattaaatgaagacgtataactaacctgccagagtactgaaagcatttataatctttatccactatgtgaacttttagagcaggctcctgcgaggttatctaataaaagaaccagatttatgagaccctgcagttcaatttcttaaaggaactggatattttcttgaactgtaccttcttcaccaatggttcatagattatctctggaagataggccaaggttgtaccactgtcaattatcgctccttttctatctccaggttgaaataaatcggctgggatagttagaaactcctgaccaacttgaactgctgtcatattgacattgtaatgtggtctgcaattgaaaacaaaaaaagtcggttaacaaaaaagagctagagaaagaacacattcaccatttcagacgaagctttcatgtaaagtacactaatgttattttctttctctaaataagaactgcaagaagtttcactctactatttgtaacatagtggctgcctctaccagtatatcattgagcttcttatgattgtatttgaagtataaaaggaaaaacattataaaaggaaaacaatgttgacgtactgattgggtaccaatggtgtcatgtttacttttggttgcacaacacgtccaatagcaaatataccacctccatttcttccatctaagcaatgagcaaatatctttttcactctccctgatgaggccagctgggaaatcatggaagaattagctttcccaaatccaagtattccgtcaagtgcttcttcattagaagagtctagatctcctgactgcctagcaccacaccttcaagatcatataaaaacattaaaaaaatggaagaggcaatgaggaatgacggattaagcttccttgccgtaggactgataaaacgctaatggacaactattctactttgtttacagatctctgagggattttctacgtgaccagcaattctcaggccaggatacaaaactaaaatataaatattgtataaatatgatatttctaaattactaagtttttcaacgtgtagaagcatatgaaattagatgaaatgagctgtgctcgggaagataccttagcaaactaatcaactgtcacaatcaaaagcacaacatattcagtaaaggtctatttgtgatattcactatatggtggagaacctattcccatgttactttcaaaataaaaaagaatagataccagtatgcacttcaacgaatctcaagatttttttctttaagcaattaagttttatctgtttggcttttgtatgcactttgaaaactgttggtcaattaagctttgtaacagcgttttccatttcttattttttctgttcacttaacaaaataaaaccttgaccacaaggaaggtgaaattgtgttcttttcagtgagaagtgagaacacaaagaagatctaagaaagccgcaagaaccatgttgcagcagtttactagtttaaagataagtcatgtaaagcgaggttattaaaaggaaacatacccaaaaatgacactgccattagctgtttgagtcttgagatcaccagctacactgtcatactgcacaacatctttgacaaaataaccagcagtagagctaccatctccatatatctcaagataaggacaagacatattagctttgcagccagagagaggaccaccactaatctggtagcaaaaatcatcatcacaagagaccaactttccactgtctgattcgtcaatgttgtagagtgtaagctcaatctgcatagagaaacaaaacctcacccattgagttggagcaacgaaaggcaaacgtaaatgagacacaaaacaaaaagcttacaccgagagtgcttcgtcttggacattgtttgcactggatgcagttaacccacataatatcactccctgtgtcgacttgaacataatagctcttagcaggtgttccaattccaatttttgcataataaagcctgagataaacaatgaaacagagagatcactgcaagttaactcaaaaatctcagctttttagagattccataaattcctctcaaaaggctcgaaatcagcagtgatcagagacgctaaagaaacaataacaactctttagaggaatctgaaactgacccggggatatcagggcgaccagttccaccaaggggtagatcgattccagcgagaattgtgagctgacgccggtcatcgtgctcctttaaggcggtcaaggacccttgaagccttggataacggtactttacattgaacactccgggattacaagagacggaaacaagagcagtgagaaaccaaatcagcgtgaatcttccgcagatggggaaagatacgattgataaagtcatcttctttcttcttcccacgtgcctgatgtttacagcgtcagtcgtctcggcggagaagttgaaagaaaccaccggaccggcggcgacgacgacgacgacgaggaagttcagaaattacagagtttgtttggtcacttcttccaccaattcccgtattttattattttttatttccagcgtggacttttctttttctttcgacccattaattcgatatttttatggtttcattcaggtaaatttattacatgtaaacttaggtgttactgacgctgttacaactcatattttactgttcagttatattatcctttttgtcgtttcaactttcaattgtaacaaaattataaatcataggaatttgtttccttaatttaagtattaggttatgagtttaagactaaaaaccatgtgaacaaatttataacaaacgaatagaaacaaatatcattcgcaaaccacatttatgtttccttgctctttctctattttacacacattcttccaatacaataattaaatatggttttacatacagaaaaatataaaatgtaatgttgtttgcattataagttctagagggacaaaaacacacttcttctttttttaccacaagcaatttcacttattacgtaacattaagcaagagagacttgagagcaacggcgatatatcataagacttacgaagaggaagaggaaggtacagttgaagggttgaaaggtttctgttctgcgcagctgagctcatcgtttggtcccgcgtcttctcttccaatacccatgaggtcaaggaagtataagtagtgtgagattatgttgttcattggatcaatggaaccttgaccacatgtgtactctccgtagaggacgttcatggtgctgccaaaagtcgggccacgcttggacaaagtgtcgttctttgtaggtttccagtttccgacaaagatgtcgtgagctgagggctgagctctcttgattggagtcatccatctccagattgcagcttggaatgcaagtgtcgcgttttgctcaatgtactcagggtggttcaagagatcagctttcagggcttccccagctgctccgtagttgaagttccttcaaataacacacaggtaaaaataccttcagtatggacgaatgcaaattgtttgacacagtttttatctagagcttcaaagtagaagagaaatgtgtaccagtaaatgggtaaggcaccgcgtccgtagtattcagctccagggctgcaggggtacttgaatttccaggactcgtcacagtaggattgcattgggctcatttccctgttgtagcacagaccccaagctaaaggccctcctgttgcaactccatagccacctataagacatcacagtaacactcatatgcagcttcttacaacatagaaaccaccaactgcaacttagggcatatccattttcatgattctgaatgtcgagtttgatcagattaatataatggtatagctatggaggtaagcttaaagcatccttttttctattcatagttagatggtcaactatgtagaaagaggactaaaatgaaggaaaacttacaggacgttttgctggctacatgaccgagaaaggcagccatttctttctgtcccatgagctttcctccagtggtaccaaaaccaagaggctcaaagagggcagcagcagtaatgaaagactggtagtcccagaaaccaacagcatgagcaatgggagtgttccttttggaaaagagttgctcaaactgataaacctgaaagtaatctgatatcgtctggttacagcagtatttagaccaccagctgcattcccatccttgcgtgcacaccttatttcccctcactttcttcactttaatcgttttgtcctctccattggcaaccaaggccagaaatgatacagccagcagaaccaaaatcacgattgaaccactcctgattgtcaccatagcttacaactatggaacaaataccagctacaagctgcaaacatcaacaaaaaaacaaatttagaaacatccattaatcccaagtaagcatctgaacattactataaagaaaacagaacacaaattactaacaatacagatctaccttatacaataggcacttaatgccaaaaagctgattagaaacaacaaaggaagaattaaaccaaaaacatggaactctctaagttcttaagtgaaaaaactaagaaaaattgttagattgaccaatattataccaacttggagagattgatgtataagatatgcgaagacttcaaatgtgagatcacgaattcaataaccaagcaacgaaacaaaattctctagtcaagatttagctaaatcgttaccaaaattaggcataagtacttgtggaaaaaatgcttacccgcaatgcagatcagctatagatccagagagagatcgagaaaactagcttgtgaattcaaccgacaaaaattaccctttttgcttcgttgccgagaaaataaggaagagattcttgggaaagagaggaggaagaagaaacactaaactaaagcgggtgacggatcagcagtctctatcaaccgttggattagagaacaatcaacggtgaagattgcgtttggtgtaatgtatgtgtcggttagacaagacagcctggttcgtgttgtgggccctactttactgaagtggagccttccaccgacagccgcacaccagcagaacctgatttaaaccaatcggtctacttcgatttttttcatgggttttcggttcatgttatggcccattgggcttttaagtaaggcctttctataaatgtcaattttgccagagtttcctgtctcgtccttgtctttcctctagccactcttcgccactctctttctctctcccttgttttccaacagtaacaatggcgtcagcttccaagcaaaacccttcttcttccaaacctcctaggcatccatctccgatcattgcttcaaccccctcgaaatccggtgtattggaggaatcccaatttcgaaaccctaataacccgtcgacgtcatcgaattcaccgatttcgatggcggtggaggatcagatcctgggaaattccaatcacctcactcgcccggagcttctccgacgcagatcgcacaacctgaagcagctctctagatgctacagagaccattactgggctctaatggaggatctcaaggcacaacatagatattatagctggaactatggtgttagtcctttcaaagatgagaattatcaccaaaacaagagacgtaaggttgaaggacaaactggggatgaaattgaaggtagcggagataatgataataacaacaacgatggcgttaaggctggtaattgtgttgcttgtggtagtggatgcaaatctaaggccatggcactcaccaattactgtcagcttcatatcctcatggataaaaagcagaagctttatacgtcttgtacttacgtcaataaaaggttcgttcacaatttcgagtttcatagttttttccttttgattcgcatcatattctctcgcattaggaaataataggtgcttcaataaatgctaatctgtttttatgattctgtgaaatttcagttccttgatactggttttggttttgtttcgtggtgaggaattgaaagtactttgcattgtttgtatcgtaatgggcgaagatgataggagttaggattgtctgcatgattatatcattatgaagttcttactgtgatggtggtctagctattatggtaaattggtgataaaaatggagcagatgtgagatgtctgtgtcatctgtgctttgatatccctgattggaaagaacttaaatttttgcattgcggagtgcaatgagcatgtgataattatataatcagctttattctaactctatgtggtcacattgttcatgcagagctcagtcgaaagcaataacttgtccaaaaccaactcttgcatcgactgttcctgccctctgtaatgtgcacttccagaaagcccaaaaggatgttgctcgagctttgaaggatgctggtcataatgtttcttcagcaagcaggcctcccccgaaactccatgacatagtagctgcatttgtgcatcatattcaagcaaaaagaaaagatccacgaaaagagggcaaattgaaaagcttagtaaaagaagaacttacaagctaaatcaaacagagtgagcagaagctgtttgtttccacaattgtgcaaaaatggaaggtaagatgactggctttctatcatcactagtgagaaagacaggtacaggatcgtgtttgactggtgatagatagggtagtcatctacacagaatgtagtagatcgtgttcacacagaatgtgttggtaggaatttttttttgttgttgttaagcttagcaaagcaaagatgcttttagcatgactagcttctaggatgtgtctcatggttttcgttttatttttcgtgattggagctaacagttatttatttccattaagctgagtagacatggatttcaacaaacaacatactgtgtgatcgttcgtaattatctattgttgtcttgttgaatgtggattagctagacttgaacccaatacctttgtttaagcattgaagcaagccacgtttataatatataggtttgtaatctctattcaagcagttaatctacctgcataccatttgaccgaccctgcttctgcaatgaattgacagatttagctgtgagtgcctttacaaggttacaacttacaaggagcttcaatcaagcgaggagcaacattgacacaatggtttaattaagctgtttagcttgaaatgaggatatatttggaatgtattctctaggttctttagtagatttccgaagtcctaacagtttacttctaattcctgtggcaaacttgattcaggcaaacttaattcaggcaaacttaattcctgtggcaaacttctaattcctaacagtttatttggaatgtattctctaggttctttagtaggttctttagcaatttcacacttaatgttttagcaactggtagctttcatggttgtgtgaaaaaccgatgtttttttgtggttcctgctgagacctttgtctactccttaatctaaatatttatgcttttgcagtgttctctgaatttaagacttgatttattgcaaactgattcatatgtttccgatttttgtgagcaatgcgtactcggaaagggcttggaattgcgcgagtatataaaaaatcatacattttagagcaacaactcttaaatgtcacgagtttgatgttcagaatttcattgattaggttctctcaagacttattgttgagtggagtcgttaacatgtattacagaacagtcaccagaaactgtttaagcttatatttacactcactcttaaattccagaaaataactcatcttcagtcgccatatagagcatctaggactgtaatcagccatcatcttttagttgatgaagaacgaaaaagatggaaacacataatatttggcgtctatcatctttctcttcgtcccactcgattcttcatgaaatgattaaggagcatcaccaaattaggttatctagccacaaggtttgtagattcaacacacactcacaaaaatggaatgagttaaagactgtcagaggacagtagtaatgtcagtaccttcataaagagggttgtagatttagttaccaagttaagattagttacctcagcaagtggaggtccataaccagttagtgatagctctcataaacacaaagtctctcagcactgcacaaggacaacaatctccagctttcatatctcacatgtaataagctttacacagtagcttaacacataatccgttcacagaatggtataattgcatcacactccgttaatacttaatagacacagttagattagttacctcagcggaatcatgaccagttaagtgaagtgaatgctctcactactgcataaggagaagaatcgagctattaagatgtcagatgttaaagctgtagatgctgagaccagcagggaaatgagaaagaatttgatggttttattcaagtgatatcttttatttccgttcataaaatcattagactagatactactaactactagtacacatacatggaattaagtgagaaccattgttgatattcagttcaattttagaccttccaatgccactttctgaaatctcctcctccgctaccaatgcttgagatattgctcattcgctagtattcctggttcagacgtgacaatgattcattcagctgcacaattggacagtacaggcaacggcttgtgcccagtatttgagcctagctttcacatcatccggattatcacctgtaaccaacaacaaaattgaaaacattcagacttcatatcccaattttccaattattgccatctcaattctcaaagtcagatttgtggcctctgtaacgaaaacggtatattccacattcttgtttaacactaaagcaacaaactttgaactaggattgaacttagattaccgaatcaatcgatggaaagatgagatatttaccgggactagagatcttccaattggcaatcggagtggcggtgaccagtggaggcgacggacaatcttccaccgacgaagtttccggtgatttattttgcttatcgtctaagaacttctggctcattgaatagcaaagctccaaagcaggtaaagtgttgcagagctcagggatctcgtcgtagctaaaaccaaaccctagatctaaacaacctctaagatcttcgaggtcgtcatccgtcaaactcttggatctcgtcagatcgtccttttgatcatccaccgaggaagaagaagcagtctcaacgtaaccttccagtaacacttggctcttcttcctctctagcttcttccgactaccttcgccggcgacaaatgatctgcggctggagatctcaacccaggcttcgttgattccggattcatcgacggattcaaaggcattggcagatgtttgccatggatctgatgatttgcagcgaacacaacccatgacactcactctcctctagctctctgtgtgtttctctctgtttttcttattatatgaactttgtgttgtgtcgggagaaatacataagagtcgatttgtttacttataaaagccgcgatgtatgatgatgatgatgtgatgggttggcatcttctcgcgtgactaatgtcgttttaaaattagtgagccccgacaattagggtataattgtcaaaaagtaaatatgtatcttgaaattaagtagatgactaaaattggtaatgtgatccatcaaaggcaccaaatactaatcttttaacaaaacttaattttaaactcaaattttattttaaagttttatttaatagtagaagttaacatgttagggaaaaaatcagaaacaattaaatgaacagtacaattgttcagagaaaattatgttatagtcatctatagtcacaggggactgcatgtatatgatgatatgatgttataacagatataatcatagaactgtcataaactgtagatgataattaacctttatgaatgtgaaacactgtcattgtaacgacttggatgtgacaaagatatacacagttggtcttgcagctggggacacgtggtggataaggagtggagagatgggagatacgaatgaatatgggccaacaaaaagccacgttgtcgctcaataatttaagtgggaggagaagattacaaagtcaccatcattattcttcttcacctcacaattattcatctacattatatatggtcaccatgaggtccatgacccattggaaatacatatgaccacatttttatacattatttcccttttccatgcatatttataaatgaaatgttcttagaagaataatattgcttattttctttgttatatatgttgggttttttaccaaagattgccatgcaaggcatatatatttatttgtttattctggataaactaacaacactaatatttcgtatgcttgaaatcagacacataatcaacttttaggtatttattcatggtattattcatatgtacaaaatcaacgtagatcgagaagatcagaaaatcaatagtgatgatgagatcaacaaatgcaagggtggcatattcgaatcattttatttggaaatgaccacattattaaagatgttcgtatttcttatcggtgcttactagtagtatcaccattattcagtttacaagtcaccatatataattattaattaacaaaaagagaccccttttatgttttcttataaaaagcgtataattgattttgcacaatttgcactcgtacgtggtgtgaggctgggaggcgcgagccatcacggagatcgcactggtaggatccacatgatctaacgctttaggcttttttttcttcatttagccccttaaaggtttacttacacacgtcacttttgatacaccaaacaaagataaaacaattcataaagacacaacacagtatacaactaaataaatactaacattattatgtttatgtgaaagaatggagtacttgtgttgttatttcgaagaatcaacatggtgagacgagtccgataatctaatgtgttttacccatttgttttaatgatctctagttgtagattccgtgagtcatagtggacgatcggttcaattttacacggactcagcttgagagttgagatgctggagttgacgttaacttatctattattatattgtcataaaaattacattttggtttacttgagatgagatgtagtttccttgatttttccttttcttgcatctctattcatattctctctgtgagactctttcttacaaggaagctaacggagaccatataatattcccaattgcatgcatgattaaaaaataagtatgactttttcaatattttatttaattctatatggttttcttagatgatatttttagactgaaatccaggttagtcttttatcaatgtgaagcggtgataatttcacttgtgatctctagtacagtagaactaattgatatgatcagtgtcatgactataataacattaaactgtatttactagattgaaggctttaagcatagagtctatatagtattaattagcaaatgtgataaggaacaaaacaatcatttaaataaagtaaacagttggacatttaattttaccatagatagatcgcctgtcaaccattttattgtttaaaaacgattcccaattgtctttggtaaactcttgtttaaggggaagtagaacaagtgtttgaacttattgaaaagacatcggaagatggaaggtaaaagctgagaaacttaaagattgcttgtcacaaaagtaagagaattgtacacccttgtcaacgacttggtcttcttcaattgaattctataaaaggagaaaacgtcctctcttctcacattgtatttttgtatggataataattctgtaatcggatcggaggtggatgcggaggcggatgagtcgtatgtcaacgcagctttagaagatggtcagaccggaaaaaaatctgtccagcggaattatgcaactgttctgacagaggaagatattcgagcgcttatggaaattgacgttcaaagtgtttcagattttacttccctctccaaagctgaagccacacttctgctttctcacttaagatggtaaatgtttttttttcttttcttaagatttgaatttcttcttctacaagcaaccccttttcttgatctctctgtttcttatattttatgtacttaggaatgttgattgtatatgtaaacaatggtctgctggtgctcaaagtgttagagacagcgtcggcttattggagcttgatccaccttctgatgacaacgaagtaattaacaacaatctttcaatccaaatgtttctgttaattctactttctttctttttccaactctaagttaatacaagatcccttaatgttcggatagtatttttgcggagcctgtggcgaatcacacccacataagaacttggcatcggtctcttgtggtcatcgtatatgcactcgctgctggacaagtatgcattaatatctcgtttgaataaaatggtttttctgatcactccttcttatttagataaatgacatgtaatgtataggccatatcaacaaaatcatcagtgaaaagccagctgctgaatggaatctttggctgaaatgtcctgttcgtgttggtctccacgcttcttgtccagcttctgttggtctagatacgattgagagatttgcttccaagagagagaagttcaattacaatcaatatctccttagatcttacgttgacaacagagaaacagtaatgacaaggaattaaagaaaacaacgttagatagatcatagagatcactttgaaccatttgttgcctaaaaggttttatttagctttttctttttttgacattcattagatgaaatggcatcctatccaggggtctagatgcgccattgatcttagtccaggttctggaaatgccagtgtctcctgtcaccgtttggttagattctgttggaatgtgagttttttttagcttgaatccttttgttttgaaaccattttctattactatatattgaatcttagcttcagtgcagagaagacgctcacagtcctgtggactgtaaaactgctgcaaaatggttagcaatacacgtttctgatatccaaaacccggaacgtcggtatatttcccatttatgaaatgattcagtctttttggattatgattttaggctactagaaaatgcggtgccttgtcccaagtgtaagctaaggatcccacgaaatcaagataattcactgaagatgaaatgcttaccttgtaactatgttttctgttggtaatatacttgttcttctagctactattagctcttatgatcttgtggttaattagtatgatcttactagtatgctctttcatgaaatgtcctctgcaggttctgccatgtcgactggattgaagacatggaaggaactggtggtgatttacacttttgtaccttcgatgctgtcttggtactttatcagctgatgatatttattgaaaagtttcttttttattgatctttcatgtaccttaattttctgatgtttttgtagagtgatcaacgtgggaaaatgtcagaatctgattcaaatagatacgaagattgttatgaaaattgggacagtaatgaattggtatatatgcatttatttatgaacttcaaatccattatttacctatgaaaaatgcattgatttcttttgagtttgtttttgggcagttgatgcaaaaggaacaagcaaacctgccaaaactagatactattgtaagataaatctatattgtcttttgtttcaatctctgtagattaaagttgaatcatcttttttttaataatctattttccagattcaggaactaagtaacacacagttagaaaacgtatcgcagcttaagttcatcctagaagctggacttcaggttagcaaaagtcaaactagtgtgagaaatatcttatgttttgagttttggtttccgacataacttaggtgatgactgatgcatatatacatgatacagatcatagaatgtagaagggtcctggaatggacttatgtttatggatattaccttagagaggatgaggtcgggaagcaaaatttattgaaggatacgcaaggtatgtaacttttgtatatgtatatgcataaaacacagagaggttaattttaaggtaacatatttttgttaatcagagaggttgaagaagtttgtggaaaatctcaaacactgtttggagactaatctgcagccgtttcgttacgaggaggaaccgtcaaaggatttcaatgccttccgcatcaagttaaccgaactaactaggtttgatattccattgtttcttgtaattttaacaagatccaacaattaaaccctaaaaccaatcaacttttttatttatttatttctttctttcataatagcctaacgcggaaccactatgagaatgtggtaaaagatgtagagaatggcttagctagtgttgtctctgagggggaagcaagtggttcaggccgtaatcaataatcatgatgattaaatcgagtctaattgttgagttccaatttactaccgataaattggtttaattgcaaattgcagtttaggctggaatattggatatatattaattttataaaaaaaaacgagaatgttctctttttttaatgtttgaaattactgttgtaaaaatgtttgaattgactaattataaaagaaaatattgggtgtgagttatgtactctgttttctaggtttcaaacattaatatattatacataatataagaaaagtagatcatttttataatcttgctaggtttgagccaaaaacgttgtaattcatgcataattaatatatatcaatggtacacattcgttgcatttagattgattcttgttccctatattatatgttactcgaaattgtgaatttgataagaattttgtgttgctcgtttgtttgtgtgattcatctacttagaagtctattgaagctgatggtgccaatatgacatcggtccggaattgcaaaccctattaaatactcaactcgaggaagtcttcatttttttgagatgtttaatttggggtttaccattctttcaacattttgacaaatcaaatccgtcacatctaaaactatctcattaactagaagataaaacaccaaaatgcaacacgtaactcttttaatcatttaaaaacaatatactatagttgaattctacatgaaatcattttcagttcaattttggcttcatggtgcttaaacattgattttcctagatttactttacgttgaagaactaattatttttgtttttaatatcacgtgggtgacttctcaaagaaaatgtcaaaaatctttgtaagaaataaacaaaatttctttttttaagaaaaatatcatagactttacttttatagaatttccattgttcttaaaatcgattactttgttctttttttgggtccaaactttaaattgattacactaatagtattaaacttttttttgttggttactaaaaatcaattgaaaccgatagtggcaaaagtccatatatctttctctcatctactcgatttctgaatcgcgaacgcagcgagcgatccggaatcgagagagagagctaccaatttttccaacttgttcggttccttataaagctgtttactttcccttgcgaattctctctctctctactataaagcaatacccttttctttcttttttggtaacccccaaaccctactttgtccagcgagaaaggaagaggggtttcgtctgattccgctaaatctctagtctttatctaaagatcatggattccgatgatgatatgcacgatatggactcggtagattatgattattacagcggcggcacctatgatgacaacgatagtgatgaaactgatttcgggtttggtgaggctgacaccgacgatgccgccatcatcgcctcctatcgctctaaggtggcttcgattttagtgtcttgttttgggctgcttttgcagagatggcgaatgttggaagctgttttttgtttgtttgtttggtttggttaatatggcctctttgttcattactctatctggttgttaaagtttgcaactttttgccgttttgagcttactttcttagtctttggtaggttagtttttccattctgttccggctttaatggggtatgctgctgagctttaagaagtttttttttttttggtttaagacttttgctttattcatgcaatgtctagcctcaatagttctctccctgtttattggttttagttcatatctgctcttattttactttgaccatattgactcagtgttgttgtaatgatgtatgcttctagagtaattatgttgttctcaaggaagaagatattcgcaggcatcagaacgatgatgttgggcgagtttccgcggtcctctccataaccgatgtcgaagcaagtactttgcttcttcactatcactggtaaaatcccttttacatttactgtgtgattttgttataaatctttctgtttcctttgttttcgatgatatatccacgacattgtttatcctctagttgtttcaaaacgacttttctcttccatgggattgttttgatctgctacatttaatggactctatattgatgtccaaactagtgtctttctctagtttcctaatgctcctgagaaatgtttctttttttaggagtgtcagtaaagttaatgatgaatggtttgcggatgaggagagagttcgcagaactgttggcatattagagggacctgttgttacaacacctgatggcagagaagtaattcctttaattctcgactcggaattgttttctataattctcgcttggtaaatcatgtttcactgacgcatgatttgatgtttagtttacatgtggaatatgctttgattcctacactcttgaggaaattgtatcggtttcttgtggtcatcctttctgcgctacatgttggacaggtatgttttttccctccattatcgttagatgcttacatctgtagcttcttcagaaacagcgattgttgatttattactttccttggatttatctgagtgtttatttagttagcatttcggtttacacattttaaaagatatttgcctatgaatttaattgttaagctttagtttccttcatgtctggaatgcgtagatctaagttttatatactgtttttcctactaaaacatctcttttctgatacctttcgttttatactgtgcacttttgtaggttatataagcacaaccatcaatgatggcccaggctgtttgatgctaaaatgtcccgacccttcttgtcctgctgctattggtcgagatatgatcgataagttggcttctaaggaagacaaggagaagtattatagatattttcttagatcttatgtcgaagtcaacagagaggtaagcttccaagataatatatattcagactgcatatcttcatgcaagaagcataaactacttgatgctcttgcgagttctttcgatccgtctatatagtttaaactttaaaattcagtttatccgcgtgtcctccctatgatgctttaattgactccaatttccaggaagcttttacttctctatactggctattacaatttttagcatatactagtattggtcgaagattttctctgtctccagatttacctaatttttcctcttcttaatcttgtatggaatggcgtccagcttttcttcttgaattacatcacaataatcccaacgtatttcaatgcatttgctttgagcaaagtactactttgtcatcagtttttgtgtctttgtgtgtctagtttgaaatattgctcgtatttgttttttctgtttcagatgaagtggtgtcctgccccaggatgtgaacatgcaattgattttgctggtgggaccgaaagttatgatgtttcgtgcttgtgttcgcatagcttttgctggaatgtaagttcttcaaatcagagaccattaatctacttttttttttttttttttttttttttttgtgtttgaaccacaattgttttgactatttggtcattttggaactgtgataaatttgaaattccagtgcactgaagaggctcaccgtcctgtggattgtgacacagttggaaaatggatactaaagaacagcgctgaatctgaaaatatgaattggtatatgctccttttattcgtattcatgctccctaatcttctggttaagtggttattactaccatatatcacactgaacaaatatatttaattacttctgtaacttagtcatttttcatgcattttccattttattatattacttgctaatcttatttttcctcctcatacccaggatacttgccaattcaaagccttgtccaaagtgtaagcggccaattgaaaagaatcatggctgtatgcacatgacatgcacaccaccttgtaaatttgagttttgttggtaatgctttctccacatctctggaagtatcttagtttggttgttactctttccctgcaatgctgggttgcaattactgtctgatatcttaggatttaatcttgtgatagaaatgcaagatgtgctcatgaacgtatcttcgtttgaatctttaggctttgccttaacgcatggacagaacacggggaaagaactggtggattttatgcctgcaaccggtatgaggcggctaagcaagaagggttggtaagacctcttgtacttatttgatcatttgtggtgaaattttctgcaatcacttgagctaatggtattgtttgattgatatcaattaaatttctcctgttttagtatgatgaggctgaaaggaggcgagagatggcaaaaaattcgctagagagatacactcattactatgaacgctgggcaagcaatcaagtggtatggacaatttatatttgatttcttatgctttttgtgattttccatcatatatatttactttttaaagtgatttggcagtcgaggcaaaaagctatgggggatctgcagaaaatgcaatcagagaaggtaagagttattaatcttatttttgaattttatttccttcatcttttatctaccaaatgatagttaattcttcttttggagtggagaatgatgtgagctagcagctattcccattgcttgtatttgcaacaccaaattggatccagactaagtagatgcattgttgttactttgtgtattttgatttgaatttctggtgcttatacatgtgtgcaattatattgaattttgaacgttaagtttttggaagtttctcacatgctgatgtctcacttttcccatttttctgctagcttgggaagcttagtgacattcagtgcacaccagaatctcagctcaagtttatcgcagaggcttggctccaggttagcagctaaaaatcttcagatacatgacatttatgtacaacgtctctctgaatgttccctcatgtattttatacttttgcagatcattgaatgcagacgggtactgaaatggacatatgcatatggatactatctacaagatcatgctaagaaaccattttttgagtatttgcaaggtcagaactcttatctgtagatttcgctggaacagtcaattgtgtcagtgaacccttgaagttgaagtttctcttgttgatctgatcaggggaggctgagtcaggtttggagaggctccacaaatgcgtagagaaggatatagaggtgtttgaacttgctgagggcccttcagaggaattcaatcatttccggacaaaattaactggtttaaccaggtaattgtcttgtttacatctatccggctgtttagtacggaacaagaaaagacatcagcttttcagacagatcaatctagaatccttgttgacttaagatgagtctatctattgtcttgtttacatctatccggctgtttagtacagaacaagaaaagacatcagcttttcagacagatcaatctagaatccgtgttgacttaagatgagtctatctatagtcataagtgtttgctatagtcagattgactcgaatctattgtcagattctgttgtaggtttaggtgaactagttgattcttggaacaaccatatgtaatgctaaccctaatggcttctatcgtgtatgaacagcataacaaaaaccttctttgaaaatctggtgaaagctctggagaatggtcttgctgatgtggattcacaagctgctagcagcaaaccagctaactctaaaccttctagcaagacaaaaggcggtgggaaaggtaaaggaagctccaaaaatggcgggtccagcagaaacccagatggcaattgagatctctcaggtttcagttacatcactcagtctctctcacaaaggtctagattactcaggaagaagaaagactttttaagagttcagcaaattggagaaaggtttggggtttagaatacttttgactacactcctgtgagtttgaaggctgttaaggcacaagactgcacacacaagttaactatctctctctgtcttaagggttcatgatagtctttgcttaccctaaatattgtatagtattaaagaatctgcacattgttactttggcttttgattgccttttgaaccatctgaagtttcttatctgaattgagttcaagctgcaaatggtaccaccattgtgtcataagaaagcattatttggctcttttacaaacttgcttgtcaaagagaacccttcatgcgacttaattaatattgcctttgtaataacgcgcgaaacacaaatcttctctgcctaatgcagtagtcatgtgttgactccttcaaaatttccaagaagttagtggctggtgtgtcattgtcttcatctttttttttttttttttaaaaattgaatgcgacatgtactcctcaacgtataagctcaatgcttgttactgaaacatctcttgtctgattttttcaggctaagtcttacagaaagtgattgggcacttcaatggctttcacaaatgaaaaagatggatctaagggatttgtgaagagagtggcttcatctttctccatgaggaagaagaagaatgcaacaagtgaacccaagttgcttccaagatcgaaatcaacaggttctgctaactttgaatccatgaggctacctgcaacgaagaagatttcagatgtcacaaacaaaacaaggatcaaaccattaggtggtgtagcaccagcacaaccaagaagggaaaagatcgatgatcgtgggacgaataacaagtttggaaaatggagaagctttgatgatagtgattccatttggttatcttcagattgtgcatctcctacttctcttcttgaggaacgcaggttatctgtttcgtttcgtttctcggttgatgagagtgtagtgtcttggttatcaaaccttgccaaaacttccctttctctgaatcatcaagaagtaagttccattaaagaccgtcccagaatcccgagaaacactaaagagaatgcagaaaatattcagaagaaagattcatctcgttctgttccaaatctcaccgttgtagattcttctactcagagttcacaaggaaagaaagtaagcttttcaaaatcttcaggtacacaacttgaatcaggaaatcatgcttcttctctgataatctcctctgatgttccatctgatctgaataatcacacggcaacatctttggttcgtgagatatgtctggatgagaaaagtgcagagattgtggattctaagagcagtggtagtaatgtcgatgagccgcttttctggccatatgaacagagatttgattggacacctgaggatattttgaagcatttctcaatgtcacctcgaagaaagaaattattgaatgccaaagtttctgcaggtagctctccaagatccatgagagcacaacttctccaagcaagaaaactagatcttaaagatggtagtaagagaaagcttgtgttcaatggccctttaacaaacgcagccaagattccagagctcaaaagaaataacagcaacaagaaaaatgacagcatcaagaacgagcccatcaggaactgcgtgaagaggaacaaaagtttgccgtcaaggttgagaaactcgagcaaaacatgttcaaaggttgtaccttttgaagttgcagaagaagtgattgcagcagagagagccaaagtggaaataacagctagaaagctcataaaccgcagaagcaagacaatgttggaagacgatttctcattgatgaatgacttctcaatagagaacgcagtggggcttggtgagttcaagggtagagagggcatagattcagaatttaactctgacattttcttgttcgatgattccctttaaaactactctacgccaaaaccaaaagcaaaaactgtctttggcaacaaattttgtcatgttttctctttatatataatcagattctaatttagacgaattgactaaaagccctgagatattttgtcgcgccagtaactaaagcagaccaaacaagaagccatatatattcatgacaaaaagttgtgtttcactagtaaaataaaacaggggaggaaaacccaacaatgagcaagatgaaaatcctagtaaagccaagagccatgtggatcccaatagctgcagtcctcctggtccagatttgctagtgctgctcttgtcgccaaaccacactctctaattactaattaggtttttttttttccaaaacttttaatcaaagaggtagataaaaaaagggaagaagctcccaatccgccttgtaatagagtgatctagggtttttagtttttgtgttcaaaagatctgcagtgtggggcaaggaatcgttgttttcatcttctattaaaaccgtcgccgtttttatcttctccatggcccagttcggccgtaattaataaataacgtcacaaattaaatattatttccaaaattaataatttaaacttttttctcgttgaattataaccattaaaaaaaaaacaaataaattttattacctgaatttgatgaaacacaaaaattgattggctctatgattctcaccggagccgcttcaacatttcccatcgtcgctcgagttttgaacgctatgaatcgccgtatgtatgctgctactactctatcatctgccaaatcaatctctgcagaatccctaaatcttcgttccgattccaattcaggtctactccgaatttgtgggaattttctactgatggaacttagctttctaactggtcgagttgttgattagatgcttttttttttttttttttttttgaatcagaggcagcgcatggtgcttctgagtctgagactcgagtctctttaaggaagaagaggataaagcaggatgatttggagcctgtaaagaaatgttccgccagagaaaccaaggcccgcaaggtaatatataatagggtttttggaaatttcaagtcttgcgtcgagtatgataatttttgagatttataggcaatttgttgatccctttgcttgagaaaagttactgctttttatgttcttaactaatcagattttaaagatgtgtattatatgatcctcttggtcttttgtttatgtaatgcaggacatgtgtggattacctgatatagaagactctccttataagaagactaatggaactgcttcatctagtaagtctcactatctatagttattagtgactgagccaaaacttgttctcactactcttcaactaacaccatgattacttgtatgaaattgttttgcagggacgagaaaactaaactcatacataaaatcaacagaagctagcccttctgcatcgtcgatcaaaacagcaggttttctttcacgagactctactctactactcttagtggcattttgggtacatttattctttacggaaaacgcgatgtccctaagatgtttatttagggctaggcataccacctgaaaactgggaaaaggtgctcgagggtattcgaaaaatgaaaccttcagaagaagcaccagttaatgctgtagaatgtgatagaaccggaagctttttacctccaaaggtagaaatatcttacactaaatggaattgaggtattgctgagtttgtgcctattggttttatgtggaagtatacaatgagatagtttcattgctttctcaaatattacttcccatttgcttttcattattacatggtagtactctatgcatatattgggaaccaagttccaagtggtttaccgtgaattagtaacaaatgctagcttatgattagaaaattttcatattctgaattcttgcttccttgaaaggtcgatggaaggtttcccttcttgtttttccttttgatcttatctctccctatttctaggaaaggcgattttatgtgctcataggaacacttctttcaagtcagactaaagagcacataactggtggtgagatttgaattacttatctctccctatgttgcaagaacgcttaatttcagcattctagtatctctgatttcatctggatctccaagtttcctgatattatattcaaacacttataatatgcagcggcagtagaacgacttcatcaaaatggccttctcactcctgaagccattgacaaagccgatgaatcaaccattaaggaattgatctatccggtacattatccctttttaatcttacttcatgttgttaagggctctttgactctgctatgcccccagctgccatatttttcatgagaagtatttaagaaattaaaaggaaaggagtgagaaactataaatagaaattgttgttatcgttttaatttcgataagaaacttactgtttcccctttacttttaggttggattctatactagaaaggctactaatgtgaagaaagttgcaaaaatatgtctaatggaatatgacggtgacattccaaggactttggaagaactactttcacttccaggagttggtcctaagattgctcatctggtataagttgcccatattattccgctttgtaagagagatacatgttttcaaagttcttaaaaggtttctttgatgtactgcgataggttttgcatgtagcctggaatgatgttcaagggatatgtgtagacacacatgtgcatcgtatttgcaatagacttggttgggtgtctaaacctggaacgaaacaggtgcttctctaacaccaggtttatgttgaagtatatatggctatgagattgatttcttaacacttggtaaaatttggttcttctttagtttgcttatctgctcttggtcacctatctctactttgttcttgaccagaaaacctcgtcccctgaggaaactagagtagctctgcaacaatggcttccaaaaggagaatgggtggctataaactttctgttggtgcgtcatcctgggatatcctaacttatagatgcatgaccatacatagaacaatctacttacactccacttaatcttcgtcctcacatttttgttgtctgaaatctcatcaggtaggttttggacaaacgatatgcacaccgctaagaccacactgtggaacttgtagtattactgagatttgcccttctgccttcaaggagaccccgagcacatcatccaaattgaagaaatctatcaaaagcaagaagctttagttgctttggctctggattctccttctagatcattgttaaacccattttttgattagtcctcggttaaagttaaattgtatccaagatattgtatagctttatggggaatgcaagagcatcccacttgtgtgtaaaactaaaacttatagaatggaaacttacccttatgaaagacactgggcaagtacacttttaactgaatattatgaaaaaacttaaaagatgattcaagaaccttttaaagtgtttccactaaaagcaagtgatttggattttggagtcatccaccttgtaatctatctaatttgttatcaaacattaaaatttttgaattccccttatatagaattaacagaaatttctttctttggtcaaactaaaattaactgatattctatgtaaagactaaaaagattatcaacaaattgaattttgcaagacggaagaatccttactgatgtgatggctgatcacattgggtttaagaaatgttaatggtcctaaaagtttaattttaaagtaaggtattacttccgtaatttaatacttagtagaaggaaagttatggggttaatattatgatatataataaatttgggggactattttccatataataaaaacttgaaataggagagagctggggatagagatattcttacgtccaaacagagagagtggggaagaaaatttattaaagcagcagccggaaaaaaaaaagaaaaaacgttcgaagaggaaaaaaaaaaaagagggagaagagcaacgaagacggacctgcaaattctgcagtctccactgacactttcgatctttctctctgtccactttcttcaatcctcaggtttctgcgtctttgtgtcatcatctatctcttacgctttctcgtttttgcattctctccgttcatttgtcagttgatttgtctcctccagttctttggctaatgcaatcggataaacagtcgttttagcagttatttgcaaggatttgtttatatttctcaacagtaaccgtagatttgattgaggatgatcattttccgcttcagtttctagggtttggtttagatttttcattgttttgctcggaggtttagtggctttctcttcaggttttatctctatgaatgcatgtctattaggagttggcgtacctggaaagggccgtgtatgtgagagaatgttagatgtgttccttctgggattcttttgatttgtgaaatttgatttgtgactcttgggtttgtagttgtttatggaaggagataaccatcagaggtagcatttatccatgcatcccaagcgatcaagtcaaggagatggttcagttactaagccagttagaaccagtgataggcttaggaggaggcccaaattgcatggtcgctcatacttgtactactcttcaccaaacatgttacataatcggaaaagaaacacaaagacaagaacggcagcctctcagatcgcaaagatgctgcacaaaggaaaccgtccagcgagggcatcaaatgccgcggtaagcattacatgtttcttcctatgatattgcatcaatactctaatatctggcacttcatcttttatagttttatccttcagtacatcattggtaagtggatatacatatgatcatctgtttttatcttgtcttgattttctacttttacttgttactgtgtctgcggagggtattaggggaacaacatgaaagtagtctaatcggttcttttctttgtaatgcataccgttttttttttgtctcattaaaccagaatgtttatacatttgctaatgacgtacagccaattgcatctgatctccggcgttccacgaggaagagaagaatttctgtaaacctggaggactatacagacagttctggagcggaggatgaggatatgatggtcagaatatattcctgtttaatatggcacttcgataatgtaatgtaaagctatctcttaagtactgtggtatgcctcttgaaaataagtttctgatctttttcagagtccagcatatcgaactttgaggaggagagttcataaaaacttctcaacttcaaaaagtagaaaggacatggatgctgaattggcaccacgtcgtgagggtctccgtcctcgtcgttcaacaacaattgctaataaacgactgaaaacagaatctggcgctgaccaagatacatcagaagagaaagatggccaagatgaaactgagaatgggaatgaattagatgatgcggatgatggtgaaaatgaggttgaggctgaagacgagggtaatggagaagatgaaggcgatggcgaagatgagggagaagaagatggtgatgatgatgaagagggtgatgaagaacaagagggaaggaagagatatgatctgcgaaaccgtgctgaagtccggagaatgcctacgggagaaatcaacaagcaacaacaacctagatctcctcggagagtattgcatcagggcatgggcaccagggttggaagagatggtaggagaggtgggtctcggcctcacaagcgccatcgctttacaagaacagatgattcagatgattctcttcttgtggacgagttggaccagggccctgcaattccctgggctcgaggtggaaacagatctggagcaccttggctatttgggggtttggacacgtatgggtcaagttcattggggttgaacgttggagcttctggttggggtcaccagagtgatggtttggctgcattaacttctggtgttcagactgctggcccaagctctaaaggaggtgcagatatccagccactgcagattaatgaggatataaattttgatgacattggtgggctgtccgaatacattaatgatttgaaggaaatggttttctttccgttgctgtatccagagttctttgcaagttacagcattactcctcccagaggtgtactgctgtgtggtcctccaggcactggtaaaacactgattgctcgagcattagcatgtgctgcttcaaaagctggacagaaagttagcttttatatgcggaagggtgctgatgttcttagtaagtgggttggcgaggctgagagacagctaaagctactctttgaggaggctcagcgaaaccagccttccataatcttttttgatgaaattgatggtcttgctcctgtaagatctagcaagcaggaacaaatacataattctattgtttcaactttactggcgctgatggatggcctcgattctcgtggtcaagttgttctcattggagcaacaaacagggtagatgcaatagacggagctttacgccgccctggcagattcgatcgggagtttaatttttccttaccaggttgcgaagcacgagccgaaatattggatattcacactcgtaaatggaagcacccacctactagggagctgaaagaggaactggcagctacttgtgtagggtattgtggtgctgatctaaaagctttgtgcactgaagctgcgattcgtgcttttcgtgagaaatatccacaagtttataccagtgatgataaatacgccatagatgttgggttggttaatgttgaaaagagccactttgtagaggcaatgtcagctattactcctgctgcccatagagggtctgttgtgcaatccagaccactctctccggttgtgttgccatgtttacatcgacacctccttgaatccatgagtttaatatcagatatttttccctcgtcagccacgtcatcggagttgacgaagctgtcaatacttacatttggatctgcaattcctcttgtttatcgacctcgacttttgctgcttggtggtgaaggagttggactggtaattgcttgtcgtttcttgtgattatgtcttaaagctttattattatgaactgaattcacgtacttgttagtcgaacaggatcatcttgggcctgcaattttacatgagctagaaaagttccctattcattctctgggacttccatctctcctttcggatcctggtgcaaagaccccagaagaagcgttagtacatatatttagtgaagctagaagaacaacaccttcaatactttacataccaatgttcaataattggtgggaaaatgtaagtgtgtttttttaaaaccaaattccactttactgcagttacttttggagatcatgtttacgtgttcacttaatataatgtattaggatgtcctgttggttgttttagattgccagtctaatgatttgatactgatgactgcaggctcatgaacagcttagggctgtatttctgactttgttagaagaattgccatcaaatctacccatattattacttgctacatcttatggtgaattgtctgacatggaagagcagtcagtatttgacaatcgatctgtgtaagttcatgttctacttgtaatcactttgtccagtaccatactacagctttattattagcttttcttttgttatcccataaaagctggtagggcactttctttgaaagtcggtcatccttgcaatataattatatactgtacaaacttgttctgaaagtcggtcattctttcaaagtcaaaaggcatgtatcagtagcctgcgagttagtatatgaagctgtagatgcttacgtatgttttccaagttgatgtttttggtttttctaaatttgtttggcaagtaatgatcagatttaattatgaacttatacaatatatttgaccaattacatgaaagttcagagaaaaattccagtgaaatagcattgcctatttattgtgtcattccccaacttagctactttttccttggttctcgttacaaatttaattttcttcattctattggttgatggtcctcacgcttatggtttataattcagtttcccatattgtgtacatttgttttcagctatactgtggacaaaccatcaagtgaagacaggtctttgttctttgaccgtttgattgaagctgctctctcagtcatttctggcttaaatggcaaacctgatggaccacaaccccttccagaacttcccaaggttccaaaagaacctactggtccaaaacccgcagaagtaaaagccaaggtggaagcagagcagcatgcccttcggcgattgcgtatgtgtctcagagatgtttgcaataggtaaatgtgtctaggccctcacgttaaataaacatccatgcaaagtgtgtactcaacgcaagatattttggtagctgtaaattctctcgtttaatctatatgcttatgtgatagaacagttggtttgtagatctggtacacttcaaaaaatactgagatccagctttaaaaatacttcccttgtttcttctctgtcattttttataatcttcattacactctactgctaggcttgcgtgtttatgttgaagctttattattgtttgcctttatacttagatcaagaaggccttttgctttttgtcaacgggaggcctagagatgaacattattagatataacagtgctgactttagctttgcagaatactatatgataaaagatatattgttacttatcggatacttttgctttgcagaatactatatgataaaagattcagcgcattccactttccagttactgacgaggatgctccaaactatcgctcaataattcaaattccaatggatacggctactctgctgcagcgtgttgatactgggcagtatctgacatgtacaccgtttttgcaagatgtggatctcattgtgagaaatgccaaggtgcactcctattttacaacacatttcttttacatggctattaaaccttgacaattcaaaaagtgtggtcactgcactagaaaagttataaggagagagttgttggttggtgtggacattgtccttactattcatgtttttatcatttgatattttgagggaatagatgcttttttaaacagaatgattcaatgctaacgaatgagactcttacccatgaagtaatgttttgatggtggttgacttaacgtcattcaattatttatccaggcttacaatggagatgattacgctggagcgagaattgtcagtagagcctatgagcttcgagatgtagtatgtttgcaagtctctcagcctgcatatatatttttccatttaaaattgctgcaagtctatcatcacccaaaagctgttatctgaagccatagatatcattatgtctcaggtgcatgggatgctgtcacagatggacccagcactgctaacatattgtgataagatcgcagctgaaggtggtccttcactgataccagatgatctgagtggatcaatcctcggtttagctcctgttgtgcagatgggaactgttactagaaccagtgccagacttcgaaatgtgcagccagaggttaatttagatcgagattatgaaggtcttaaaaagcccaagaaaactactgatgctgtcagtataggtaatgccactgcaacctaagatttggttcttgttttacgtgttaagtgttggtggtttgctttgagtgcttacgatctagggttcctagatgtagaaaaaatctttgataatgagacttatttatacttgtgatgaacagattcagctgcagacaaatcacagaaccaagattcaggccaagaaatgccatctccggatgcggccaacccacagtcagcagctccttctccaacagatggtgatagagaagaccaaagcgagccaccaagtaaagaggcatctgcagaagatatgagtggtgattcttgcaagggtcctgcggccaagtcggataaagaaatttcaagccgaacagaatctgtaaagggagtattcatggaacgtactgacaactacagcattccgcagatggagaggctttacactcgaatcatgaagggtgttcttgagactctggacaaagggcttcgtgatgatgataataatcctaagcattcaattttgagatttttgtcggaattcgcacagcatcaggcgaatttctgaatctaaattttctcatatcggtcactaggataggtttgctaggagaaagaatgaaaggaacaaaagattttttttggttttttaaaatccggattcttcttttgactgaaaaagttgcaagaacaaaaggtaatagtttatcggtaggattctcttgtaaatttgaacttgcatctttcaatcttaaacaaaaagccataaacaaaaccaaaaagatttctcttatcttgaaacggtgtttagtcaaaaaaaaaaaaaaggaacaaagaagaaaataatatttggctagattctttggctctcactcgggtttctgttatgaccgttaatgaatttgagcgggaagatcatgccgacgcattgagactttttgtcaacgctataaaaacaaacccaatctcaccattttcttgaaagctctctctgtctctctcctcgtttatttagactttgcaattcttgtgctcctcttctctacgttttgaacaactcctttggctttcgcgattcatacaacttctcaccgatatagaagaagagatgagttcgcgtgataaacccaagactttcgcagaagtaagagaagagatatgtaagagaagagaagagatgatttcgcgtgataaccaaaaaaaaaccaagactgtcgcacaagtaagagaagagaaaggtaagagaagggaagagatgatttcgcgttataaccaaaaaaaggccaagactgtcgcacaagtaaaagaagggaaaggtaagagaagagaagagatgatttcgcgtgataaccgaacaaaacccaagactgtcgcacaagtaagagatgcgaaaaggaagagaaccttcgatcacgtccccagaggaacaagggaacctcacgcataccttcgcaatgatccagcgcctcaagttgcttctgtccccaagagtgtcccagaagagaaagatgtgatattggatagaatcttgagtaacgtccccagaagaaaaaagactacttcttacgaattcgtcccaccaaaacacccacaagaaccgcaatggcttctccaggttatgagtcgcatgaacggcgctggtgatccgaagctaatcatagagaagaatctggactcgaacgatgttgatccacgtcaaaaccgactctcaatccctatcaataccgtaatccaaaacgatttcttgacgcttgacgagtcaaggttgattgatgaagacgaaatcactaacgaagggaatatgggtgttgcagcgtttcttgttgatcagcgaactaagaagtggaacatgggttttaaacaatggtttatgacgactgattcagggagcagttactggagttttgtgttgcgaggtgaatggagcaacgtcgttgagactaatggactgaaagaaggcgacaaaatcagcctttggtctttcaggtccaacgatatcctctgttttgcccttgttcctccaacgagctctgttgttgagtctttagataagtgaaaagaagggttttttgggagtattagggttttattgtgataaagatgttgctagggttttggtacagaaattggatcttaatcttgttggggtttctcttccattagtatacttttgacatgactctggttttgttgcttgatgtacaagcacacatatcaagttcaattgctagtgacttttaggcctactttagttactgcattggtaatatctgtgatttactatgatacaaaaagtttataactgtgggacgaaattggtccaatatggtatttggcacattcctccaaaatgctcatacagaaactgttagggatcagagattgtactcatgttaaagcagaatccagaaggttcttgagttcttcgtcgaactcaatcatcagattcgaaggcattgaggtcaatttgagttcctctgatgatggcactgcagaactaagacccttgttgtgatttttgagtgacaaactgaagactatattctcttccgcatccaatataatgtagttcttcaaatacatttgactccaatacatttgacgtatcaaacgcttatcttgacttcaatgcattagctatctgactgaaaaccaaatttatcctccatatgaaaacatcaacacaacattttcacaatcttcgccatagccgaggaggatcaaacacctctgagttgaatagattcaatcttaaaatgtgttgaaccagtaagtatttgtccaaccatcttcagatgttgagagagcatggctaaacagtcttggaaggcccaaagtcaatagttatgaatcatgatttttctcgacatattcattgacaaaagtatagagcacaagaccattgaggaggaccttgacataactacaagaagatcacaacattgataacttttatgcaaagacactaacaaaatcgaagcgataaattctctctttttgcaaatttcattctctcatacactgagtcctttaatgggcctaaattcaatgaactgattgggtctactcccatttgagcccaaatatcaattacagcaatcgcttgacccatgaatccaaagtccattcattaggcaaattcactgcactgattcctgattttcgcttaaaattatataaaggtaaaaactatcaagattataaaaaaaataaaaaatggacgattatacatttttgccatcgctcatagatttccattcaatgcataatacacacaatctccaaatacaatgatgtaaaaagaaggcaagtgggtcataattaatgattaatcacagtaattaacctatttgctgaaaggtaaaaaaggaatgttaccattccagaactgattttaactatttaataacactcattctcattctctttctctctcaaaagtccttcttcctcaagcttctcgagtaagggttcagatcacaatgacgacaaacgacgatgatcacgcggctgagagaaacacgatgtccatgaactatgaattggcggctacgttgagtgatgaagaacaacgcgcaagaaaaggaaaagccaagattgtctgtaaagaagaagaccacgtctttatcaaaaagaaagaaaaatacgaggaagagagcgagaagagggaattcttcagtcatgtccccagaaagataaggcctgcgcttagatacccacaacctaactttgaaaaccctaatggggcttcttcttctttaaacttacccttcgaagaagactactacatggctgagtactacaagaagacggagaccataaacccacctaacccttatcaccaatggtctccttcttcgttcttaacggagtacacacaccctaggatgcttgaggtgttacatcgctgtggattcaacagaccagtggtaacttgttattcaaggacggccagggagatgcggtggtggcttcgccaggtgatgaaagacatgagagcagaagacctaacacttatcttagagaagactctgtccacaactgatgtgatcacaacgacacatggccgtttctcaatgcatttcaacagattaatcagtaacgacttcttgaagcctgaggagcggagtatcctagaagaagatacctacaatgatgagacgatgggagttggagccattctcgtggatcaaaggtctcaaaagtggagtgtgattttgaagagatggggccagaattactttctgagttgtggctggaacgacgttgttaaggctaataaattgaaagctggcgacgacatctgtctttgggcgtttaggtgcgatggagtcctctgttttgccatgaggcagtatagctcctattttcgtcattgacaagtttcttgtgtctgttgagattcacattggtctaatctttcaggccattcttgaggtttttggtctagttaacaaaattagggtttttattttttactaggatttctttcatctctcttttaacactttgtcgggtttttgagtttctaggattgtttaaaatgcaggaggcttagcacagtctctgtttcatgcttaatacaatacactctctaaataatgctttcaagaaaagaaaaagaaaagattatacctttagagttattataagaggaaaacgaagtaaatcagaacggattaacgaactatataaaacaacaaagtcactcttttcagttttcattcacaacaaaatcttaatggggcttccacttcttcttcatcgcctttttctttaaccttcttcaaaactacattgccgagtccaagaagactccatctttgtgtctaacgggagaccacgagccccaagaggcgtgtggtgtcaccgagaggggtaaatcagaaagacatcagtctttggtctttcaggtggcgtggaatcctctgttttgctcttgttcctcctcttacattgagacagagtagctcttccaatgctcgccgtctctgctaagcttcttgtctctgtggagattgatcttcatttgtacagccggctaagttggggcaattctagagggttttggtcttactacaatgctagagggtttggatgtctgttattagtaagctt

SEQ ID NO: 17 - DNA, 93724 bp, Arabidopsis thaliana
gaattcttgagtcaggttattaatctgcattttgttaatgaagcttgtgtttacatcctctttcaacttgtcatattagttgtttgctcttccttaggtttccatggtctctaggctgaagcatgaaaatctcattcaattgcttggtttttgtgttgatggaaacctccgcgtccttgcatatgagtttgcaacaatgggatcgttgcatgacatcttgcatggtaagattagctttttggactttaagattctctgctcagttctctaactaaataaaccccctgttttgaccaaaagtattcatatcggtgccaaacgataatttgtccatgtaaggttgcttattgtgcgattacaggtaggaagggagttcaaggagcacaaccaggtccaacacttgactggataacgagggtgaagatagcggttgaggcagctaggggtttggaatacctccatgagaagtctcagcctcctgtaatccatagggacataagatctagcaatgtccttctttttgaagactacaaagcaaagattgctgatttcaatctctcgaatcaagcacctgataatgctgcccgtcttcactcaacaagagtcttggggacttttggttatcatgctccagagtaatgtttcttaagcccttattgttttgtattcgtatgaatgtctaataaacagctaaaatgttaatccgccctcttatgcagatatgcaatgactggacagttaactcagaagagtgatgtgtacagctttggtgttgtacttctagaacttcttacagggaggaaaccggtggatcataccatgcctagaggtcaacagagtcttgtaacctgggtgagtatacatacgttctggactataatgtttcgtattaattgtccccttggctttacaatttcattttattggctgtgctcaggcgacaccaagactcagtgaagataaagtgaaacagtgcattgatccaaagctaaaagccgattaccctccaaaagcagttgctaaggtacctcgatacatacaatagtttcatattcatgtctattaaatttccgttttcgatatattcgtgtctttgagattgacagaatatgttatgttggcaatataatgcagctagcagcggtggcagcattgtgtgtgcaatacgaagctgagtttagaccaaatatgagcatagttgtgaaggcgctacagcctctcctgaaacctccagcagcagctccagcaccagaatcttgaaacttttaaatcttttttttcgctgcaactatcagaaagaatctacatagtaccatttgccataaatgataatgaggttggttttgagagtgataactactattattaaaagatgatattatgtttcatttgatgatttgattttgcacacaaattttgttgtgctagaaagagagagagataattgatggcaaagtttattgttgccgtttgctgagtgggagagaaaggaactctgattttatttatatgatccctcttattcctatttctctctaccttttggattaataacctcaaaaattcgaataacttgatcattgaatatttgcgttagtcgtgtatgataattacaatgttttagttttcttaacaaatcgttaccttcttcttctttttgtcgtctcttatttatgaaaaaaaaaagaaaaaaaaaaaaagaaacaagcagcataacaaagctaaaaggcccaactgaaaagtaaataaacaaaggcccaaccaagcccaagagaaaaccaatgtcagttttgtttttttgtttttgaatttcaccggttattcattaaagaattgtttggcccgccaacaacatacgtgtccatatccacagtctctcacctctcgcagtgcccaaacctcttcttcttcttcttcttcttggcttctcctcctccttttccaatttcaaaacccaaaaacaaatcagcatggccatggctacgcacttcaccttccctttcaactatgttgtttccgaaggctctcatggaagaagaagtttcgtccggaagctggtcagagctgtagcctccggagattccgtggctccggcgatttcggaagaatcaaaagtgaaattgggtggctcggatttgaaagtgacgaagcttgggatcggagtctggtcttggggtgataacagctattggaatgatttccagtgggatggtcagttctcttaatttcgattctcaattttatacattttgtgaaacaaaagtattgaaatgaattaaaagttaatctctttttttttattctctgtgatggtagacagaaaattgaaggcggctaaaggtgctttcgacaccagtcttgacaacggtattgattttttcgataccgcagaagtttatggttccaaggtaagcgtaagaaagctgatcactcttcgtaaattggtttattctgaaactaatttggaaatctccatcttttatagttttccctgggtgctataagctctgaaactcttttaggaaggtaatttgtttcgaaaacatataacagtgtgccacactatcctcatatatattcctcttgactgtcattggtgagattttcgaacagattcatccgtgagagaaaagagagatatcccggagctgaggtttcggttgcaaccaagtttgctgcattgccatggcgatttggtcgtgaaagtgttgtcactgcccttaaagattccctttcccggcttgagctttcatctgttgatctctatcaactgcattggtatgcacccctaattcatgttggagtaaacaacactagaaggtaacaatctcactattttcttaattatatttcaggccaggactatggggaaatgaaggttttttcttaagagcagcactgaatctacttttaactagagttcgtgtcacttttggtgattatatcaaatccattgacattgtgagttatgtttttaggatatcttgatggtcttggggatgctgttgaacaaggacttgtcaaggctgttggtgtttctaactacagcggtatcatttcaatctgttttttccttctcacggatgcatatcttatgaactttcaaattcattatacttactgttgtgcgatttttcagagaagcggcttcgtgatgcttatgaaagactcaaaaagagaggaattcctctggcctcaaatcaagtcaactacagtctgatatacagagctccagagcagactggtgttaaggctgcttgtgatgagcttggagttactttaattgcatattcccccatcgctcaaggtaatctgcctttatctcctttgcgttgtgttcatgtctatcgttctctagaaaagttgcatcaggctcttatagtattgacgcaaaacaacctggctaatgaacacatacattttccgttatttgctcttttgtcttttttccaggtgctctaactggtaaatacaccccagagaacccaccctcaggtcctcggggtcgcatttatacgcgtgagttcttaacaaaggtaatagctttcgctgcatatatctaagttatttaacacaggcgtgtatgtctgcaaaaccatagttacatctgaataaccctcgagtcttctaagaaacagatttttggattttgataacttgtatatctcactgttataaacctgtcgattttctcctctaatcctgcttttttcttagtaagttctgttttgagacaaagtatacacttttatacaaaacacaacaccaatcaatgtacctatacagaaattatcaaaaggtagcataatagtgccaggtttcttcactaactttgacttgtgacgttacagcttcaacccctgttgaatagaatcaaacaaattggggaaaactacagcaaaactcccacacaggttctttcccttttccttatgcactctgtttttctttttccctgtccaaaaacgttaagaaaaatacaaaagagtaattgtgtgatccatattaagctatccaagtgtacaccctcgattttgcatcaaatcatatgccttcttgttttgttgtgttgtgctgtgcagatagcattgaactggttggtggcacaagggaacgtgatacccatcccaggagccaagaacgcagaacaagccaaagagtttgctggagcgataggttggagtctgacagacaatgaagtgagtgagctacggtccctggcctctgagataaaacccgtcgttggtttccctgttgagtatctctgaactcttaacactctgtttgtagcatttgtaaagctcaaaagttacaatatgaactaaaagtagtatatagatgatggtaaagtgttgtaatacatatgcaaataaaatctttttgcctctttgagaactttacagtagccaaaaagaaagaggagggcctttggcatatgcttcaatagatctagttagagtcagacgtcaaaattcatctgcgttttaacctttctgttgactagaagaaccatttgatgcttacctcttttcatatcagcttcaagcaggctttcttctcactatctttgtgctttcaaggatttagatttagtctatagcttctttctgagtcaatatcttattaatttgagaaaatatctattgaatatagttgttttttaagaaaacttggaaaacgagtctgttatcataggtacacaagtgatgccgaaaaggtaacatcatcttgatagttctcaaaagctcagtttcattttccattttttacaagagacaaatgaagaaagcaagcagagcattgttacgttgtgttgctttcactcaagcaacactgaaagaagtggctgcgctctcgacaaatttcctggctcccttgaaccacctcttgtctccagcttgtgctttgcagatgtaaagcttccctccattcacggttgctgtgatcagctgatgcttcccaccttcgtctccatcagccgttcttgtcaacacagacaagtaatagtagggtttcccaccaacttcctgagatgatgactccagaatgtttgctgttgccactgcattgttgtcaaagcctccctgtaagaacatcagattcacacacacacagagttagaacttgataactcactccacctaaggtaagaatctttcttgtaataatcatcgactactagagaggtctttgaaggttatcagttaaaaaagcttttgagttttgttttatcagttaacaacgagggagacaatgtgttctctctttagtgtttgattctcttattctattctatcagcttctggtttacttataacaaataacaatgggaagtttacctcagaggcagtctcaccgaagtaagcttgtttccctaggaggtaattaacctgcataaagcccaaatcaccactcagtctcacacttcattagattttgtaacatcaatacctttacagatgatggagtaaagcaaagacctgagagaggaactcttcgggagaaccgtaatcagtgatggacttcttgtcggtaggagtgaccatgacattgagattgctagtagcatcgaagttgtcttcgaacctaaggacttgtcctggatactcaatctctttgcttgggttccattttgctggaacctgcactttgaacccatctccattgtatggcaagaagtctgtgttcgtctttggcttcccaaacacgtttgctgcaacaaaccaaaaaataaaaataggatgaaaaaaacacaatatgttcttcaagattcttcttcaagaaaatgaaatgatccaaggttattttattttataaacgcaccagcttcaccgtaggcggcatcagcaggagatactttggaaccaacagcagcggcgccgacgaggagagtgagagcaagacggcgggagacggcggagttatcgtcttcatgagactgttgagctttacagatgatctgaacaggtttggagagcgacacgtgacgctgggatgaggaggaagatgatgatcgtgcggctgatgaagccaatgcgctctggtgtaggaaacacgcactgtacgccattatctctgtctctctttctctctttctctcttctctccttgtgtgtgattaagttatgaaagtgttttttgaggattgttggtgtgttaatgtatggaggtgaaaccaagagtgaagctgattggttggtttcggatattggaggatctctctgttgatgtccagataaggctgttgaggtgttgtattgtgccacgtggcagatacgctttcttcttgttccacgtcagattcataagccttcgattccatctattttagtattttactctaaagccattccatgatcaaatcttttttctgctcacactaagacactacagtactggatcaataatggcttttcttctttcagttacatgcgtatatcttaaaacgtttataacgatagaacaacggaagcactaagtgagaatgaatacaaattatctaacaaaattgttgaaattaagaatctgttacacttatgtagacaagtgccatttcaaaacttggtttcatgacaaacaccgaaatgctcattaaaacaccaaagtggaatgggcatcatacttcccttcttctttcggttttgcttaggttggtgcagtatttgagccacactgctcattgatcggaaggtatgctcggtttttcctcaatcaaacctgacttgtttccctggctcaatacattagtggaaggcattttctcttccatattgttaaccgaatcaaagttgttagctaatttgcgctttttcttttttggtttcttagctggagcagtgtttgagtcaggttgctcattcccactgacaagattcgaaggaatgctctctttctccttacccggatccaacctgttgactgactcaggatctttttgctcatttccgtttgccagatcagaaggcttgttttcttccatgttccccaagtccaggttgttgactgatttgcactttttggaccttgatcgcttcttttttggttgcttagcagcttccattggagcagtggttgggtcaggttgttcatccccattagcaagattcaaaggcaagctctcttccatgttaccataatccgagttgttaggtagcctaagctctgtttgctcattctcattagccagatccgaaggcgtgttctctttcatattccctaaatccaagttgttggctgacttgggctctgtttgctcattctcatttgccagatcggaaggcttgctcttttccatcttccccaaatccaggttgttgcctgatttgcgctttttagacctggatcgcttcttttctggttgcttagccgctgaagcatcttcacctggagcaatgtttaggtcatgttgctcatttccattgacgagattagaaggaatgctcactttctcgctacccagatccaacttgctgactgacttaggctcttttttcttattcccatttgccaaatcagaaggcgtgttctcttccatgttccctaaatccatgctgttggctgagttaggctctgttttctcattcccattggccagatcagaaggcgtgttctcttccatgttccccatgtccaagttgctagctaacttcggcaatgtttgctcattcccaatagccagatcagaaggtgggttctcttccatgttcccgaaattctcttcaatgttccccaaatccacgttgttgagcgacttgcaccttttggactctgactgcatcttcttttgttttgtagccgccgaaacatcttccactggagaagtgtttgggtcaggttgctcattcccatcagcgaaatttgaaggcaagctctcttccatattacccaaacccaacttgttggctaattcgagctttgaccccattggagtagtgttcgggtcatgctcccgaagctcattggggttagtggaaggtatgtcatctctgggactcgttgcatctaccactgaagtaataggttgcacagctacagtttgaactgaagattgtgcgaggctatcatatgagagaacagaagctattgcatacatagaagcaccgagatgaggcggcaaattttcctttggatgtttaacctacaaatgcatatggaaggttgaaaaggatgacattgccaaaataaaataatgaaaatcttaaatcgtagtgataactcatgtaccttgaacaaaatggacgccattagtctctctctcaagatgtacatttgagcaatttcaaaagctgtaaccttgaaaggcagccaccgatccactactacttttactgaattttccggcccaagcattattttctctccaggcctaccaacttctttatctatgtccatcgcgtctcctacatttcctactttgtggtcttcctcgtcatcactcttaacagcatcatagctctctgtagtagaaacggctatctctcttgaaaacagtaacacaggtatagtgggaagaacagtgcagctccttatcaccacaccccaatctcctcgagtgatctcatcaaaaacaattaaagcttcgtcaaacttggtagaggacatgtcaacattgtttgatagcgagggcacacggactttggctccagcaatagtctctattacagaccttgtccgattcttggaaagtgggcacatccttcccaacatagggtacaatccaactgctataacagcacggagaatacccggatcatgagcattcaggctacagtttgagctgctgctaggtatgaccccatgtctattaagttctccctgaagcttgcgacacagatcatccagcctcttcatgacaacttgggagatgaagtacttagaacaaaactccttagcttgaccacttgcttttgcatttttccagcactgaaaagccgcgacagtggcaagatgatcactgtggtctccataaagcgatgcaagttcatgttttgcggcagcagccttttttctatcacctggcgacaagggcatggtaaacggatccttctcgtcagctgcacatgccagaataagtgctggatccaaacagttcactaatatggcgaaataaatcatcttgctaatccgaggatgaactggaagctgaccaaatttctgtccaagttcagtcagctcttcttcaggagtcaaagctccaatatctttaaggatgattaatgcattttcaatactttgagcaacaggcgggtccatcaatttctgaaggaaatcatttacgttgcaattcggatccagcatcttaacctgaacatattgatattatagaaggacatcagtaagaaatcaagaacgcaagaagtctcaaacaggacgctaccatgcatgaatgacaattaaacatcatagaaaaaatctacgttagaaagaacagcacctgcaagcagagttcatccactggcattctcataacttcaggaactctatattcgggcaaagacgctgcccggagtttagaatatagatgataacagatgccagcttggcaacggcctgctcggcctgccctctgttttgcatttgcttttgatacccaagaagattggagcgttgacacgtcattatagggatcataactcttttccttcatccgaccactatctatcacataaaccacatcatcgatggtaactgctgattcagcaatatttgttgcaagtacaattttgcgacaaccacgaggggggcgattaaaaactttcttctgttcctcagctggaacccttgagtgaagacatagaatgatgaatttagcactatgtgcaaaaaaccgatcatcaagcaatttctcttttgttttgcttatttcctcccacccaggtagaaaaacaagaatggcaccatcttttgaatcgctgcatattttcttcattaacttcactataagacccacatctacttcttctggtttgattgtcgccatatacttatcaagtaagtcttgtgcttgctgagaattggactggatgttacccgcatgttccctgattatttgagcagtttcaaattgattctccttttcagctaattctaatgctgttataccttctttggacttcagtgtacagtcagcgccgactgaaaggagcttacagacatcgctaaccctgccctttccagcaaagaccataagtggtgttaggcctgtcgttgagttctggtaattgtaagcctcatgacttccttcagatgaaactagatctacgagacaatcaaactcatcatttgtccatgccaagtcgattgcttcatccaaagaaactttatcttcatctttaaaatcacgtttgacagcagaaagtagatgactattcttgtctgaattcaggacagagagcgcatcatccagaaaaaaggttctcacctgtagatacggacgcaaaaatattgttttccaatacaatgagactaagaagcaaattctataaagagacggatagagagagacataaagagagaggaattaactggataagtgaatccaggtactcggacaactggacaacctccaaaatattcagaaaacctctcagcatcaagagtagcactcatcagaatctgttaccatagaaaatatttattcttatactgtatatgtatcatagcaatggaaaacgaagacgagcaaaacataaccaaccagtcggagatgaggattagacggaagcaagtccctgcaaataaaaaaacatcacaaattgatccacacccaaagattaaaaaaataaattatcctgagttatcgttttcatcacttagcttcaactaaagaattcaaaatacaagtgtacaagtatagcagcttttgcatctaaattatagcgcgacaccaattaaacaacagccatatgatcaactttttccgtcatatttatttgacttttttattcattttgacaagctgagcacctcagtgtttaagaaggccagagtgtgtaccttaaaatcattaacatgaaatcagagtaggagtccctttcatggatttcgtcctacaaagtgatacacgggtcagtgaccaatatagaccaattacaaaatcaatttacagaagaagagcacaaagaagaatacctaagataaacaaacagaaacaagatggcagatataagtgatttttaaaataatgttgttttttcacttaaaattttaatcctgccgcggaaccaggacatgtagtgaatggaaaagtatacttaataaacacatgaaaaacatattatgaatcaaaaacaagaatttgttaccacaataatgtgagttatatcaggaacagagctgttaacgcctttgcctataagcaccctcaatagaatgccattcgtgcagaaaacaactgatgactctcttccaccttcactttgcagccgaacctagacaatgatatattgagagaagattttttctgtagccctgagaacttgtgtgtctatcatataaataagtatgtataagaacaaagaccccttaccttgtagccgacagttctcccaatagtttcacctctttcccaagatattcgatcagaaacttcaaattaggaaaagaaggcattaagtaaggagttagctgcttatacggcatgcatttgaattacaaagctgaaaacttcataagagttgaatcagatagatactaacctgaaatagctgagatacgacgtggttgggtgcaaatgattttgcatgcttctttcttactatgccacatatgatctagaagatattgaggcacctaaaatatcaagaactgaggcacctgagaaacctcacaaatgaaagaaaaaagaaaaaaaaaatcgaaactactatttgaaacagaatacgatttatatataccaagtgatatgatcatatcatgtacaaggacagaaaccttattccacaacacttaaactcgattttttacaatgttttgaaaactgacaagctgaacctagaaaatcataacctgtgatgaataactatacttgactccagcagtaaaaatcaatacagaataaagagcaacagtgaaaaacactgaagcgtttgactctagtgaactacaaacaaaaagaggaaagacgcacctgagtagttttcccacaaccagtttcaccagcaataagaacaacctgcatttcgaataagaatgaataaagactctttcaaaatgaatggaaatccccactaaaagcacaatgacgaaattcacatcctgaatcctaatatagaggaacaaattaaatatctaaagacccatataacctgattggattccactgcagatataatggcatcgcgaaaagatgcgatgggaagctttgatcgtgcttcaaagatctgtaacatcattcaaataaaaggatatttcttttactcaacagtgcatgattccaactttctgaaacagggttctgtaaagaaaatattacaatcttttgaaaatacatataactgctaacctctcgaaaatgtctttcttttttcagtctagaactcagagataccacgttattttcaatatcgtgttttgtcatatgaggtttcttgaagaaatcatctttccaattactgttgacgtttcccgtagtatatatacccagtgatgtccctgtagtatcgccgtcacaaggtggatagcgagtaaataagtcgtgcagaacagctttagcctctggtggaaatgacacacatttgagcttctttggagatattctcgtctttcttataccgcctgctttctgaaatctggtttcatagcgatgcttgctgtatgactttgaaatcccatctccttctttttctttctgatttctggcttcatacatacgcctcttgtctgactttgaaatgccatctcctttgaaaagagaaagacgcctttcttccccactcctacagaaaatccaagaagattagaaactcaagtagtagatgaaacccaaaacttgcataataccccaaacgtcagacaaaattggattaagctgtaactgacccgttactttttgatcggagacccatagttcggcacatctgatgaataatgccacgttcgctatttgtaagttgctgctcaaagacgtaagctacacaatagaaagccaacacactttccaattcaaccaaacagaaaaagacagaacattccgatagatagaaatcaccaaagctaactataactttaaaaccattgcaagtagagagtatcggagctcatctgaagattagcagaagaaacacaattaagaacaaaggaagaaactttttaaattccttgggtcgaagaggtaaactcacaatcgttcccggaggcgcgaaaatcctcaaggaccttggtggcccaagccccagtggcttcgcagagacgagtatgcttcgtatccttcttcttcttcgccatcgctttcaaaggtttcttttctctcaatacttgtgagcagagactatgtggcggtaatgtgagcttccagagagacgctcgttgatgagagtgttccggttttgctctccgcctccctccttgccctactttcccttttttccacaaacatttttttaagaaaagaaaaaaaaaactccttattgaataacttggagtcttttgggctttttgggccttttgggccagaaggaaattaacagaaaacagtgatcgggaagacctgcaccgcacctgattcattccctcgcaccctttcgtttcaaatttcaaaacaacggcattttctctctcattttctgcgtgtttctcgggaaaatcgtcagcctgattgttttcttggtcaatcactgtttcgctcttgaggaaatcaaatgatatgagacgactgttgatgaaccgaaacctaagccccttgtgcagatccgtgctcagattcatcgatttatcagtctgtagagccatggcttgttttctcgactgcttccgcgccagagacaatcgctctactagtaatctcgtctctcattcttcactcgccaattccagagtaattctttagcttctcttgctttttccgcttcttttctttgcatgatcctgtcaattttgctgctacaatgatcgtataagaaatagatcgcaattcgcaatgccctgtttgatccttgagctgaattttgtatatgatggattttagtctgttggcttctgatcgattcttttgatttttgatcaagatcgtatcgatctgacccagaattatatgtttcttttcttatttatcttcagaaagcacaggactcgcagaatgatttgtcagctttgtttctttctgaaggtaaatctctttttcgatgtgtttatatcaggaatcgagatgattacttgtttttggtactgttcttgttaataatataagggttttgttcttgatttttatagagaaatcagcttcttcgccttgccttgacaaagaaagatttgatttagattctatacatattgacaaaggccttagggatgaggtatgatttttatttgaagcattgcctctattcatgtgattctaaccatactgattcttattccttttatcatgatcaagacttgtgcccttggattgattttgatatctcaacttaactccacatgaatcaatttcttgtttttgaaaccctgattttgtttttgcgagtcttataattaccacatctcttcttcaggtaatgagaagatgagttctatgttttttgttactgaggtcgtcttaggtttgttgatataatgaagttttgttcttcttttttccctctgctcttaattcactgttcatatttctatcacggatgtctatatatctgaatgcatggatccctgtgtaaatgtgtttccttacattaatgactttcttattagaatgcagggattctttttcagaaactctgtaattttgttgtggaagctctgaaatttttcagagcattctttctttgcatatatcaatataatcagattttacatgctttcaagagtctatgctgagaatctaacgcttttttccttttacttgtggaatcataggcgcggtttcttaaagcttgtggtactataccggagacacctattgaaattaggaaagcatcccaaaaacttagtcctcaacattctggatcttcccattttcactcatggatttccagtagctcctctatggggtctcgtttggctgaatcctcaacccccatgaaagcttgtgaagaggtgggaagaccatcatttacttcagagcaaacagctagcaggtagagatgttactttgtttaataaaacagacattttgctcattttgctatgcttgatagaattgacatggtttcttgatagaactggtgtggtttctatgctaacattattctcacatcttactaatggttaatggattcatggatctgaagttcactttttcatttttcatattagttgtgtaatcgatgtccgggacaatgcaaggatctcttctgcatctagtgatggtactgaggtagaaagcgttggcactgcaatcaagggtgagttggatagaacggccaggccaacgttcacagctggaaagaataagtctgtccggtttgaatgtgatcttgatcaatcaaactcttctaattcttccgagaatggcagttcaagaaaacccgagatgggtggcaaaatttgttttacagtgagctcacctaatccaacccccttgaaactatctgatgagatgcaaactcctggaaccatatatcctgcaaacatggaatcagggggaagggggaggcctagaatcaggtcacagtttgtgcattcagtttccaatataatggaaaatgcatccttatataaggtctacaaggattcacatgaaggcctagattacgaagagcagatagaggctgaaacaccctcttcagaaacttatggtgaaaaagtggaagaaagctcagatgagaaactgtccaagtttgaggcaagtttttctccttggctaaaccagatcaatgaaaacattgcggctttaaatgaaaggacaccaggagtcggtgtcataaccccaggtgacaggcctatcattggattggttgctgctcagtggatcgagaatgagcaaactgagatttcacccaaaatgtgggatggaaatgggatcccaaattcgacaaccaaatacaaggaggtaatattccctgcctttcatctctgctttctaggctctttcagctcctctaatattcagaaactaaaccttatgcaggatcagaaagtgagttggcatgcaacaccatttgaagtgagactggagaaggcactttctgaagaaggtggtcagagtttattccctcaaaggtattaaccgtaaatctcattgataatctataggagaagtgatgaaacctaaataagcaacccccataaatgtgtgtgatgcaggaaacttgaagtgatgatggaggaggttgaaggggacacagacatatcgcagctgcaccattcagtgcaaccaaactcggtagtttccttctgaaagtctccttggctttcgtacagatcagtgttacttacatatggctatcacattactcatgagcaaatgaaatactcttgtttctggctttaaaaggagctttaaagatagtattaaaaaataaagtatcaacagtgatatgtttatgaacctcttgagaattttcttcaccagcactcttttgatcttttctgaagtaattttaatctgcaaatgaattattacatatattgtcatgtcgtatatgtgtgagacagtagtagctcaccatgtttcatatcttaaaatggagcaaagcagaggtcccgtcaagtcctttggcattgaagtaagtagcgtagtctttaattgtggtctctctgtactttggaggattttcttcagacacaagctctctaatcggtccgtacattctaggattcggtcttactccagtggtaaagaaacatgcgacagacactcgagctcttgttgctctgttcgccaatactctgtgctccaaactgatgaatttgtcgtttgttataagctgcatcaaaaccacaaaacccaaaaatgaacaatagggaagataagttatacaatgcaaaactgagcaaaaatgcatcagtgaacttgcctgtaaaagatctccgatgttgatgatgagagcgccggaaacatgaggaacatcgaaccagtgcccttcacgacgaacctgaagcccttcgatctgatcgggaagaaggacagtgagaaaagagttgtcggagtgctgacttgtgcctaaagttaggtcaggctctggacacggtgggtagtagtgggagagcatgagcaaacccttagagcaatccatgtcattgaggtgattaggttccaaccctagagcttctgataaaagctcgaagagaaatttacccaaattcatcacttgctttgaatattccatcataatatccctgaaacaactcagtgattcaaattaccatatgaacaaagactacacatgaaatcaaattagagcaatagagtcatacctacaaatctccggaagatcctgtggttttggagtatctggagccatggtacaagagaaagtgtctctccaatttgctgctggagaactaaagagatcgaaattacttaaatacagaaaccttctgctgaaatcgcgactgtagaattctttcctcacttcttgtgattgctcgtggaagtcacgaactccttttttcatcttctcaagaagttcaagcgaaactccatggttgatcacctggaagaaaccccacttcgctgctgcttctttaatctcttcaatcgcgttattgcgcttaatcgcgtcctggaagtcccgtcctccgagatcgatcgttgggatcgtcttgagatgtagcaggtccgagggaagtggttttggggttgataatttgacagttggatgatgaaagatgcgtggaacttgtgaaactccggagtcgacgagtcctttcacacccgttttcgtttcatcgaaagctttaagctcactggcacgatcgaataaaggatcaatcttcatcatctccatcgtttttgtttctcaaatcaaaaacagaacaacaatcacacataaaacaagaatgaaacgtttttcttaagttcaaagattggaccagttgctacagcaaaaccattgtccattgataagagataaggtttattgacaaaaacaaccacgtatgacggtaaccggaccaggcaagtctaagtcaacaagaagttaagttattacagaaagataaagaaaaacaaaaaaaggaaaaaaatagtctcaggatcttttatagacaaaatgatacagaccacaccttatgtggactaaaccgaaataacgattcttaattaatcataaattccacatgcatgtggttcacacatctccaacatgttacatatacagtatgtgtgtgataaagtagtagctagctcgccatgtttcatattttgaaatggagcaacgcagaggttccgtcaagtcctttggcactgaagtaagcagtgtagtctcgaatagtggtctctctgtactttggagggttttctttagacacgagctctctaatgggtccgtacattgtagggtttggtctcatggcggtggtgaagaaacctgctacagagactcgagctcttgttgctctgttcgccaatactctgtgctccaaactgacgaacttgtcgtttgttataagctgcattaatacaaacaaacaaaaaaatgtttgaaccaagaggaagatttatacttctgcaaaacagagcaaaaaaatgtattggttgtgcaaacttgcctgtagaagatctccgatgttgatgattagagctcctggaacatgaggaacgttgaaccagtacccttcacgaagaacctgaagcccttcgatctgatctggaagaagaacggtaagaaaagtattgtcggcgtgctgacttgtgcctaaagttaggtcaggctctggacatggtgggtagtaatggcaaagcatgatcaaacccttagaacaatccatgtcattgaggtgattagggttcaaccctagagcttctgatagaagcgtaaagagaaattcacccaaattcatcacttgctctgaatattctatggtgacatccctgaaacaattcaccatatatgaatagagattacacatcaagtcaagtataaggaatggactcatacctacaaatctctggaatatcttgtggatggatctggatccatggtacaagcaactgtgtctctccaatttgcagctggagaactatagagatcgaaattacttgaatactgaaactttctagttaaatcgcgactgtagaaatctttcctcacttcaggggattgctcgtgaaacccacgaactccatctttcatcttctcaagaagttcgagcgaaactccatggttgatcacctggaagaaaccccacttctctgctgcttctttaatcttttcaatcgcgttcttgtgcttaagctcgtcctcgaaaactcgtcctccaagatcgatcgttgggatcgtcttgagatgtagcaagtccgaggaaactggttcagggtttgcaagtttgacagatgaatgatgaaagatgcgtggaatctgtgagattccggagtcgacgagtcctttcacacccgttttggtctcatcaaaagctttaagctcactggcacgatcgaatgaaggagcaatattcttcgtctccatagttttagcttctcgaataacagagcaagaatgaaacatttttcgcaagttcaaagatgggaccagttgctacagcaaaaccattgaaaagcgataaggtttatagacaaaaacaaccgcttgtgacagtgacgggaccagacaagtgttagaaattaataagaaagaaaaaaaatcgaactcccactaaaccatttcttaaccaaccttaaatatagtcatctaattcaaatcaacgatcatcaaacataattacatccaacttagtttaaatgcatataaaccagcttgtgcgtaatccaattgattaaccatatccgattacactttatttggaccaaaccttgatgacaatgttcaatacataaattccacatttggttcacacatctccaacatgttacatataatgtcatgtcgtatatctgtgagaaagtagtagctcggcatgattcatactttaaaatccagcaaagcagaggtcccgccaagtcctttgccattgaagtaagtagcgtaatctctgatggtggtctctctgtactttggaggattttcttcggacacaagctctttaatgggtccgtacactctaggatttggttttacgtgggtatggaagaaacatgcgacagagactcgagctcttgtggctctgttcgccaatactctatgcttcaaactgatgaacttgtcgtttgttataagctgcagccaacgcaattaaaaaaaaaaaaaaactttgaaccaagaggaagatttcttaaacaaatctagcattgtaaataaacttgtgaaatctgagctagcaaacatgtattgattgcgcaaacttgcctgcagaagatctccgatgttgatgatgagagcgccgggaacatgaggaacatcgaaccagtatccctcacgacaaacctgaagcccttctatgttatctggtagaaggacggtaagaaaagagccgtcggagtgcttacttgtgccaaaagttaggtcaggctccggacacggtgggaagtagtggcaaagcatgcgcaaaccctttaagcactccatgtccttgaggtgattagggttcaaccctagtgcttctgacaaaagctcaaacagaaattcacccaaaatcatcacttgctttgagtattccatcataacatccctgaaagaatccaccaagaacgaataaagagatatgaaagttgcttacgtgttcacaaaggcttttccaaacgcaagtttgaatgtttgcataaactagcaaagactaaggtctaaatcactttccaacagatattacacatcaaataaagttaaagcaatggagtcatacctacaaatctctggcagatcctgtggttctggaggatctggagccatgtaacaatagaatgtgtctctccaattcgcagctgcagcagtgtagagatcgaaattacttaaatagataaactttctgccgaaatcgcggctgtacaaatctttcctcacttcaggaggttgctcatgaaagtcacgaactccatctttcatcttctcaagaagctcgagcgaaactccatggttgatcacttggaagaaaccccacttggcagctgcttctttaatcccttcaatcgcgttcttgtgcttaatcgcgtcctggaagtcccgtcctccgagatcgatcgttgggatcgtcttgagatgtagcaggtccgagggaagtggtttagggtttgctagttcgacagatgagtgatggaaaatgcgtggaatctttgagattccagagtcaacgagtcctttcacaccagtcttcgtctcatcgaaagctttaagctcactggcacgatcgaatgaaggagcaatcttcgtgctctccatcgttttggtctctcgtaagacagatagagcaatctgatacaatcatatataacgaaagcacccaccgacacattacccaacccaccaaaaagtataatgttgacatattactcgtttttcttgtgttccaagatgggaccaactgctagctagcaaaaccattgataaaatataaagttgatcgaaaataacagtggctcgtgacagttcttgtcttattatacaataagttattacgaagaaaaacaaaaatcagaagcatctttattatacaaatgatacgataggttacaatttgcattttaatatgaggtatacgtgtgcatctttaaacatggcatcttgggtaagaaagtcaaaacatgaattttcttatgtatctcaaaaaccaattatttaaagagaaatttcaaaaattacaaattttgaatcaataaatatcaaatgatcgattacctcaaattagtctagaacatatatttgttatagaaacttgatttcaaaactgcatgaaatatttgttatatttacaactgaagttgtagcaatagatttactttctcctatagctttagaaatttagaaaattatattcaatctggctaaaacaaatggcaatcacacatgacacatctgtctacaacgaatattgattttctaattaattagagcaagtccagtgattagtttctaaataaagtttttatgtattttttattaataaatttggatagttttgtagtttagagattttttagagtttttgaaaattttatagtccattggtagaattcttaagtgggtttctaaaagaaaaaaaatttgaaaaaaagaaaattatatgactctggaattaaatcaagattagattgagagagtagataaccaacatgatttttcatgaaagtaaatcggattctgaacttaattccgtatcagtgtaattatatgctatggccaataacattaacaagcttaagtatagcaacaaaaggattcagcattttcaacacaaaactaaatataagtatagcaaacgtgagaaaacactttctctagtctcaccacaccaatgtaacccaaactaaagttaaagttgagaaaatatatacatacagttacctaactagatgtttgatcaaactgaactaaaaccatattgaagttaaccttttgattttatttcaacaagttaacctgaagatgtgtctgaggaagaagcatcagcttctgcttctgtattgttcctcttcattttcttctttctcacatgttctacatcagtaaaaaaccaagtaatcttggagactagatcaaaaatagaacagaactgaagtgaagctgtttaaccttgacattgctaatgaagaagaagagtaaagaaataaactatggccataaatctcaatctgaccaagtgtttgtcactcttgcgtaaaaacaacaacaacacaagagaatccatttcctgaaactgaaactgaaagtgaaactgaaagtgaaagtgaaaaagaaacaacataactcaaacacataaactgaaactgaaaatgaaagtgaaagtgaaacaactcaaactcataaactaaaactgaaagtgccaaactgaaacaactcaaactcataaactgaaacaactcattgattaacataggcgtacacttaaacataaaacatagacttaaaacagacactaaacataaaaacacacttgaaacagacactaaacataaaaacagagttaaaagagacacttagacaaccataatcaataactcactcacacacacaacagaacaaccttttgcatctttttcaacaaaatggatctgataactgctcacatttgaatcaagaaagtataacctttataaaccaatcacagctctggagaacaacagatgcaaacaatgcagaaaaaacactacaaaaacactaatcagtaaaagcaaaaaaaaacttgaagaccacatcatctaatgatttttaacagcttctcaatcaacgatctattgcaaaattcagaacctaaaagcacttacaaatttatccaatcctacatttatgcaaaatcttcccactcaatcaaacaatcttgagcttcaatttcttgaaataagattaagaaccagaaatttaataagatcgaaaaacttgccggaagaagaacataagccagaagtggaagagtccaagctaacaaactcgtcgtcggaagaagacttcgagttcgaaccatcaccaccggaatcagaaggatgaggactcaccgtgattttgattggcggaggaatcgggaacagaaacttctcgaaatcaaaagaaccgagtttgtttttcgattccaatcgactttggagtctctgtaggaacacgaagaaatgagagagaagaagaaaaaaattaaaacgcgtgtgtattttttttggttgagtcaaaacttttacccaataaagtgaagccacgtatgggtttctattgggtcgcgaaaaacccaattttaggaacgatcctaaatggattgttctgtttttctttctgttgagcccattttacttagaaatctaacatagaaacccactaaaaactattgctggacttggtcttaggagaaatgaatcggttcaatggtttgttggaaacttaagaaaataaatttaaaaaaaaaaaaaaacagaatcaggtcaaaattaaaattttgtttaactcgattctttggactttgcaactttaatatgggttgatttatctaaactagagtctttaaagagattaaattcaaaaactattgtattctgcaaagagcaacgtgacatgaaacaattaataagttaaaagttgcacagaattatatgaaaataaactagatgaaatgtagtagtactttgatctcaaactccaggaagtcccttttcgtttgcaatcaaacttcaggaaacacaacttctatcatactttcttccccaagaaaactcttcaaccgtttaacctcgtcatcactttctccatattccagaatctgcaactccttcacttggttcagaggcatggagacatcgagtgggtaaccattcagatcctgaagaagtatcaatcgataaatgtatgttaactgatcaacctctaagttcgtgtgtatatttatttggtcttaggttttgcatacctcgatgatgagagtttcaagctttggagactgtttaagtatatctgcaagcaatttccaagctcgtgttttcttagtcccaaaagataaactaaccagattgttgaataccggtagaagtagcccatatttacagcatgaatagatcacctgaaacacaatcagagtttaataataatgtccaagagtttccaaacgatatagaataaattgactaacttactccaaccgaatcgggagatagactaaggatctcaacatttcttattcccataatgagtttggttacatccgggctctcgacatgttcagccttatcaagattcagataagcttcaacaagggattccaagttaacttgtggatacccatacaaggcgtaatcagagtagtcaaggtactcgagatttggcaggtcaaatgagattacgctctcaaaatgatactcgtagtgaactgatagtctcttgagcgtaggactcgatatggtgtaaggcattgattcgccattttgattgagatataacgcctcgaccaccgggcaaccagcaagaagcacattagacaactctccaaaatcatcaaagaagacgctatggatgaagagaaacttaagagatggaagtgacacatatgaaggaagctttccaagaaagagacgtgtgcctagtgtcagcttaaccagtgttttgcatgtcaagagctgaggagacagaaagtgtaaaccacgatcattgatccttagtaccacttctgaaacaccgcgccctacgacattcgatatccagcggcccacacaagcctttcgttgttcatcgtccctgccaacatgacattttagtgacaacttcctgatcggataatcacactgcaaagctactgttcgatccaccaaatccttaaagctctccggaaacacatagctcgcttcttgttcacccattccagagacagaatcgtcaaactcgagggtatccactaatttaaagagagtcctccactttttagaaagaaccgatgttgaaacagcctgttttgtcgcaagtaatgacaagattttgcccagaatctcgtcagggagccagttgattgcatctctcgggccagtatccaactttttggcatccatagagataaacaacagtacctgaaacatcaagtgattcaactgccttgaattaacacataaaccaataatgtatccaaaaatcgacctaatttcacgaaaatgtataacctagtcgtagaagctcaaaattgcttgaattctctaaagaaggtgagaaattgtaagaacaagagacgttacgaagatcagaaaatatcaagtttccgttaaatccaaaggaatgaacaaaagcaaacgaaagtaacgatgctaaccaaatccgtacacgatgttcaagcggtggaggacggcggagagaaagagacactagtgatcgattctcaagagcaattctgggtaattaggaatttcgttttaaaaccgatcggttatatgtggatatgttaattgaaccgaaccaaacatcaatggaaaccgacgcgtaccgaaatcaatctggacatttagattgatttttaagttgtggataactaccatagtgtttagtcatttgacaattaggtaagtactttgcattttaacatgtgacttaagtacattttaacataagcttttttatgcctctcggaagtcggaaaccagctaatttatgagaaataatatcaaaaattacaacttttataacatttatctaaaaacatgaacgattctctaatgttacgttattacgagatttaaactcttgaatttgcaaaatccgtgttaggagccatacaatcagattaattcatcaagctatatactaaaactgtgctccaaatcctcatgacatgatgcaaatctacatggtcggactatataagtatatataaaccatatattagttttacatcaaaaccattgatataggttgatattattaaaaaaaaaaaaaccttgtgacagtttcatgcatggctttaacagtcataaaagaaggcattacacatataatcaaagtcccaagcacccttattagacaagctaaatcacattctcagatcttgagatagagtaatccagaggtaccatcgaatcctttggatctgtagaactttgcatactctgtaatagtagtgtctctataattaggagggttttcttcagacaaaatctctttgatgggtccataaactcgaggattcgccatcaaatacgagctgaagaaacatgccactgaaattctcggtccagctacattggccaaaaccctatgctccacgcttatgaacttgtcgtttgttataagctgcacccaatgaggtaataaaagtcagatttatattagtccattgattaaccactgataaaaaaccaaaagggttagttagttagcctgaagaagatctccaacgttaacaacaagagctccagggacaggaggaacatcaacccaatattggtcatgaagaacttgaagccctccgatatggtcttgaagaagaatagtgagaaaagagttgtcggagtgtttcgttaagcctagagtaaggtcgggttggggacatggcgggtaataatggccgagcaacagcaaggagttagtgcaatccatgtccttgaggtgattagtgtttaaccctagagcttccgagagaagctcgaagagtaatttacccaatttcatcacttcctttgagtactcaatcatcatctccctgaaaaaatgtccaccaaaatctttaagacacactaatgaataatgggggcgtaaaaatcttcaacgaaatcctagcgcttataactatttgaataagttattattggatttatgtatttcaattgttataaaaatttgttaaaaaagaaaacgtattattggattaatattcgtctaacgagtagtgaaacactattcgaccatatataatttcttcggaccgaggaacacaacatgttacaaaagcaaaaatagtcaaactcgtaatttaacaaatttggaaatcttacccacaagtggcgggtaagtcctccggtctcgggggatctggtgctgtataacaaccaagtgtatctctccaattcgccgccggtgagctaaacagatcgaagttgctgctgtataccatcttactagctggatctcgagagtaaaaccctttcttcacttcagtgtcttgctcgtgaaactcacgaatcccatctatcatcttctccaacacatccatcgggatcccgtggttgatcacctggaaaaatccccatttctctgccgcgtctccgatcttctccaccaagctccgccgcgtgatcgagtccgtgccacctcctttgagatcgattgtggggatggagaaatcagaggaggaaggtggttttggacttgttaaagtagccggaggtgcacgaaatatcgaaggaatctctgtgattccggcgtcgataaggcctttcacgccggttttagtctcgtcgaaagctttgagtagagttgaacgatcaagtgcagcaacttggggaagtgatgactccattgcttttagctgaaaatgcaattgccgttggtttgaagttggatcttaatactacaagttgtcaaaagtttcacgagtcaacgacgaagatagatgagaagaagtacatgtcttagttaaattattcacgtttcccacgtggggaaaaaccgggacaagaaaaaataatgataacaaaaaataggaaaatggagatgcggggtatcgatccccgtacctctcgcatgctaagcgagcgctctaccatctgagctacatccccgatgacgaaaatgtacaattggtcaaaataaattaatatacgaactatactagtatcatattcaacagctcattttgtcacgtttatatattgtatatacaataatttttgttattattttatttttggccatcagcaagacctttttaaaaaatcgcaacaataatattattcaagtattcggatagtggctctcgcgtcgaaatgttttggaagcctgcgtcactatcatggttaatggcaagttggcaacaactacatgaggtaatcctttgtcaaaaataaataaattgaaatctctgataaaaagataaaatatagattctgttctaatacgatatttagtcgaaactaataaaagagtatatacgaactttttaatgtctttgtaatttgtaaattccgttgtagttttgtaaatttaagaaagttttgttgccccaaaaaaaaacgaaattaaaaaggaagttttattcgtttgattattagtttatttagcttcttttatttcacctttgggccttacacatcaaatcaaacttaaaagttaaaaggaaaactttgggccttggcctctgggttatatactcttaaggcttaacccgacggcggtcaactaccggcctgaaataaccggtttttatttttcctttgtttctcttttcaaagtgctcactttcccggtgactctttagtcaaaatttcaaattaattcctctaaggtgccctaatcccggctgctcgtcgggggaaaataacccggcagggattgagcaacagcgtgagtcccaaagtgagagacagtgtgaatcccaaagtgagagagtgagtgttttagcgacagagagatatggccggattaacgagaacggccggtgcttttgcggtaactccacacaagatctccgtttgcattctcctgcagatatacgctccttccgctcagatgtctcttccttttcctttctcttccgttgctcagcacaaccgcctcggcctctacttgctctctcttactaaggtttcactcttcgatttctctcgaattgcaatatcttgtagttttttgaggtttaattcagcaatgtcttttgattcttctgagtttcctggcccgtctctcatacccgaagttgtatcgagtttctttattgcatttcttagagcttctttgctaatttctgagattgatttcagcgatgtctgttgtaacgatttcacggctcaaaactcttgtaacttatgttgatttcatgagtgaataatgaatttgctggtttcgtgtgctaacaaactgttcttttccctgacgagattgatattcatgctgcagtcttgcgatgatatatttgagccgaagctggaaaagctcatcaaccagttgagggaagttggtgaagagatggacgcgtggctaactgaccatttaactaatagattttcctctttggcttcaccagatgatctattaaatttctttaatgacatgcgaggttagctacttgcttgcttaaggtctgttttttcttcttttccatcatgtttgactcaaattagttatcatttctttgtatgtaggaatacttgggagccttgattcaggagtcgtgcaagatgatcagattattttggatcccaacagcaacttgggaatgtttgttcgtcgttgcattttggcattcaaccttttatcgttcgaggtattgagctttttacgtttgtgttattcttgttttattttgagactgaataatattaatattattcaacatgacgtgtagtttgaggttttgcttgaaggacgcggatttgttagctttttcgtcagccacttaattgtgtctaaacatctatgtgaagtttgtttgtttcttgacccactacaatggagtacttgtctaggctagacttaaatgtagacgcatgtataggtacattaaaatatgatatctaatggcagaactctggctggtctggttgaagtgtaatatctagctgtagtgttcttgattgctgcagaaacacataagtgaatgtttgaaagaaccgtccatttcattgatatgtgcagggagtttgtcatcttttttcaagtattgaagattactgcaaagaagcccattcaagctttgctcagtttggtgcacctaataataatctggagtcattaatacaatatgatcagatggatatggagaattatgcaatggataaaccaactgaagaaatagagtttcagaaaactgctagtggaattgtcccttttcaccttcatacaccagattcacttatgaaagcgacagaaggtatcccttatggtattcacccaattcagagaaaacctagagtttttcagagtctcaggtgctagaaaactatgaggaaatagagttttatattcatgatcaggctgcaatttagctgccacttttctcatatatgtttggtaatgtatttttgctgatgattagcatcagtcataggatcaacgttttatcaaagtctttcgatgtgtttgtatgaagctttttcagacttttcttttttaacagttgggcttctgaagatatttccctttttcccttttgtaatgtagaaacgatctactaagaaattaattttgtcggttttttatatttttgtttcattcttatgctttgacactcacttgtcttgtaaggatctcaatgttataataatgcacagaacacatgaaacattgcaggtttgctacataataggaaggaaacatcaaggaccagcaagaaagatacagaagctactccagttgctcgtgcctcaacaagtacacttgaggaatctctggtagatgagtcattattccttcggacaaatttgcagatacaaggctttttaatggaacaggccgatgcaattgaaatgtaaagtctctttttccttagtatttatatatttctgtcataagtattgctagtttttaaactttccatccccttgtaatttgatgtcagccatggaagttcaagttcattctcttcaagttccatcgaaagtttccttgatcagcttcagaaattagcccctgaactgcatcgtgtaatgtcttgcaattttgtattttattttcagttaaatcagaagttaatcattctttcagtgctttgattcttacatcacgacatgcaacaatgcaggttcactttttgcgttacttgaataaacttcacagtgatgactactttgctgctttggataatctcctccgttactttgattacaggtaatctgtactttttgctaattttctctgtttcctaaaaatttatgttaagaataatattactgccgaaatcgtttattgtttgcatgtgactcctgtaaatatccagttgtgtttgcctgttagatatttggcactaggaacgttgtttcaaacatgagctgatccatgatccattgccttaaagtgcagggactgagggatttgaccttgttcctccttcaactggctgcagcatgtatggaaggtacgagattggtttgctatgtctgggaatgatgcatttccgatttgggcatcctaatctggctctagaggtgagaattcattctcccgagagcttctatagctaaaaacttgttcttgacgtttagaatcgtctcttgatagaccaaattgtactttggatagtttactgggctgttggtgaggctaataataagagatgcccatttttgatgtatcttgagtgagttaaccccacactattcttcaccttagatcatacttctgtgtatatacagattttactcgtaggatgctttagaaagttgaaaatttgctcatgcaagcaatgatgtgtttgaggtggggcagacttaatgcgatttttttgctatcaacttcacatttatagagtcttatcattgtttggtttgctcataatatggtttctccttaaccacaggttttgacagaagctgtgcgtgtatcacagcaggtatattctcactttatcatccgctgttagttcagtttatagtacttttggaagaaagtggcgtgtttgacgaattcctgcacgatgtttaggtttatgaaagtttccttaagctgaatcttgagctagtttcttctattgttatatcaccaagttctgcaaagcgatttttagggtgtctcatgggtcagtgcattcttaccagatatgaaaatttgttgtattcggaacatgctagaaggatcacatctctattgtttggctttattatgcaattcataagcaacactaaagcttgcattgtttgaagagacgtttgtacaagctgtaattcatttatgttaattaaaactttttttttttttaattctgcagcttagtaatgatacttgtctagcatatacgctagcagcaatgagcaacttgttatcggaaatgggcattgcaagtacctccggtgttctcggatcctcatactcacccgtcactagcactgcgtcttcattatctgtacaacaaagagtgtacatacttttgaaagagtctttgaggagagctgacagtctaaagttaagacgcttagtggcttctaatcatcttgcgatggctaaatttgagttgatggtaaagtctttacttaactgtgatgaacatagctctttccttatttatttatgatatatctctgatctgtcgtgagaatctggggtatgatttttcatttagaacctggtgtgtctctcatatcttttgatgcacaaagaacctgtgaattatcactgtgctcgcagcaattctagttctttatagtactcgaaaaaatgttaacatgtgagggaaatatatatagaagaatttgtgacgtcgcttatgagaaaaagaaaacacaaaagaaaagtgatgaagcacatttgatagatagataggaagaagctggagcaattaaagttttttttgtttccatagaaaattatttcagcgtctgaattttctaatgagaaaaatgtgatgtatagagaaagaaatcaccagttttcctttggcatgtgtatctatttcatctctttccttgttttttgtcctgtaactagacatacaaagcttgaattttcacgagctttttcattcaaattatttgtttgctttgtttgttctgctagccctatatatagggcattgtcaactaacttagacaaaatccatatacttaagtttctactcttttgatatacgccaaatcaaaatagttattttgttgtaatacagcatgtgcaaaggcctctactgtcatttggtcccaaagcttctatgcgtcacaaaacttgtccagttagtgtctgcaaggtactgaatataccacccaactcttttggaaatatttacatctccgtttgaggtctaatcagttcttgaatattccatgtcaggaaataagactaggggcacacctaatcagcgacttttcttctgaaagctctacaatgacaattgatggttctctaagctcggcttggcttaaagacttgcaaaaaccatggggtccacctgtgatttccccagactccggttctagaaaaagttcaactttttttcaactctgtgatcatttggtctcaattcctggatccgtgtcacaattaataggtgcttcttatttactccgggctacttcatgggagttatatggcaggtaagattgatatcgagtttctgttggaagatgattgttactttcttagaaagctctcctgcattgttttctgagtattgactagcattaactagggaagaattgtttattgcaattttgatgtaggcactttcttccacacaatttccatatacctgtgttgtttcagttgactgtttgctaggtgctgcatattcccattcaactatgtcttagaaagaaattttttgtgaggatattacttgattgtgatatcgcttgttatgaacttaaaattgcgtaaactactagtatatgagtctccctcatgtattccactatgatgaagtatgctaatttataagttagaactccatagcattgtcttcctttcgcttttgatgcttacaatacctatttcaaagatgaaatcatgatcatctcacttatctccacttgctgttactttatctgtgtttccatctttattgtattttcttattcctgggaggttattttaactcatcttatcacaatttcttccatctcctttagaagctaatgcatttcactttaagtatgataactagaaagaccatagtttaatttctcactgctcggtgcaccaaaaaaaaaaacaatttctcactgctcaaacccttaatgttgaagaagtcattacttatacagtttcttctttactgatttctaacaactaaacatatgaacttgacgatttttttgtactttattaattcatttgttttctttagcgctcccatggctcggatgaataccttggtgtatgcaactttattcggtgactcttctaggtaatttcctgtagatatatcaattgcctgttctactctcaattcctttccctctccgggtctctcgctcaccctttctagctctttttctttctaaaacggtctcttacattcgttttgagtgattttgatatatttcttacatttgcagttcgtctgacgcagagttagcatacttgaagctcattcaacatttggcactatataagggatacaaaggttagaatctgttgctcaaggtcatgcgcaccttgttatacatgtctcagtatctcaagtcacaaattaacctatacaaagtaccttgatgatccttcgcaataaaaagttatagctgaatattatgtttctgtagaatgaataagaaggccatgtcagtgtacaaaagtcagaactttcttctattttttctgatcatgttcatatgttgctgcttctactgcatgcagggtatttatttagatcttgctccatggtttttcttttcctatgttgacctattttctgaaccaatgtttttctagatgcctttgctgctcttaaggtcgcagaggaaaagttcttaaccgtatcgaaatcaaaagtattgttgctcaagttgcaactactacatgagcgtgccttgcattggtaaggttccctacctcctatgttgaacatgcactcaagttgcaaccaacaaagttgatccattatctgctctctgtgatcacttactatattgtttaagggttatataaattcaaaacagaggcttcctagtgttctggaattgttatatcttaagttggctgttctaactttgttaaatccattagtgggaatttaaaactagctcaacgaatatgtaatgagctaggaggcttggcatcaacagccatgggtgtagacatggagctaaaagtagaagcaagtcttcgtgaagctcggactttgcttgcagcaaaacagtatagccaggtttgtaaaaaagtcttattggccatctgttttttaagcccatgtgatatatttatttcaggccatgtgctatggcaatgttagtgtgtcttcattttgctttggtactacgttctctacaggcagcaaatgtggcacactccctcttctgcacatgtcacaaattcaatttgcaaatcgaaaaggcgtctgttcttcttctgctcgcagagatccataaggtaagacatggctacaagaaattactagcttgagagcacattgattggaatctgatattccattgaaaatatgttccgccttatcaaattgcaatcaaaactttttttttttttctggaaatttgttccgttccatgcatacatagctaacatccatctatatgttctgaatgtgctctttctttgctgattgctcttagactacatagaaaagtgttgtactatggtattatttctaatcttttattggttttctgaccggcggccttcacctttcgctttcccctttttgggttctcagaagtcaggaaatgctgtcctgggtcttccatatgcgctggcaagcatctcgttttgccagtcattcaacttggatcttctcaaagcatcagctactctcactctggccgagctttggcttggtcttggatcaaatcataccaaacgagcattagaccttttgcatggggctttccctatgattcttggccatggaggtttggagttgcgtgctcgagcttacatctttgaagcaaactgctatctatctgatccaagttcttcaggtagcttttgtgtcttgtactgctttgacgaggatgttcagaacataattgaatagagcctgactgttatggataaaggttgatcttgttagttgcgagtttctaatttgtttactgttgttaccagtttccacagattctgacactgtcttggattctctaaggcaagcttcagatgagcttcaagctttggaggtataacttatgtcaataagagtgctatgtagctttttgttcaaaaacaaacctgagcactatattatcgccacatcattgcataagagatgaacaaacaaacctgagcactatataattgccacaacattgcataagagatgctatgttgcttttgattcgaaaataacaccaaactcttataactaggttcagcttcgtttagctcatcataactctcctagtaccgtgatttactgttggttcacttagtagttgtgtttattgtgcagtaccatgaactggcagcggaagcctcgtacttaatggccatggtatatgacaagttgggacggcttgatgagagggaagaagctgcgtctttgtttaagaaacatatcatagctctcgagaaccctcaagatgtggaacaaaacatggcatgagatgttgtgaaccttatttaataagcttattgtgcaaagcttgtaacttaaagttgtaatcatggtccttaccaagactcgttctagtgtccgaatcttgtcgagattgtgtaacttgtaaccttgtataactctaaaatgtaggagactgaggaagtcatcaagataattgtgaagatttcgcaattgacattttacataacgtctctttctttgtgaaacaagattgtgaatacaatcatgattgatattagtttccattacttgttatcgatcgagcaacattatcaagtcgtttagtgtcacgataaagacaattgagcatgtgaaacaacagacaaagataattactctactaatgacaatcaaggaaacccatttgccaaaaacgtcgtcgttttggaatgaaacaacagctcaaaccccaaaaccgtgttgggacggtaaacagacccctccctgctcgccggagcactactcggcgacttcagatcttctttcagggttcttccaggaattagattgtcaacgaatccaatcttctgaaacaaaaatcttcggatgcgaagatcgattgtgattgtgattgcgttaacggcgaaggggtttcttcatcggcatcttctggagaaaggtaatcttgtaactgctctctcattacgcatttgcaattcccgagctttttctggtaggagtgattaccgagagagattgagaagtgggcttcactctattaagtttaacgatgcacttactttgttctgtgacatggctgagtctcatcccctcccttccattgttgatttcagtagattactgattgccattgctaagctgaataagtatgaagctgtgatctctctctttcggcatttggagatgttgggaatttcacatgatctctatagcttcactactttaatagattgtttctgccgatgcgctcgactctctcttgctctgtcatgtctaggaaagatgatgaagcttggttttgagcccagcatagttacctttggatctctggtcaatggattctgtcacgtaaatagattttatgaagccatgtctctggttgatcaaatcgtgggattgggatatgaacctaatgttgtaatctacaacactatcattgatagtctctgcgaaaagggacaagtgaatactgcgctggatgttttgaaacatatgaagaaaatgggaattagaccggatgttgttacatacaactctctcattactcgccttttccattctggtacatggggcgtctctgctcgaatactgagtgatatgatgaggatgggaatcagcccggatgtaatcactttcagtgctttgatcgatgtgtatgggaaagaggggcagcttttagaggctaagaaacagtacaatgagatgattcaaaggtcagttaatcctaatattgtcacttacaattcactgatcaacgggctttgcattcacggtcttctagatgaagccaaaaaagttcttaatgttttggtaagtaaaggtttcttcccaaatgcagtgacttataatactctcataaatggatattgcaaggccaagagggtagatgatgggatgaaaatcttgtgcgtaatgtcccgtgatggagtggatggtgacacattcacttacaatactctttaccaaggttattgtcaagcgggaaaatttagtgctgccgaaaaggttttaggtcggatggtttcttgtggcgtgcatcccgatatgtatacctttaacattttgttagacggtctatgtgatcatggaaaaataggaaaagcattggtgagactggaggatttgcaaaagagtaaaacagttgttggtattattacatataatattatcatcaaagggctgtgtaaggctgataaggtggaagatgcttggtatttattttgcagtcttgctctcaaaggagtaagtcctgatgttataacgtacattacaatgatgataggcttgcgtaggaaaagactatggcgtgaagcgcatgagctgtatagaaaaatgcaaaaagaggatgggcttatgccaattaagtagacgtataaaagaggtaaatatgagacaccttagagatagcgagttaagggttcaccatcaccacagatgcgtcttaattttaagtttggctgttgtatgatacgaaattggacaaacattaagctaggaggcatgatggatttaatcatattttagatgggaatgagaggatattaaggtaccaaccctcaaggcatattgtagactggtttggtttggacatgtgaagagttttgaagctgaagtgtttggtcactctagcattagatgttgcaggtgtagttttgtacatacatgtaaatgatgtctctttcttacgcacatttgttgacatagagaagctaatatttgcttaagcatgttgtaagctgtaactttagaatttaacctccactgtaacatattacatatgcaatcaggcaaacgaagattcgatcaaacgggtcattgcaaatccagaagtgtgagaagattgaccattaggaaacttataaagtggttcagtcttttacaaattaaatttcctgtttcaaacaccaatcaaatccaccgaattaccaaagatttcatgtttgcctctatccataatggttggaaaattttcaattttttaagtaatagtttgatattgtggggaaaaaatactattctaaacggtagataggtcttacacgtgagcattccgtaactggacaaggatcaaccaaagagaaagcagggagatccatcacggaacattatctttgtaatcaaaatctgatcgtacacgtgtacactatgatgtccactaacagtccacatctgttgacctgacattctcagacacacgagaggatcttttttctttctaacctctaaaatattttaattttaaaataaaataataaaatccgtatatgtgtctatcgttagcttctacagctcaacgaaacacacagttccgtagcagagttttagttttagcagagttggtgaaatcaatgggccaccaaaacgccgccgtttcagagaatcaaaaccatgatgacggcgctgcgtcgtcgccgggattcaagctcgtcggattttccaagttcgtaagaaagaatccaaagtctgataaattcaaggttaagcgcttccatcacatcgagttctggtgcggcgacgcaaccaacgtcgctcgtcgcttctcctggggtctggggatgagattctccgccaaatccgatctttccaccggaaacatggttcacgcctcttacctactcacctccggtgacctccgattccttttcactgctccttactctccgtctctctccgccggagagattaaaccgacaaccacagcttctatcccaagtttcgatcacggctcttgtcgttccttcttctcttcacatggtctcggtgttagagccgttgcgattgaagtagaagacgcagagtcagctttctccatcagtgtagctaatggcgctattccttcgtcgcctcctatcgtcctcaatgaagcagttacgatcgctgaggttaaactatacggcgatgttgttctccgatatgttagttacaaagcagaagataccgaaaaatccgaattcttgccagggttcgagcgtgtagaggatgcgtcgtcgttcccattggattatggtatccggcggcttgaccacgccgtgggaaacgttcctgagcttggtccggctttaacttatgtagcggggttcactggttttcaccaattcgcagagttcacagcagacgacgttggaaccgccgagagcggtttaaattcagcggtcctggctagcaatgatgaaatggttcttctaccgattaacgagccagtgcacggaacaaagaggaagagtcagattcagacgtatttggaacataacgaaggcgcagggctacaacatctggctctgatgagtgaagacatattcaggaccctgagagagatgaggaagaggagcagtattggaggattcgacttcatgccttctcctccgcctacttactaccagaatctcaagaaacgggtcggcgacgtgctcagcgatgatcagatcaaggagtgtgaggaattagggattcttgtagacagagatgatcaagggacgttgcttcaaatcttcacaaaaccactaggtgacaggtacagttcatttgatcaaacacatgttacagttccctaacaatccatttgatgataaacatgttacagtttactaagcaatctcttgtttatgattgtgttaataggccgacgatatttatagagataatccagagagtaggatgcatgatgaaagatgaggaagggaaggcttaccagagtggaggatgtggtggttttggcaaaggcaatttctctgagctcttcaagtccattgaagaatacgaaaagactcttgaagccaaacagttagtgggatgaacaagaagaagaaccaactaaaggattgtgtaattaatgtaaaactgttttatcttatcaaaacaatgttatacaacatctcatttaaaaacgagatcaatcaaaaaatacaatcttaaattcaaaaccaacgtataaaccaccattttgtgtaggaatgtataggatacggaaccagcattttgagatcctaatccttggggccgacgctgaactttgctataaagaacccgatggtatcgagctcagatgacgggtcgaatttctgaaccagttcttcttcaccgggttttaaccactccctgcaaaacataactcggtttgtttgttagaatttatagacgggagatgagagccatctcttcttatcatcaatgcttttatttattgactctaatgggtatatattcttactcgatatatccgtctgggaattcacatcgaccaactagaccaggtcctccgatcctaggatgctgcaaacacatgaagatacattagaacgaggaacaagaacagtttcttagatattctatgtgccatgaacttgacaacgaaaagggtattttacatccaaacctgtggtgctaaagaaagaaatctgtatttatccagggcatagcgaaccacggcctcattctcgctagggttaattgtgcacctagcaaaatggcaaacaaatattcccaggtaagcttgcagtaactctcagttactcatgactatgtgactgaggacatgtctcattatgttgttaggcctcatccgcttaacttggagtcttggataatgcaaaaattcagttcagattatgtttgcatacttacgttgagtatacaagaattccaccaacgcgaaccaattgaacagcctggtccaacattttccgctggtaccatccatggtttctcaaagatacaacagtctcctacaagaaataagcaaattcattccacaagtaccaccctctgaaaagccttggaaacacagattctactctgaattactacaaacactttagattttggtctacatgtataacagtatatatatattgcttcaagaagttactaagaaatcatatttccgccacatagaactgtttaagttaaggctaatccacacatgttgacacaaatactagaatgtgtacatgttaactcgtgcgaattagaacttaataaagcaaaatcacaaaaaagtagaagttcccacaagacggacaagtcttgaatttatcttaccagtccagcgaaaagacgaggtctcaagccaagggcagaacaaggagcatctaaaaggaccctatcgaaactattaggcgggaaaccttgtgattttccagctcttccaccttggcattgagttcttccacgaccatttttcaaccttcctttattcttcctgatgtaagcttggctaacattatcccctccatttggctgttcagtgctgtctaaaacatgggtgataatgggaaaatcaaccttctgcttagtttttgaaaacaactgaaatatatatattttgaatttatatatacatgcataaacgtgagataatgggctacagatgccaatttagtaaagttatagttctgtatttgtttgatgccaaagtgataactaaggtccttgtccacaaaggggtcaggacaatgcaaacatggcaagtttgttgaggtacttttacctagtaaacaaagaggccaccatttcggtaaaaaaacaactaaaccaaacactttgagagagtagcttacttaccatttttctcacatgatttgtcagcctcggatcttctagaagtaacagatgtcatttcctcgtttgatgataattcagaatggctggtcatggaactactattatcaccgttaattaatattgtggactcattgagtgtggtcggaagacagacagattttagtgcatctaatttacatgttgttatgcaggtaaaacccatttcagcagacaagttctggacaaccagcacctgcgttttggaaaacagtaaacaaactaattagagcatgtgattttgcattcccaaccagaaattttgttttgtgttctacgcatataatgtaaatttggcaagcaagtaaacccaacagaaatcatgcctgtttcaataagcattacttaatcataagaaactgtaccttgttatgagatctatctgctgccactatctctccctcatcattcataagtatagcaattgcagtagtcttccctccaggtgctgcacacatatctaatattctctcccctttttgaggatctgtgcaagcaagataagaatttaggatctcatcagttttgtaatactgtggctttcccatcgatatctaggatctactatatttgaattatggatatatgtaaactatatcataaaaggggtgaatgtataagcaaactgtaggccgaaaattaatataacttaccaagagcatgagcaacaataatacttggcaggttttgaagaaatatttccccctcaaggatatctaaggagcgaaaacgaaaatgtatgagaaataccccatgatgaaataagatactaagagtcataaattgtaagctgaagtacaaagaagaatcttactatgtaaagaaggcaatctgaaaactctatggttcaaatccaccgcaattccattaggaacacgaaacatcccagcccttgacaacatagctgttcccatgccgatatatagtccactgcgttcacgatagtaaggatctacaataacatttcaactgttaaagttaaaaacatttcacaagtttcgtagttggcacccctaaaacttatggataatataacactttcaagaaaaaatactggagagaaagcttatctaatacgactggattattgaggaaaactactctttaaaatttgaacgcattccaccgagtatactgtttgactcttttggctgccataatttattactcaaataatagcacctttgatcaataaacaacttaacacgtgaagcgcttaataaatcaaagacctattcttcgggtttcagttactgtgaaacaaagtaatggtcaatcatatgataggttcctgcacttattttatagagaagaaagcaaaagaaacatttctgattcttgcctgttggcagcccctggagagtggtcccacgagtcatattaacactccagtcaccttcatcaccaggttgttccatagcaacacagacagcaaccgcatctcctttctcaacatgggcagtgcaagccagtacacctggcacatagacctaccaaagacccataagagaaattagtacatatttgttcacttaaaagcccggagtttctcagctagattgtcaaaaactataacgaaatacaaccaagatagggattcatattccaacccaactcccagcagcatagtgacaggatagaagcttaagccctcccaatggaatactttaagatcgcataattttaagtatcaatgtgactagccactaaagtttcactgagagagcgtcaagattacctgggctcctctgagaactgcttcagcacacttcctgctcactagtacctcctttggagggttttcaagaccagaatcatattctatcttatgtgggcctgaaccattgacaaagacaacataatccaaaccaggtatctgacacttggtgacgggactacttccatctggttgtactagcttcaagccctcctccgagtcgtttaaaattttcgtaagcttttcgataaccgcatcactcgtcgttttaacagtgttcaccctaatgcaggagtatgaagatgggcgcctaatatggaacaaaaacaaaatatatatagagtcgagcaaaatgtagcaacaataactagagcagacgcaagaaaaatgtgagaaagtttgttaatttagttacgatggcagactacaactgaaacatgtgaaggagaagctaacattggggaaaatgcaattaaataataattcgatttaggagattagagaatgaataagcaataaggcaaagcgaatccagctaaatgcgcctaaaggagggcaatgttgcttcagaagtagatgagaatgatagaaaagtacgtgagagcctttgaaatgcgagcaaagtgatcgggtccataagctttagtgaagtagtcttcaacttcaggattccatcgcagtaccggatcataacagtaacgctccgaatcggaaggacccatctccatctgatgagagatagagcgtgactgagaaacagaggagaagaaggccttggctctggttaagcaagtggtgagggaagagggttttagcagaaccctcgctttactcattcaaggtggaaggagactggagagatagagagagcttcttcaagggaagaaacttcttgggtttttacctttttagagctttaatggtagatgggccatgggttgcaatgaataagcccatatcattcagagctttaatggtgtatgggccttgggttgcaatgaataagcccatatcattcagagctttaatagtagatgggccttgggttgcaatgaataagcccatctcattcagagctttaatggtagatgggccttgggttgcaaagaataagcccatatcattcagagctttaatgacagatgggccttgggttgcaatgaataagcccatcacattcagagctttaatggtatatgggccttaggttgcaaagaataagtccatcatattcatctgcttgtttatttactttgatgtaaggttttttatataaaggtcaaaaaaggttaggtagaagaagctaaaaggtttgatgagagtcttttcctaccaaaccccctctccttgtgatgatgattagcttcacctgccattttctcaatgactgtacccacaggttatataaatggcttctcacatttcgagctccattcctcaccagaccccttttgcaaggttatccctttttctctctctatttcatttgatttcactattagcttcttcatttttgtgagaggctcttggatttttttgatttttgcaacttgtaatggagtctgttcccattaaagtttcttcatttctgagtctttagccatctattcgttggttggaacttggaagagtaggattttagtttgaaatgctcattctccgatcataaagtttatatattttgaatagaatttgtgttcttgttctagtggatgaagtagagaataatctagggaggttgaaattagattgttgcaagttcgtgaatattaggatttgtctcattgggtctgaagttttgtggaatttcttgacagtgtagtttggcagtttgagagtgtttttcatatccgactctttcaaactgatggttttgacatttttgttgaccagattagtaagttattgttgtcgttttgagaaagctggatatggctcaagaaggtcaaaacatcgatgagccggtaatctctgcctttttcagtcttttgtagtgtttctcctcttcatgattcagtcgtaaaccatcatcaaaacttttggaatctggcattcttacaggttgttattggagaggaaaaaggttctgtaagattgactactcttaaccgccctcgtcagctgaatgtcatctctccggaagtggtatattaagatctaagatcagaagctgataatattctcctctttcagatgttgaaagccgtctaatcgaataatttgaaactcaggtctttaagcttgcagaatatcttgaattgtgggagaaggatgaccaaacaaagcttatattgatcaaggtttgattctttggtccttggtctgtttatgattttctactactgtagatatatttcataacatagcttatttgtgcagggtacaggtagagctttctccgccggtggtgatctaaaggtgttttatcacggacaggaatcaagtaagacgctaacagaatcaacatgttttgtcaaaagaacacattcaaagagattttgtcgtaacttaatgatgatatgtcgtttttaacagaggattcttgccttgaggttgtttaccggatgtactggctgtgttatcatatccacacatacaagaagacgcaggtggattttagtatagctccatattttattgtatgaaagtgtcttcttgaggagtattcaacagaatagaattgtataggtgtctctggttaatggaatatcgatgggtggaggtgcagcattgatggtccctatgaagttttcagttgtgacagagaaaactgtgagttagaagtttagtctgcttcacattttatttgcgtataatggcaaagaaacaagtacagctttaactatttctttcattgataggtttttgcgactccagaagcaagtttcgggtttcacactgattgcgggttctcctacatccattcacgtcttcctggtcatttaggttactgctaaaccggtaacaccaaatattggttccagctatgcattggctaatctctaatgtacttgagttttgcaggagagttcttggctttaactggggcaagattgaacggcaaagaacttgtagcaattggaatggcaacacattttgtaccttctggtgtgagtatttgagaatgctttcattggatttgattgattcaggatgtaaatatatccgcaaatattgttgagctgtcttgcaactttacatttatcatctgcaactttagcaatgttgttggaatctctgactattatcctgtagcttgaatgaggacagattctacagttgttctagaaatgatgaatggaatgctttcttttcttattgtcagaaattgatggatctggaggcacggcttgtgagtttagactcaggagatgcggatgtagtccaatccacaattgaagagttctccgagaaagtcaaccttgacaaagacagcatccttaacaagtaacacaattttatttatattgcatttcttcatgcttgagatgctgattaatcttttttcccctctggtgtatatacacacgaagacggtattaactttggggctatggctgatctgcaggcagtcggtaatcaatgagtgtttctcaaaagaaagtgtgaagcagatcatacaagcatttgtaagtcatccgattttcctagaacagaattcattcccgcctctattcatcggtatgaaatataccttttcctcttacaggaagctgaagcaagcaaagacgggaatgaatggataactccagtcatcaaaggtctaaagcgatcgtcacccacagggttgaagatagtactacaatcggtaattgttatttgttagatgagtttcctgttaccatttacttcttggaagagaaaatggttactttcgagctaatgttttgaaaggctttaaggtgaaggctttaggctaacaatatcagcaattctcgttacgttcttgtgaaatatatgaggcgactttcataaattttttccttgcagattttccttttagtgttgaaattgagtgattgttgtgatgtctaaattttccagatccgtgaaggtagaaaacaaacgctgagtgattgcctgaagaaagagtttcggctcaccttgaatatcttgaggaaaaccatatcccctgatatgtatgaggtagaaaacagatgcaaatactgcaacggtttttggttttgtgttttaggaaaatcgtcgcatcatgctactctcactatatattctttttctgattctgtgttataactcgcagggtataagggctctgaccatagacaaagacaattctccaaaggtatgtgtccactcgagaaagcaaaatttgagtctgcttagaaccgagatcgcatctaacatacttacaaacttctatgattgggtttggtgcagtggaatccagcgacattagatgaggtggatgatgagaaaatcaactcggtgtttaagctctttgaggatgatgatattgaactacaaatccctgaaacagaagaaaacaggtcggtttaagggatagtaaactcaactctgaaactttcttttgatctgaatgattcttgaaacaatcccttaggttttgataatgtaccattggaaattcacaggtggggaggcaaatacgagacttcaggctacgcatctgtacgaggatagtatagactctagaccatatatgtgttccaattttaatactttatcctaaaaactgaaactccacgtgtgttgtattgctacataatgtgttgcttgagactcaaactcatgcagcgatgattaaataaggtttatatgtaaaacatgggtcgccatgatataattagagtttttaccaataatagtcaatagtagttatcattttcaaatgatgtctcctccacacaaacaaaactaaccaccagtttaatattagtgttaaggttagacaaaggaagtcacgtttaggtcgttgaaacagccgcggccaatttggacagctataaatttaccccttttatctctcaattttcttctcactatatatctctcctctctttttttcttataatttccagcgtcttgtcgaataaaacaagcaacagagacggagtaaaaaaatggcagactcccttttgcaaaaggccacctctgctcttggtgaagcgaaacaaactgttatggcctctgctgaaaccgccaagaccaatgtcgtcaaggatgcagttgacaatgtggtgtcaagaggcatagatggagccaaaaccctgttgcacggattagaggagaagaaagatgaagtctcttccaaaatcatgggagctgttacacactttactggtagcgctgactcagcagccacaaccgcaaaccgtgacttacccgtatccactgacaatcaggttccaatccaaacaccaaaagaaaacttcatattcttatatctcttgtgccaaaattagttaggagacaagacaagagtctaatactcttattcaatataattgcagccactcctagcagcaggtcgtgaggtcgagacgccatggtggaagaactgttgtggaattcttgatcttctcaaggcatcatcatctgctacttgaagaccaacttccgtttgaagaaacagagcagagaaaaagttttttcaaactatgttctaactatttacttccgttttcttgagagtaatttcggattgtgtgtttacttaattccgcttgctgttttttctttttttcaatcttttgattgttgccaaaggacatttgtaatgaagataagtaagcaaacacacaataaagaagactccaaaattgtgaaaccaatcaaattctcaagcacataacaagaaagttacgtaggaaacactttcaaagcaaagaaatcaaattcataaaaagtatacctagaatcaaaccctcctcgagtggtaaatgtagcagacaacagctgctcctgccactgcaactgcaaccgctgccacagctccaccggaaccaacagcagtcacattcggcgaccatgacttgaactcaatgccattcagtggctcctcaaccacattcttcaatccattgatcatcttctcagcatcatccaactgtttctgtaactccacaatctctgattccaaagccaccactttcttctctgaatctttcaacgaatcttccacaaccatcttctctgttatccacttctgcaactctgttttcccttttgctacatctgattccaaactcttaatcttctccttcaaatcatgaacctccttctccttattgtcaatcttctccctcatctcttcctctgcacggaactttttgttcttctcatctaactccttcacctccaaagcaccaagctttgactccaattccttcattctcttctcattctcctccttgacagtccttaaaccagcgacctctttctccaattcctcaattccaccacctttctgtgaaatctcagacctcagcttctccgcctccgccgtagcctcttccccttccgtcctggccgtgatcagttcatgctgcagccgtgcaacttcggtctctaactccgaagctctagaagctatggcttcaagaaccttcctctcctcatcggacttgtcaatctctcgctccatctcacccatcttacgcttggccttggattcggctcctctcaactcctcaatctccgccgtcaagctctcaattttacgattgatagcatcgttatctctggccagttcctgattctgagactcgaggtctccgatcttctgattgagttccgtggacttgccgtcgtcgccttgctgatcagaatcgaagaaactctcatcatcctgaccagtcgcttcgccgttcaagctcctctcttccgccatctccagcaacagcgagaaaaaggatcagaaaatggaatcgaaggaggaaagtgataaaccccaaggaaagtttcgatttttctttttattggaaaaaggtttcgacttttctctgattctcgtaaaaaattgggtgagagataaacaaaaaaaagataagctttaactttctgcgattcgatgcaattagggttttgggcacagagcaatgttaaccgatcaagtctgatctgatacgaatggacggcttaaaatcaaaggaaacagtccgatttggtaatgcaatgattcggatgaaataaagagtttaaagtttctaagcacgtgtacactttatacggttgattatttcaatagaaattttgattgtttcaaatatacgaatgttcagctgtaatcatcgtggatggttgtattagaattaaccaactaatcatagtaacttttttaagattaggtttatgttttgctaaatgtcaaacaattcaactcgagaacatataagtttaaagggtgaagtgtttgtgagtgtttcttttcttcctagaatgtaacattttccgatttacaatttggacatcgattatagatggattcggatcccaacagaaatgttaaagagatgaaaataaaatgatccgggttgtttactttagtattaaaaagagttcccatagagtaaaatatttagaagtgttgatttgggcttcttaaggcttttactgcaagtatatttaattttataaagggccattaaattcggtacgtgtaaatgattgggaaatttcagaggcccagattagtccctgctctctagttagaaatcttgttcgtttattaattaatgggcttacatagaaatacatgacgaatatcgtcgcttcactttgataagaagaaatgaagaatctctcaaccctacttaaattccaaaccggatcaaaccaatatttttagtttaaccaaaccgagctagaagtgactgcgcaaaaataaataccatgagccgttttctttttgtggtctatctacaacttaaatgagctaaaatgtacaaatttcatttatgatgaccacaaatatttttcagttatttctcatacactgcaagcttgaaataatgtcccactgtttaaattccttgttatcttgaaatgatgagttgttaaatgttataaattgtgtggtggttgtgaaaatctgtatgtttgagccaaaagcataaagtgcatgatataagaacgtagaaaacccacccagaaaatgaaaaaaatggtttgggataggtatttaagcaaaacattcaacgaaattggcatgctcttaactacctcaccaattatatttttttccgcaacatctgcatgcacgtttctcctccattagattcttaatttgttcaaatttattttattacttcaagaccaataaaataataaataaataattggaaaaaattatagtcaacatgcattttctcgttagtcacctacccgaccagtctcactaatattgttgcgtactgattgaggaggaaactctgttttctcgtttttgtattgggcggcaaaaaattcaaaagtcgttgatttgaaaggaggctttttatgtttttatggtttttaacataggctttgaatgactagttaattagtcaaacgttcgaaaactatcgttatatgaatggtgttgttttaataaatggtattaagttccatgtattggttgatgtcacaagtcatgttccattggctgtctactgatgaccaatcttcaattggtaacaatatatttcgtgtttttagtttcctctgcgcgctaactagaccggatcaaaaatagttaactttacgcaacaacactaattgagactcgattttgtattctttcatcatctctaactcggtttcggacatattctatggatggcatcatggaaaccacccgaatttaacacacgttagatcgaatctaatttagatcattaattatatatagtatacatatattggttgatgtcttgatgatacatattcttcaagtaaaaatgaagaagatgtaaagatggtgatgattattgtctttaattaattactgtgacatatggatctaatttaagctatagattctagaacataaactaaatggagacttcttcagaaattagttttctcttattttattttgttgacattagtttctttaattttttgtggtgaagtcttgacgatagcatgcataggtatccttttttggtaacacgctatgtacgtcggtgcatgtcttcaatacttcgtggtgttgacttttcgtggtagggatctatctaacctcataggatttttaactgatttgaattatgttatatcatttatatgtatttgtaaattttgtttgtctcatgtgtaatcaatgacaataaccaaagcggtagtaatatattcacaagtaggaagaataaaaatcgagacagtccaaaacaaatgccagaaaaagaaaacacattgaagaaagagggtatggatcgacgtgatattttaaaattgaaatattcgttacgtgtacgcgtaaacgacaacgattcttttttgatgacgatgttatccatttccatgattcgattaccttattaatatattcactcatgttatgtgactatctctgtatctcagtatgtctccgtcgatacgtagattttaggttttgatgcgtataactgaggaaccaattgatataagcaaatcaacgtacgtatgttttgacgtgatgaataatgatgatctgagttgtagtttttacattaattatataaatatattattcatatattctttagcaataaaaaaaatttaattggaaaaaccagcataatacgaaatgaattatgatacgacaaaacttatcatatacatataatacaattatacatttcacgatctatatataggtaccggcctaacgagggagaaacctaaatatgtagtgtagaaaaagagttaagatggcataagagagtaaaaccaaaaaagtgtagaagaaacctaaattacgaggaaaacaatgaccgggagaagagaaagtcaacgaagaaatggaaagttggtagaaagaagaaacctgacaacagagagacgcaattttcaaagcataaaaatggacgatgctgaagggtaaaaaggtcaaccatgctcttaaacaagttttaagtttatgcatccaattcacatttctctatgccttcatcaatttcatttactcttttgtctgaactgtcatttattgtttgacttttgcttctactattcatttatacgtcgacatatttgcttctttatttatcatatatagatatcatgcataagttcataactacggaatcacgaatgcatatggattgcgtggtttatataatgtgtctaaatattgaaaggtataagcaaaatttatgtaaactacatttactttagtaaaagtcacgtttacaatggataaaaaaacaaataaaaaggataaattatcatcgaattttcgaacatacaagagttgcagtacattggaagatttaatgatgtttggttgtaattgttatggttgcagacagagagatatgttagtttcttctgacatcgatatgttggtaattaatttatctcactaagtttggtccaattaattagcgaaactaatgagcatgtataggttaggttggactaattgtatatattatgattttgaactgtacttgcattgcagaagttgtcgctggctttaagatttgaagttcggtagtgacttgtctcatttattcgtaaatgtcatgtctattggttataaacttataatcaatgctcgtacggaaaacaagtgttagccgatgtcaaacgaagaaaaaaaataaagttggattaattttcttagcaacatgtgttttctccttgagtaattccaatgtcaagaaatttgcatttccgattacaaatacaaacaaacatttccatctattcacaatagttttttaaaaaatcgtgttgccatagatattgtaaacgtttgtttggatgcactaattacgatcattcaatattttcataagagcaacacaacttgttttaaaaagtcaaattttcagtttcattctttcagatgatgtgtgatgataataaagatctcctcatttacgtcaacaaagtttactcaaaaaggaaaaaaaaaacatagcacattgaaaagtatgcaaatttgtataaagaagagcctgtcaccaactacgtaacctaacttgttaaagctcttccatatcttggagttggcagaaaaaagtgcaatctttgaaacttgagggaaaatcaacctataaaacatgcgcgttaaatgattgacaaaaaaaatacaaaaaaacaataacatgcgcgttaattctaagtaatcctgttcacatatggttgtgttcctgaagacatttggttagattcgagaaatatattagttttgtaatctgcgattaggttaggatcaaattaactgctatccactatgaaagtatatatatggataacggttgacttattgagactacgttataccttttcgttgataaaattattatgtttatctgggataagaagacattttgtcttaaagataatggcaaatattttcttttcttttttcttctaactgatatgtttttgaatgattgtagtgtaatagattagtatggttgacgtgatttatataagtaaggaaaaaaacccaaatgaaagatttttcaattacatgattgaattttctaacctacttcctctctgaagatatgatagtcaaaatattcataactttttgtgataataataattgaaattcttaaaaagagcttaactaaacaaattatataaaactaaatacttaaacctaatgatgaaagtaagtttcatatttttttttgtggcctagggcaattgctttttttaatttatttttgctaacacatgcagcatggctctgccccaaagccctccaagtggaagctgagaaagcaacgcaacaacattcaacagttttaataaagcggccaacttgcatcattcacaacataatactagaaagtgtcttgcgtacttgcgtagccgataattaataaccttggactatacggtactagctttattatatttatgtgtgtactataaggtaatgtattgtttcattctttatatatatatcttgaatttacgtatgctaaatatgtataatcatcaaaaccataacttcttgggaacaaacaaaaacacacattctaatttcaagtgtagattagataaaaactttatagacgttgtgtcgttgagttaatgcgagagagatgtgtgggttaaccaaaattaaaatagaaaagaagaagttaatttaaaagcaaatttttttaaaaagggtcaaccttcacaccacctttgcactcgcctatcatcatcactcacttatataaacctcctctgttacttctttgtcttctccaacacatttacttttcttcttcttctctctctacgccatagctatggttttaccagagcttctcgtgattctagcagaatgggttctttaccgtcttcttgctaaatcatgttacagagctgctagaaagctcagaggctatggtttccagttaaaaaatctcctaagcctctccaaaacacaatctctacacaacaattctcagcatcatcttcataaccatcatcaacaaaatcaccctaaccaaacccttcaagattctctagaccctctgttcccaagccttacaaaataccaagaacttcttctagacaaaaacagagcatgctctgtttcgtctgatcattatcgtgatacctttttctgcgatatcgatggtgttttattaagacaacattcgagcaaacacttccacacgttcttcccttacttcatgctcgtggcttttgaaggaggatcgatcatcagagcgatccttctcttgctctcctgttctttcctttggactctgcaacaagaaaccaaactcagagttctctctttcataaccttctctggtcttagagtcaaagacatggacaatgtttctagatcggttctaccaaaattcttcctcgagaacttgaatatccaagtttacgacatctgggctcgaactgagtactccaaagttgtgttcacgagcttgccgcaagtgctggtggagaggttcctcagagaacatctcaacgctgatgatgtgattgggactaaactgcaagaaataaaagtcatgggaaggaaattctacacaggcctagcttctggttctggtttcgtcctgaaacataaatcagctgaagactacttttttgatagcaagaagaagcctgcacttggaattggaagctcttcaagcccacaagatcacatcttcatctccatttgcaaagtaatttcctttccttcttaaagttactaactttcaattttgtttaagttttctacaaggtcatatctgttacttttcaaatttcacaaaaatagattaaagtttagaacgtcttcttttgttctgaatctcccacacaggaagcttatttttggaatgaagaagagtccatgagcaagaacaacgcattgcctagagaaagatacccaaagccactgatattccacgacgggagattggctttcttgccaacaccattagctacattagccatgttcatatggctccctatcggatttttactcgctgtcttcaggatctcggtaggagtctttcttccttaccatgtagccaatttcttggcttctatgtccggtgttaggatcactttcaagacccataatttgaataacggtcgtccagagaaaggtaatagtggagtcttgtatgtatgcaaccataggaccctcctcgacccagttttcctcaccacttcgctgggcaagcccttgaccgcggttacttacagcctaagcaagttctccgagttcatagcacctctcaagacggttagccttaaaagagataggaagaaagacggtgaggcaatgcagagactattaagcaaaggagatctagtggtttgtccggagggaaccacatgtagagagccttatctactaaggttcagtcctttgttcgctgagttaactgaagacattgttcccgtggctgtagatgctcgagtgagcatgttctatgggacaactgcgagcgggctcaagtgtttagaccctatcttcttcctcatgaaccctaggccggtttattgtcttgagattttaaagaagttgccaaaagagatgacttgtgcaggaggcaagtcaagctttgaagttgcgaatttcatacagggagaacttgctagggttttgggatttgaatgcactaatctcacaaggagggataagtacttggttcttgctggaaatgaaggcattgtcagataaactattccgaattttcattagtttttttgtttgtttgaaaagctaaatattattgttatttcaggacttagatgtttaattctatatggttgattcattggcatcatttctatttcttatcactcgggaccattgatatgtattgaaaatgtttgctttatatgattttgtttctggatttgtatagtccataatctcaacctgtcgctttagtgccattaattttattcctagaacaaatgaaatgatttcagagttagttgaaatcaatattaattgtatacatctaatctaatagtatgttattcacttattatttacttaatgatgctcctaagtattgatatcacattaataatcatgatcccatatcacaacaacattaacgtgaacgaccatattaacttcatatcacatcaaaatttaatgtatcaccttagaagatattaatattcacaccaagaaaatgactatacctgtctaaacagaatgattaaagaaaggaaaattgctagattaacttttcataccaagagtggcttcctttctttagttcactgcgctggtaagtaatgcttgaagcacactaactgatgtttgcctctttgcaaatgatatttgcgattctacacaagcaaaacaaaacttaatggactgagtaattctgcagtgttagaagtaaaacttagtgatgctttgaatgcattacctttccctcacacgacgaatctcttcaagaatttctgcagtctgctgaaccttaagattcttgggtttatcttcatgattaagcaccaaggatgcaacatttacaacagtaactagttcagcttcgattctgctaagtttctggtctaaattttccaagaaagattcataagaagacacttctttcaggatgctacctattgaaacatcttctagtacattattattggtatcaagaagttcttggtaatcctcaacattcctttcaataagttgaattccctcagaatccaagtgagtgtggtcattttcgaccccgtcttcagtagattcgggctttggcgatacaatgtggataccacctgaagtattctctccatcctcttcgagatccaaagatatattgcctatcagctgtgtttccttgacagatattgcctgaaaccaaaccaagctttcaagacatagttagatagatttctggggcaattgaaaacaaacaaacaaccaaaacaataacatttcttaacaagtaagagtattgtttgtttgtacctcgttaagtttggaagaaagcgtatcgagcaactcgatacgagctttagccttgtccaaagcttgcataacttttttcttctgaagaagtagatctctggcatcattctctttccctgttcgaacattgacagctgcttgttcccgtagattctctgcagcctcagataatctcaaaagtctcaacctattactgtttgctggaccaacaacaacaaagaccaaaaataaatcaaattgacatcatcaatcactggattcacaagcagtaaaaccatgctgaaaccagcacctcatctttccaaagtctacgactttgaaatcacacattaaaacgaagattagcgaataaagattccacctttggcacgagtggactctgcctccgcgtgaagccgatcaagctgggagcgaagaaggtcagaatttgcggtggcagagaagcatctcaggctcgttggaatcctccgagactgagcaatcaccaccggaactccgccgatggtcgtcgtcaccatgtttggtcttcttacaaagcgcacacgttctgtgacattgcagtctccgttatccggttagttctacaaaccgattttgaatacctggttcatctaaaccggtaattaagactaaaccggggtgggaaaatgaattgaggatgagattagtatttaccgtgacagagttttccaactttgacgtctccgtcaaaatttgatttctcttctgtatttgacgacgacacttcaatcaaaatctggagtcagatacagttccctagatcgagaatctccaggcgctttgtaatcctgtttagtatatctttgtcaagttctctgtcagagatttaccgggtaaattttgaatcttggatcaggtttttgtcaatttcagatttgtaatctcccgcttcttactgtaggaatcgatcagaagatatgaactgggttcaacgcaaaatctacctttataatgtcacattcgggctctacatgcttgattggtgggaacgatacctcttcagtatccttttttcctcactctatccctccatgcttcattcgttctctccatcgattttggtttatctgtgctccaatttcgatttaccctttcattagaaagatgcaagttttgatttttacatctttggtgatatatggtggcattgtgttctgttctcttgtgttgtcgtcttaagcattgtgtctgttcaattttagaattttgtttttaaaaagctactttcttaaaattttgtcttcaacttcagagtttggattatagtctctactgaataatatactgtcaattgagataattttttgctagtttacaaggacttaagatctttgcttgcatcttctttgcctttcctcaactcttttcagattctttggtggttgttttgatgtggttcgttttatacaacggtactcgctacttttcggagcttttccagaggtaaaacacttgatgatgctctttgcgcacaccttaagcttgttaaggtttccttgacactaattttgctattgttgtaacaatttttggtacttatctagttctttttgctactttggtcttatggtttcattagcgggtttctaagtgatgagtgttatgatacaatatgctgtttggcctcatcttcatctctgaaacaagtttcacggtttcccatgattcgtagtatatgttttcacaaaaggataagtccatcatttacttaaacattatcctaccttctcttgtgcatttagttagggtagatattaagcctccccagaaggtgattggattggagttagagaagtctttagtttgcctgatggacttactgctgctgcttgctatctgaatcttattatgctgattgttcgaaacttttgagaagcaattgaagctctttcatgataatttcttgtatcctcgcattgcaggcatttgacatgaaaacatgtcttgtttctcgcacagtagagcacgaaaagcctagatcatccaaaggcatgtacgtttggttccaatttctgagacgtataccagcaaaaatccctctttcggcgtcacctctgtttttgttaattttcctccaaaggctctaggacagttcttatgtctctatattatttgttcccatgtttttgcaattaacagaaatgattttgtagactcgtaagatcgcaagtcttcctgttgtatttccagttcacttagagacataataacatagttgcaggagttaatgaacttgcggattacatataacagagcataatttttaagagggagctctgttctaaatctacaaacgaacttaggaagaatcaggggtaacccaatcctttggcattgcagagttgaagatctgaaacagcaaagcttgatctctcttgcctggtctttttgaaccaaatccttgatgcagaccaagttcaaccgcttctcttccttcttccgctattcttttcctaatagctaccaaagaattttgcgtctcatcacaagctgctacatgtccattttcagtgttctctcctccaccatcttctcgtccgcctttctctgcccttccccaccatttgtttgacacagttgttaacccgcctgatgggaatccaaatttgaactcatctacagctgccactgtctttgccaagttagtattagcccatacatttgacttgccactcttgtttcccccatgctgcaccgtcgaatgcatcatcgtgtgtgtgtcctcgggttcagattatgttacgaaccactgtaattaaaagaatcatgaatcaaagggaaagaaaaacgatactagtaagcaccagttttaaccattatatcaagaagaagacttgaatgttttctttttgaacaaaaccaaaccacacagagaagagggtctcgcaaatatcaacagtacaaagacataatacaggaacgttgctacatctgtgaattagacccagaagcctctagaatcaaaacatagaggctcaatacttcctggaatcaatgtgtaaggaactagatctggaattagacagcctagataacagttccctaaacgactcaaacgttatgaatttcagaaaagtccagaccttttccaattttcatctgtataacatacccaattgtggcactaaaaccctaatttcatgcgtctgataaaactctctgcattgaatcgaagattaccttcttcttttttcagagagcgtcctctttggcgtaccctagagcgaaaacaaacaatccaaacaaggaaaataagaaaagcctagagctttagatgaagtatcaaagtataaaacactcggtagagaaaccaatcttcagattttcgcaaatagataacagaggcaatgcatacataccaaaaaggagcttcctttggtctatatggattttctgactttctcagtgatcttcttcaatagttggttttaagatgttttagaacagtgacaaggatcgaagtgtaatttccactgacctcaatacattgtttaatcatataaaagagacaacgaaaaaaagaagaatagagtgacacatcttttgttacatagacagattaataatggttaaaggtatttgtatcatgttcaagtccaaaggtaataatggttaaaggtatttgtatcatgttcaagtccaaaggactcttccgtatggcctaggctgaagaacaacatttactatgagtatgaggtcttctctcagtctcaggtggtctaaacattttttctattttctcaaagacatatctagtaaacagtaataacagatgaaaaagaatggagatgaaagaaaaattggacaagaagaagaagaagagagcggtttgagcctcactacttggtggaaggtgtctctttgtctttctttccggcgagaatcatagagatctgcagaccgcgactgaaggcttgattaaacagtaatctagtttggaactcagacacaaatgggaaccacgataagacagcaatgggtgtgaatatcacaagccccattatatactcgtaagctctccctagctctttcaccgagtcccagaatcctaatcctttgaacacgctacgcagcgcttgcccgatcttcaaaacatagcaacggattacaaacttatttttctcatggaaagaacagattatttatgggcagttaagaaagttgtgtgggcttacaagaagaatagcccagccagtaggtaagaaagcgaggatggaggcaaagagatccgagatcgtgaggccgcagacgacaaataatacagtcatgactgacaagaaaccaaggaagagaagtgccttgagaatcctgaacataacctgaaaatctgtaccaaacttccgtctacccattgataccatctgtcaaatgattaaacgacacaatcataaatgtcaagagacaaacaaaaccttttcctaaaacctcaaagactatctaatagagttggctgaagattcttttctggttttgatgtgggtaaaagcttaaaacagattagtttcagggccttacctttagcacgagaagaactgacaacaagatagcccaagagagtccataaaccttagagaagaaaagggcaaagttgttaaaattttcaaagctatcgaagagggaagtatcatggcttatatgccgaaatactttaccagaaatgttgtgtggcggcgagcgatgttgaggtggtagacaattccatactggtaaaggagaaaacgcagagcgagaagtatctctagaacccttcctcttaaatttgtgtgcttgagatgttcttgctctatatcccaccatgattcccaacttttgtcaagaacaattcctatgccaccgcggtttcccatccaacgtttccagtcagtccaatcgtccaccgtcttttgccactcaaacccagatgggttgaatataaatggagcaaacaaccaagaagtcaccaggaaccacattgaaaatgtgatgtacatataagtacttgagctacggtacgaagttccataaacttgatacacaactagtagtatgaccaactccagtcccttaacaaaatggcttcgcgaatatagtctatagttttctgcaaacttcgcatggaaaacaacaaaacctcgaccagttgctcggtacttagagcctccatgcaaaatcgtccttccaaagtaatgcgctttcgttcccagttgaaacgtgaagaaaacagaggcaagctgcagctgcattatgatgaaatcacccaaggctgtgcgaaaccctttttctaggccaatttccataaccattggtagaaccatcagaaaacctaactggaaaacagattgggctgctagtgcctgctcaagggcattggactcatgtacacttgcactttgcaggatgtttttttctaatccgctcaataccagataaagacgcccataaaggaacacatataccgtgagcaccgttatctgaaacagagaatacatgttttaaaaatccaagattccaaccaaagtatagggcagagctacaagaggaaataactatttgaatgagaaatgaggcataccatactactgaaatagaaaccaactgtggtgaagtagaatgaaagcatcctgtaaaaatcaaaccggcgtccaagtcggtaaacgtcacgacttagtgtttgttctccattaccattcgcaactttggcttcaaaaaacgaaatctgattcatccctacatcacgacctttccctgcttgaatatactcgtgatgtgtgacgtaacccccacgaagagttgaattgtaccctggatgttaccatgatcagccatcacaaatacaccaaaataattagaaaacaaaaacttgtcaagatcgttctctacctgcaaagatatcttcgcttaagtttattatctttgaagccttgctaatgcctcctcttgtgatgtggaagattctatcaaatatatcaggatggccataatggaaacgcaccctgtaaaagaatcgtgggtaagttgccaaagaccaaagctagtcttctttccataacaaaaagattctaactataatatagtctattaggttcaatgatgcggggactgctacttttaaataagatttgaagctacaaaggaaggattggaaggatcttttccctagtcacaagatatgaaaatacctcagaggatttgccagaacacgttggccaatggttacaaaacttgtttcttgattcgacatgaaccaagcaagtgaagaaacactgcgaggtcagaaagaagtcagatgagaaagataaagaaaactaaataatatgaagaatctcaataaaaataaaaaatgtatgaagaatctcagaccttccagtaaatatgtgttcacgaagacccaaaattgtaggatttctcttgccacgtcgaccttcatcaaattcttgtagcacgtttctcattttgaaacactcttcaaagtagttgtcctgaaatggaaaaaggaaatgaaactatagttggaatcaataaaatggttgagggatagagaggtgaaagctacctggttcatgtctatggtctggagtgcttcaccgcgagtgaaaatgatggcatggttttgattctcgggttttccttcaccaatttcagtgggagggccgggaagtttgatacgatatatttcctaagaaatcaaaatcaaagttcaggataaataggtaactatatctgggtcctatgtgggactggaaataaataagttttcctttgtgacctaaaaccagtaaggaaggaagtgggctacgaatgtatgaacttaattattataaatttcctttgcatacctcatccaatttgtcacatcctttgagtagcacagagtagaatactttctgtgattttccattaactgtctcctccctttcatctatataggcaacacgcaatgacggatacctaaccataatgtataattaaaactaagctagaagaataagcatatgaagttttgatttcaaacaagagaactttcttactttagcatgagctgtaaaatgttattgtaacaactccggtctcggctttcacttgactttttctggttcccatagacctgacaggacacgacatatgtaaattttaaatctgcaagagctcgtgcacggtcactaaaagcctttcgatcatcttcatttgattctgagggaagatagccaccattggtagctgcaagaagaaaatagagttcataaaacaatcttcttcacaagcaagattaactttgacaactaaatgaagtagtggaggatacttaggcagagaaggccaaaccacaatatctgtaaggttaaaacattcaatattgagaatgaaggataagttcaaaccgttttcttcagtgtattcctggaaacattgaagttcgagagccactctgtagtacatcattcccctaactagaaatagtgaggaatattagcgatcgcagagcgagtagaacaagtcagaaaatcctacaacgttctgatagtatacctgtccttgaaagagtctggcctctataagatacccattggcggagttgctctgccttgtctttctcagataagttgcgtttcaaatcatttacacgttcgcaatagtttgaccattcctctgttatgcagtcattttcattcagtaaactttaaatttgttataaacacttaaaaagcaccaaatagaagcttaccaggatatatcctctgtaggtaaaacaaaatagttattccatcttcgttttccttgttcagttcttcctccgaatagagaacatcctctttgtaataaggagttaagacactacacaaataatttggaaaacaattgttacttgctttcaagatcatctaaaagttgtattctccatgaaccaactgaaaaatagaagaagacttggatcatgtctaactcttatttatcaaagttgtgattcgatagcatatttcttcaggtagtaagctaaaacatgtacctaaaggataacatgtcacgaactcggggagcatctggcatattcatgaataaggaatttgcaaagaatgtcatacgacgacgagcttccaaactttgagggatatttattgcggattctttaacagtcaaaagtaacaaaagtcttacaacctacaaaattagaacgaaagaatgagatccaaaagcaggagatatggctgttcacatcagacaaaaaacaattacgtaccttttccctccaggatatgttctgagtcaaactaagatctatcttttcaaacctttgttctttcttgtcgctttcaatatcaccactctgtaaatgagccctttcaaggattctacaggtagaatgacaaagcatgtttcatggacgagtttttgggcttacacatttaaggattgttggaaactagaaagaagaaaagcagaggagattttcttgcatagaaaatgaggcaaactttttacatatgaactatcaagacttactcgtgaccgttaaccatgacatcctgggtgatgatttcaataatatcctggagaacattgataatctgagacttgtaatcatcttcctcataatcacttagctgtcaacaggaccaaatttaatttagagagggggagtgaattaacataaacaaatgataattattggcattgaacgagaaaaaacaatctatatttacattaccaggatttttaagaatttctctagcttgtcactgagcaaaggcataccagtcatccggaattcacttaaaaatctgtgttgttggatgctaatatctacttcgtagcaaatctcccttacaatcctatatagattgggagacagcagtagtatagttagtaggccatccacaattagatgttggggccaattttaataatgaagtggaaaaaaaaaaatactcacctcttatcagattcatcttgaagaaggccatatattatgtctctcacggtttcataagcctcaaccactgcgtaatgcatatagtattcgcttttgattttcttgaataagtcaacgtcctcttttcccttgaaatctttagccatgtctaatgctattggaatctgttaccaaaaggtaaccacaattcagcaaagaagagataattgatggcgtgaagaggttattgagagagctgtcttatttaccttgctagcaagcaagaaaggaggccattgcacaacagtaacatctccagaagacgaaggtacaagtagcaaatctctttccctacacatcaaagaagtaaagaacacgagtatgtttatgaaacgaacttagaaggtaattgtgatgactctataaaagagaaacaaaaagtcctcaaacctatcgctgatcagatcttcatcccgcatagtatgtatgaacttattccacatctgtgagaacctcgcaatgtctttttcgtccaccgtttcgtcctgcattactcaaatgttacattttcacccacaaaccgaaacttgttggcgtacactatcttatcaattaaatttgtatgtgtggctaataccaagtgctttctctttgcatgacctagaggtaacggtgtaagtttagaacagaaagcagatggaacaactttaaatctggaccgcaacattccaagtgtgcgtatctgcaaaagtaaaaatggaggttaaagaagaaaaatatacagaatgttggggaatcacaaacttgttgtcacataagattttcatttataaaattttccgtactaagagaagtgcaacaattacctccccgagatggctgaaggctccatatatccctccaaaaagagtagagaatatggcataccatatttgcgtatccataaagtaaacctaaatatgaatcacaaacttcagggtattggaaatattcttttcaagttaatcaacacagattacttaccaagacaattggaccccatatggcgatgattaccccaatgttatgagtggctgcatgaatatcatatattctgttaattaaaaaagtagttgatagccatgcatgaggatgctatgagtaaagatcactaccatttggaaagaactcatgccactcgtaatttacgacatgcatatcccatattaacttagttgggttgacaagtggtaatatctgtccaggcatcatcaatagtaaatgttaaaatatagcggcaacaaaaggatgcttatagaaaaggcttagatgataattacgactacaacctgctcaatagacatcacaaagtgaaagattatgaaactaaataagggtattataaacggtaaacatgagaatctacattcatcagtagaaaaaaattgagttataagtttcagcataagatgctaattcacctccacatagtagctgaaagcgagcttgctaagtaacagcatgacccaaaagaatgtatacctaagacatcatgaattgagcagaaatattaatcatttggaagcatcaacaaagttgtgaccaatattatcataccatggccaattttgcagcaataaactgtttgaaacaataagaacaatgcatccagaaaagaacagcagtttgctgaagtttctctcaggatccaggagaaagaggattataaggaaaaattgagaagaaaactacaatgaataacatcatttttgcttacttgaaaagtgcaaacatttcttcatgcattcctctaccaatatacaattttggctgagcccaccacatgataagtgtgacaatccgcatgtttgatcgctccatgattctccgcagaggtggaagtaagaaaaacacagcagccaaaatatttggtaagacatacaaggcaatagcatagtcgtataacgaccggtgaagccaactcccaacccagctgctgaagaactttattagtccagtaggattctggactgacttcgagtaagtaattggcaacatgatggcccacatggctgccattaaaaattttgtgatgtaccgcataatttgggaaaactttaggctcttccaagcaccaaaactaagaactaaatccagtgtcgctgcaattcataaaagatcaaaggattatgccaatatgtttatacatgggtaatgtcaaactgaaacggactagaagttaccttgtagaagattgagaaaagctgaagttatgaaaatggtcaacacgtttctaaagacatcctcagtaaaaatggcaagaatagatcctgacgggtgccatgcaactattatcatagtctgaaaaatcatagaattattacatacgttttattatgtaacagaacagaagttgagtgagaattctaattcagaatcctacctgtagagacaatacaaggaacatccacattcggtcgaaacttcgatagaggttccaaaacgtgcgagcttcaacaaaattagttttaggtttcctttttccatgagacacttggtcatgtctctgcagttaataaaatgcattggtaaccctcataaaggatgaaacaaaaatatactgggttcaataaaagatgataatcgacgcaagtaagtatttgaaaagaaaaggatattcattctatcaaatatttccaaggtaatgaaaaagtctacattaaagataaagataaagacctgattcggaacttgcgagatctcatcagtgtggatgaaaaaatctgccttaaagttcattggccatttcagcctaaaacacctcttatccctgaaaaagtaaaatgaatgtgctcagatagtaacacttgactgactgatacatataatggcaaatcaaagaaaactcaccaaaagtactcattcagatcatcatagtttctccattttgaatggcttgcctttccatttttgtttctcctgacttccttttctcacaaacgaagcggttttcttagcagaaagaatcaaaaagcaagggaaaaaaacaaaactgcttcagaaagttacgtaccttgcgtaagacctggtagattggtgttataacattccttaagaatgcttcttcgtccggtgcacctgcctcatatgtgtccccagttacagggtacacattgccaaacagaattccatggacttcattggccatcttcacaggaaaatttaagaaaacaacattgttacttatgtatttatactataaggaggttcctcaaaaacataagtacacataaattagtgtgtgcgttgttatttgtgtgtggaaacaaataagaggaaatgaagaacgttgaacttggaaaacctacattgtggaaaatgtagcaaaggcattcaggcatgaagcggacatttgatgcttctccccatatgagaagataaaggccgatatacagaaggctcagttgttgcttatcacaacctgcaggaaacctgccaataggaaaaccatccattaacatacatacatattagagtagaagaaatgcgagggaagctttttttttctataattactcagaagttaataacttgatatatcgaagagaagtgatacctcaaatatgagtcacaccgcaaatacttgcaccatgaattgtaattcttgaagtatttttccatcaatttccgcacggtgctaggctttatctatatttttccttgaagttagtaaatagttgtaatatcctcaagagaaggaagcccacgaagtacacaaatttacctcgacataattctcgagatccctcttcctcacatcgatgttggcaagtagcagtataagatgctccctctgattagctacatttcctcgctttcaccatgaaaataggaagactaatcaagacatattttatggaatagaaacttttaaagaaaaagtagcaaagaaacaaacttgaaagttacctgaaaaccgaaaaccaaagcaagccactcgagaatatcattaaaagatctgcctctttctctatccacttcatccaggttagctgaggctgaatggaatcttggtcgaggaagattgtccacattgcagacagcaagaattgccgccttaatctaaattacattgggcaaaaatgtcagtgagagttcaaaatgatgaacaagtaaagtaggcaaaatttgcacatgcaacctcagggagttccattactgcagttttagcccctaaagcgtacagcggaagaatgttgtagtgttcatactgttctttctttctttcaacttctttggcatacctaagggtctacattcaaacaccagcaagatgtcaagtgacacaattaccctcttcaggaaaatttatgatcagattgtaagggaacactaatcaaccttgtcgtcaattcttgcttgaggaaccactgtctttaaaacatcatacaagactgtcgctatctggtaaagcttggccatctcctccctgtaatgacaaaatcgacagaagcaaaagagttaggagaccatcatttaaatctttatcatgtaacgattacaaaatattaagaagagatctcacggtgtctttttcccttctccatcttgtatattattctcatagaacgtctgatagtagagctgaatttctcttgggtcactcttcgccaacatatgttctgtaatctcttcctcctaaagagaaaaaacaaaaattcaagaactactatctcaagatacatccaaatgtaaaccttgtttatctgcgtactccaattcatcaaagagagagaaaaaaaaaaaagtatgcgaaatcatgtaatcaattaacctcctctagcttgtgcaatagataagtcttaaattgacgaacgcctcgtccgcttgatgttggatccattcgatgagccttctcaaatgcatggaagcgacctaacaaaagtgaagtgagaatcttgatatactcattcacagccacactccacatcacaaaatcgaaaaggtttgagagatatcatacaaaggtaagcaacccttgcgttatcttggtcaatatcattagcaactcgaagaataggagcaatggaagcgagagaagaaggaacaagctcgctgtcaattggtctttcatcttcattaggatgctcaatcatcatcgtaccagctcgtgtcatcttccgagacatagaccgaactggctgcatttgcggcggccgcccatcttcgcctcttccaccactactagtactcgccataatagctgatcaatttcaaattccgaagaatcgataaaacccatcttcttcttccccctttttgtggatatatacatgtgtgcagaggaaagtgaagcgggaacaggagcttagattcgtggagtgggctttagggttatgcgattgctctacgaggaagaaaggaatgctaaaggagatattctaaaaaattgatttctcgatttgtgtcttcttcctttacactcagaataaaagaattgatttttctttctttcactcgctcgcttttgagctgtgactttttccataaataggtacgaaagcaaacccaggacgaggtttttgaatcccttattctcctttacgagattttccgggattttttttccccgggaaagtctggagaattgcttctctgtgaagtcgaaacggagctttgggacggctacgcaacggctatagggaatctagactacatgacgttttacgtttttactaattaacaacgtgacactattatgtttacacaacgacacggaaatcagcaactcttagttgggccacctactggcccatgggttcttaagattaaggtaataaaaaaaaaaggtaagaagacatatggcccatgcaggtttcgaacctgcgaccttcgcgttattagcacgacgctctaaccaactgagctaatgggccttcgtgttattcgtattaggtatcggcataaagaacttggaggcacatgagagtatcaagtataaattcccgacccattagtttatgaatgtaacaacaacgtaactatttcacatcatatcattccttgcttaaaacgatatacaaacctgttctgaacagttccacattttgcatagttgacatttcatatttgtacccttacattccattttcacagttttacatctctttttttttttggcaattggtctaggattctgaactggattctcaagaatacttcaaaacgaaagaaaaaataacgtgtgatgataacactaaactattctaatgagtcccttggcaggcttaaccaattatcattatctggacaaatcaactttcttaacggtcagattttgtttccagctactttgacttcttctcaacctttttattgtttgtttccagctacttcaacttattattattattattattgcgtacggcgtgactaattgacgtaaaacattaagttaataatagttggaatattatcgtatcccctactagtaatatcatatccccgtaactttacaatcaaacgaatgagcatggcgatataaaaactcatgatcatatatatacatatgtgtccatgcgtcggggcaatacaagttacaaaactaagtggtgaaagagtcaagatatatggttgtcgttgtgctggtagccgtagatattagatcagaatcagatcatacaagatctacttgatttttttttatttttaaatatatttcctcttaaataccaattttgtcggagagtatagaaacttgataagctgcgtcaacgttaaaaaaatctttagttcggcctcttctgttttactcgcaagaataacggtttaacatcttcttataaaatctaaaatcctactatattatttgggaaatacattttaaatataaccttattttttgtaagtaattacataagtatgtcattagaaataaaattttaaataataaattaattcattcccttaagaattaaaaagtcaaatactaatttaattaattaaatttaattaaaaaacgaaatacattataaatttccaaaaaagtaaccaattaaaatcaacaaattagatttgatatcttaattatcatattaatttttttgggaattattatagttcacctctcatctttatatgattctatttttgcgaaaaaataatatcatcgttataaaaacataattagagttttttcgcatatgccataatttgaatttttaaaaacaaatagaaactgttcaatacatgaaaaaatattataacgggtcaaaaatagatttaaaaaaactttctactgagtattgggtcataatttgaatatttatattcaatttcatacatattattttgaaaatttataatcttatatactacaataattcataacatattagttttttttatgtgtatgatgtgattcaatttttaatacaagctggaaaattctagaatggacgggtttagatcgatattaatacaagatggtatactacaggtgaaactctaaaattaacacttaaaatacaagtgtataattttaaacactaaacaatgtaaataatatcaacaaaatatatacaactcgcagtttactatacatttaaaatcaaataaaataatatcatatatttataatcatctttacaataaaagtttttagtttaactaaaatataagcctatctgcgatatactgcaggttaaaattataaataagcagattatcatcacgatgtctataccttcccacatacacacctatcaaaaacttaaaacctttcaaaactttttggtatattcaaattaggatttttcattcatggaatcattattccaagggttttgggatgtcttatgaaatgattttggcagaagaggatgtaaaatttttcgaataaaaagtagtcagcaaaacatatgtttttttgggagtttttagataattaaatcagagaatagggctgggcatatgagtaatctattcgagttcgggtagaaccattcgggtttgggattaatgggtatatgatttactacccaatagaataattctaaatattcggttctggttcgggtcgggtccagttggattcgggtcagttttgataaaaagtttcaggccctaaaaatacccaaaaaaatagaaacggtattttgtatttagatagcgggtcttcaaaccaaaaaaacttttaaattttaagttttaataaatttaattatatttgaatatattttactaaattttgacaaacataacaaataatttttgaatagtttagttgttttggatatttaggtccaaaattaattgacatatttagatttataattataatcttagataattagattatattacgattaaatataattaatattttggatattaaattaatgtttcggtttttgagtacctttttggataacgggtaatttctggaccaatcggatatccacgggtttactaaaactctacccaataaggaaatttcctaaaattctaacctgctctaacctggttttttggttcgggtattgggttggttatcgggtccgttttttcgtcagccctatcaaagataatctaatatagggcccaattaggtccacaaatgtaatcaaaatagtatacatagactaattttaagttaggccaaaaattagatcctctaatacaaaggaaacatgtttcttaccaaaacaacttgtatacaaattttatacatttacttaaaactacatatgttatatttattataaaaataacatttttaaacaaagtcaatccaatgcagcattatatccaaatagtaaaaacattgaaaaatattatggcatcacttttatactatactattttttatataattcaaataaagtatacaatttaatttatacaaaatattaatgtctgtgctttataatctagttgattgtaaaatcaaagtactatatagaattcagtaaaaaaatagtctacacataagtccacagtgacatgaaactgttacggtcttgtcaaatctaaatctttagtccaacattataaaattgaaaagatataatatattatttctacacaaaactacacatgtatataacaaagaaaatgtacgatgtaatttacataactctcgattgatcttttaaaaaaggtaaaagcatgattgctcaagtggaaaaaaaaaaaaaaaaaaaaaaagcatgattgctcaaaagaacggctctctttgtaatgttacagaatgttgatagagacaattactaggttccctttcattatctcagaactaaatttgacaagctgttctgcatcaacaaaaaaacaattccttacgacactacatcattacatgaattaatatatgttccatatattaatatttcataaaaagtgtgacatttgtagtagcaatgtgagagaaacgaccgttagtggatctatctggaaaaaagcgaaactgctggactgcttttataaaacaaaaaaaaatcttattgtaataccgaaaataaccctgctcaccttccacggttccacacctctcgccagctatactttactttcccgaagaaaaaggttaaagggcatctcattcctttcttagtcacatttggcaatagtaccctctccttctctgacctattcacaaaattgccccgtctcttctccacacagtataagaatgctgcaccgtgacatgactctgtagtagagagagagagagagagaggtagacaatgggagttatgaagaagtgggcgtcgctgaagaagaagaagctgcaacaagaggaggaacaagtgacggctaaagaaacacagacatggcagcgattaaggaatctgttttcaacgtcgtcttcgtcttcgtcttcgtcggcgaagtggaagcgagttgagataataatgctgacagagatagtagacggagtagtttacaaggtcatgtatgtagttgaagctttcgttctcgtttccacgctctgcttcttctacctctgttgtggatgccacatttgatccaatttttgtttctctcattatattattctttccaattcatacttcctctcttatggggtttagtgttagtctcagttttatacaaataagcttatatgtaatctgatcattccatcttgtagttctacattataatgttagactctgttattcaatttcttcagaagatgataacagagacgacactctcaataacatgggtacaaaagacatgtgaaattggaccaaatttgcagccactactaactttttccctttaaaatttgttgaaatggttatgttcttctatcatttttgtaaggcagggaaacatcaaagtttccaattcatctgccttaaaagtatgttatagtctttttctcaaggaaggtccacatgcttccacattacggatgtaccagcctaaaagggggtttaccatatcatgtgaatgtatcaaaaataattcttagggactattttcttgatcatccatctcatcaagaatcacatattttccagtctgacttggagcttgtaactgcttctcttcctctgttttgtgccccttttgtagtttatcatatctgacaagacatcaaaagcatacaccgttcggttccaatatacaaatttgacattgtattcatttctcagcatattagatgtttaaacaagcaagagttacttacttgtaccagttgaacaaactgacaccaaccataatgatcatcagacccacacctttcagccacgtaaattcgtcatggaagtaaaacactgcaacctgttttgcacagagtcaaagaacaacacaatgaagattttacatccccaaatatatcagcagcagcactgatacaaaattcttctggaggcagggacatgtagtttaagcaaattctatagtgaatgagaagccagttctaaagacactagttctgttttatcgagtatgtctattaagaggccagacatgaactcataatccattctagaaagcaaactccaaacaggtgtgtctatttatatggcatatgaccaatataatctcaccatcttaagatatcagtcccttgtctagaacatcaccgcaaggtttcaatcaaatatagttcagactttctagcttaagaatacgaggaaagtagaacttacaagctagacctcatcagttagatattccaaaaagtttatgaatataggacataccactatggtgacagcctctttgacaactcccgctattgtgacggttacagcactagttacggaaacaaggacatactctgtcaaaacctgaaagaaaatattaaatagtgagcatggaagactgatcacatacgaaactagagtttcataagatgcttcaacctccacctatcaaaacaagttcactcttacataaggtttgtaaattgtttagtaaatgctcaccatacaaaaagccagtgctccgccaaaaagcatcaaaaaacaagttcgagcaaaatgtgctccactatcaaagtatttgttgtctctaaattcactccatggatccagaaggagagaaagaagaccagtcgctatagccatcactggtgccacacagctcatgaatatgaatggatttttcagtcctagataaacaaaacaaaaacaagtataaatttatttctaggtcttgtgacttataagaaactaagaaagacaattatagatttgaaaacaccaagagcagaacccaccaaatgtttctttctacacatcatgttgtcgtcagaatggagcaaaacatcggaagacaaaaaccacaaaaagtaaaggtaaagagttaatatataaagatccaatgtatggtttaacagaaattaaaaactgagttaaagaatatacctgcaaaagaacttgcgtcatacaccagcggaaaccagacatgacagcagcaagcatgacaaaaacgaaaccccaaaactcaaattctgtctcctttgcaactgatggtgagaaaataacaagtttaatggctttgatttaggaaaaaaaattcaactaaaaacttctagatagattttgtagcaaacaggtccaggaacaacggagtacaaagcaatataaatgacaaagaaaaacatacctgttaacaacactcctgctgagatcactgaaataatgccaaaaagtttcaggcttggagactccagcctaaccagcgaaatattgtgtcaggataacacatggagtacaaaaaattgtaaagcacaaatcaggataaaataaacaattaatcgttatgtataaagcacctgaaggcaaaagcaaacagaagaagaaatattggggctgcagatttgcactgcaagtggaaaaaacacatgcatatcattagacaagtctcaccttgtttcacccgcaaattccaaagaagttgcatagacctaccatagtatataaaataactaaccattgttgcaaatgtaaccgatatgaagacaagtgactcgttacttaggtttatatccatagcagttccaagcgctgttggtacaactgcgaaaggacaggccatgtgggtaatcagtttatggaaatataatatattcaactttcgaaaaactgaaacagaaaaaacacactaaatcttcccctctcgtcctcactaaatactgtagatgataattgcattgcataaattgcagaaagttctcagtactatgtagtgagaataaagtagaaagtaatggctaaaggaatgccctggttttgttagtttacctctaacgaaatagtctctccatgatatggtaacatcaggctgaaatctccccgaccaataccatgttatcatctttgataaaacagcttgaatagaaaagtgaatggtattcattaataagggagcaggaaatttccctaaatcatctcctaagagagttttgttgtacctagaaaataagcaagtaaattaaatgctagttgtatggaattaaaagaagaaaaagaaaatgttagtcgcaaagacatacttacagagtcagaaatgtgctgaaagtgtaccatacaagtataaagaagagtgttttaagcacgtcagcaggagagatatctacttttgacgctttaggcaatgtttcaagggtatcaccggaactgtaaccaacatcaaaacttctggagccgtttgtctccttcccggtctcattttcaataccaaaagtctctaaaacctgttctctatctacatctccctcattggatatggtttccattgtaccaacacggagctgcactctttgctccatcaataatctgaactcaccagcaaaccttttcggcttccattcacagacaactgtgacaaagcatgcaatctagtaatccagcctttctttactcaacaggtatttaaaaaaacacgagtacccctgtaatggacagctctcttgcctcggaatttcaaggaagaaagttttatatttgacccatacgcatatgttcaaatggtacagtgtccaattctctctggcatatcccagtgggctaattgaattaggaacctaagatgttggtgaatatgcaatgcagttctctggaactacttgacctagaatcacaaacacaagctcaagtaagtcaagtatttctgtgagaaattcctctggagaaagtggaaagcaaagcaaacaatcacacaagagccacatttcaataaaggcaagcttctctaatacgccgatgcaaagattcaaaccgaatgaaaggaagctacatttaatctgataagaaccaaaagagttcaccgacagaagaaattgaatacataaaccattctttaacagggccgcttcaagaagagattaatacgtcactattggaacctagaaaaagcaaacacgtaaaaagaaggaaatctattcgaatgaatctgagtttcacgaaatcagatgtaatccaaatcaggaaaagctcaatgattctgagctcaaaaaaagtaacgcaacaacgaaaagagaactcctcgcaatcaatctggatcgggagtgagctcaaaattcatagattcaaagctaacgaacgcggactatgaaatcagcataatacagatagggaaaatcaaaatttcgccagaatggaagaaagagacctacaaagagagaagaatcggctcgttggatctgatcgaagctgcaggaactttgtgtgtgtgtttgaagatagattgattttggagtcgcaaccgcaggttgttggagtttggtgaatttttacgaaatcattaccgctcggagtctgcaatgcaacttgcatttacctttacacagattatatttgttttcacaagaattaataattttcatttttaatggagttcgcgttttgacaaaaaaaatattgaaccaaaaaagaaaaatgttttccaataaaaacgagtcgttgtcatttcttgtccgtttccggaagaaaatatcttttaatcttcaagcagatattttcgaatccagcgcgcgaagttaaagccactcatttgtttcatcgatcctacttcctcctgtgtcactgcaatcactcgctcgtccttttctctatttcttcaccgatcgaatcaatcagagatggagcatgaatctatcaccgctcgacgcaggctcgctgccttcgccgctcacttcccggcaaccagttacgattccgcctccaccgcatctctcgtccccttggtattccccttctctttttgtctctcgtttccttatctgcaagcctagaccccaaggatccgacggttttcgaattagactttctgtatttcgttctcctatggtttcttaacttggttagatagtttttctgatcccttgaccgatctcgaatctcgatgtggatttacttgcaaaattggagcagatcgaccaagtacaagaacagttagtctgattcattttggcttaaaccttgatttcgtttaagggtgttgcaatggaaagctcaaactgttcaattattgaaagtcatatcatgcttatggatgtgtttttttatacttgactctgcctcaaataggttggttcactgattcctttattttggtctaatggatctcttatttgtgttatgcctcagaactgcagcagcagtttgaacactgtcatccaaaggtgtgacaacaaaatctcttttgcccggcaagcatcatctgaacagggcttttttatgaggccagcttcacccgatgatgtccttgaggtaccataagttttttattatgttttgaagtccctcctccttcttctctggtcacttactgtctaactacacttagttaacaaagtcatatctgtactgtaatgtaaatatgcccacaccattaacctcttctgtcacttgtgatgatgattcagaacttaggtatgaatttgaagaacactgtcgttagaaggggtgacaacaggctgtattttgctcggcaagcatcttctgcacaaggtttttttatgagacaggcttcgactaatgaggtaccattaatttcttattattatttttcaaagtttctcttctcatctatacttctgtaaaagagaattgattcaaaatgttttttgcagaggaccataccacatgatgctgctgcatctaccaagttttctgctaccaaaacaactggcttcgattcttcttcacctgcgtacgctgcaccacacttttctaagcctgcaaaagaggacatcttttttccttctttatcaccaaatctgcaaaaggaaaggcctaagcttgatcttcctaagttagccaatttaggtacgaatacaaatataggtgtattccactccaataacactacttttctagtcctattataacctgatacttttcttagagaacttaatgatttctgtagtttacaaacacacaaatattactaggtataactactaaaggtggtttctcaccagccttgatctacagaaactagcatccgtacttcaaacaaatccgtacaaatgaacatgagaacttacttaaagaagtttttttccttttgcaggtactgtttggtctcccagatcgaatgttgctgaatcgacacacagctatgttgtggcaatagagctaccaggagccagtatcaatgatataagagtggaggttgacaacacaaagtaatcctgctgatacacatcttttttcaatctgttcccattactcacacagtaaaaatgcattgtgtaacaaaggtacttaccgttctgctgcagcttgactgtgacaggtagacgcacatctatctgtcaaaaagttgatgcaggcaccaaagcttcgatccttggatatcataagcaagaaatactacaaggaccattcaaagtttcctggccactccccagcaatgtgaacaaggataatgtttccgctgaatttatgtaagtagaagctatacttactaacaatctaaccgtatgatcaaacaactattctccttaaatctttcaatcctagagttcatatgatagattctgcctgtaggttttagctagtagtgcacacctaaaaagtagtcgttttagaatccaattttacatcttagtgccagtcagtcattagcttgaattagtttagatagaatttagcaagttttataaagagcactaacatccaatttattattgcgtttgaaacagggatgggattctgagaatagtaattccaaagctttgagggttcatcgttctgaaaccatatatagatacggtaaacattgtgtgtgatatagcagtttgtgtggaaaagaaaaatatcaaatcatgaagaaagtttggtcttttatgtaaaatagtttggtcttttatatatcacagattgtagacaggcattactcaaagtgaagccatgtaaacaatccataaatatataaaaataaaatcttcattactactaccaaaagccagaaaagaaaaagaaaaaaaaaagaaaaaagctcagaagcatctaatcatcctaaagctggggaaatctcaatctactcaactacgtagcaagcattattgttgtaataattaggaactggtccaagataatcaacagtagcagatggcgtctgagacgggtatgcaaaagtgcttgcaggtagatgagtaagctgcacatacgtaccggtagcattacagaacgcccatggggcacctgaaggatcgtaggagacaagctgaggctgctcatagttctggacatatccattgtggaacacaggatatgaagctacattctgctggcacatcaaaggaagagtcggctctggcacaggcgcaggggcaggggcggcaacgaggttgcttttcccaattccatagatcaatcctctagcaaatctggaatcttcatagacatgtttaagcttgatgaagacaagtgcagtcattaagctgtctgaaccagcgtgatgtgctcttcccacacgagtgatctgaagtagctgggctagtttgcttaacccgaggtgttcacctagtccttcacagaatccagccatgaccttggtgtcgtaaacttgaccgaacactttgacaacctctgttgcaaactcgccgtgagtctctggtagcttgccatgattgaggatactcaagaagtaagcgaaatcgtaagctccttggaaagtgacgaactcaacgtgtttctgagaacgaaacacagtcataagcttagggaaaaacccgtagccgaacatatcaactccttcgtctctaatcttctgcaaatccaaaccatgcctcctcaagaattcgatggaaagctcgttgcgtgtgtctgatgggtcgccgaaattggagaagttaatctcccaaacaccaccgatctctcccttggcgttgaaaagagtgaaaccacactggatcagcttggtgttctcgacattacctttcatggctctgtaacattcgtcgctagaggaatcgaaataagtgcggaaaataatgccagggtactctgtatcgaaagcgatgagtgggaatcgcttgagacattcggccatacgagccatctcttcatcgacgttgcttctccatactctcctcgccagcggttgatgaatctcgttcatgatgatgatttctgcagataataaaaattagggttcttttcttaggagggagaggcatgaatacgagaagtctttttggtttgattgattgtgtgagagcattagggttctttataaaaaaaaagagagtatttatccttttcttaaataaattcgtgtacctgagtttccttttttctcggattttttctaattaattaaagatacatagcttaagctaatagcttgctctccaattaattttaacgcggtgttgatcatgacggtttatattctctctgattataattttatttgttaatttaatttctgttaaatttaatttagaaattatcttcttcttttttaattttcgttaggagttaggaaattcttgtagttatcttttactttttgctactatatggtgcttttactctctttttaaccaatccacaatttcctttttccgtcccaaaaagtaaattacatataattaatagataatggcaaaacttccaatacaagtattagattaatatgtaaaatgagtatcaattagtgtttaaacttttgattttaaacactaagaacttgaatggttattgttattagatgctttgacactaattatagaaatcgcatcataccattttaattctttgtaagtcaaaaacttatccataacattaaaatattttgttttataaaactttatatttgacagcatttatcctctcataccaaaagtttatgatatcaaactagtataattatttactaggctaaactattattgtatgtgttttattagtttaaataaattttatagcggtaattgattcgcttatagatgtgttttggtcttggacatgaaaatacaaaggtccatataattcttctacttcattttttaatttcgttttttcccttaatgcctgttaggtgttcgatataattccgcagagagtgtgggtatatacagcgacgttgtggaacgcggaaactcaaaatagctccatatactctttgagatactatgaggttcctcctcatgagatcacttctggttcacccatgtggtggctccatcatcaatgtccgatcaacgactacgtctgctcaatatgtagcttccagatcaagagaccctgttttcgagaagctcatggacaaatacaagaaccttctcaaggtcattgccatacaagaccttaccctcgccaatccaacagctgatcctccctctctatccattgagtttctctccaggctctcccagaagctccaccttaatcgtggcgctgcttctttcctgcgaaagtatcctcacatctttcatgtcttgtatgatcctgtgaaagctgagcccttttgcaggttaactgatgtagccatggagatttctcgccaagaggctttggctatcactgctactttgtctcttgttgttgaccggttggttaggctcttgtctatgtccatatcaaagtccattccgcttcgtgcggtttttaaggtttggagagaacttgggctcccagatgattttgaggactctgtgatctcaaagaaccctcatctttttaagcttagtgatggtcatgaatccaacacccatatcttagagctggttcaggaagaagagaaaagactggaatttgaggccgcggttgagaaatggagggtggttgagtgttctaaggaggattgcagtgtcgatagaaccgagattcagtttagtttcaaacatagttacccaccaggaatgagactgagcaagacatttaaggctaaagttaaggaatggcagaggctgccttacgtagggccatacgaggacatggttggtaagaagaagagtagatccggtgtgatgggaatagagaaaagagcggttgcgattgctcacgagttcctgaatctgactgtagagaagatggtggaggtagaaaagatcagccatttcagaaaatgttttgggattgatttgaacataagagatttgttcttggatcacccgggcatgttttatgtgtcaactaaagggaaaagacacactgtctttctcagagaggcttatgaaagaggacgtttgattgatccaaatcctgtttacgatgcgaggaggaagcttcttgaccttgttctcttgggacgccatgctgctttatcagaatctgggaacactagtatgtctgaacaagaatgacattacgatttttcaggccctattgagtctgagctatgcaatcttccatatggaagtgtatgagacacttgagagattaggtccaccaagaatcaggcaatgtttctatggcgtttgtccgaatttcggactaattggcttgctcacaagcaaaagctcgagataatctgaaagcaggaaaagcgagttacttgatgtagcgtaagtgagtacttggatcaatacttgtctacgaaaccaatgtaggagtaaacggtctttgttgtgtacttttttggttatgtattgtcgacagaaaggttagaaactagtatccaaactcaatacgtcttctttctttagattttgcttggttgctaattgcttcatgtggctttccttattctactaaaactctcatctttgttcttgttctattttttacttttacatcctaatttttttgaaatattattttttggaataaaatttgaattctttttcttaacctttatcactaccagggtttaaattataagtttaattatataatgtaaaaattgtgaacgttatttatgtattgaatttttgatggatggtttttgtggaaaaaatggttatagaaaaaattgtgacaagaaatgagtgaaataaaaaccgagagcccatgaaaggaagccacgtaagctgttcggagccacatctcttgtcttcaaaagtaccaaacttcatttgcttctccaaacaaacaatctctttctcttcttctgccaaattccacaggtgcgtttcactcttagctcatctgtgtaatctcaagcattttctgctttgtttggtctgaatttctgaaatcttttgatgataaaaatttctatgaaatctcggtctgcttgttgcatgattcttactacctgggttttgttcagcaagtctatttgtctttatctgttttcttcttaatttgactttaggaatgtctaataatggtggattcatgtgttgaaatatagactaatgttatatccagtggcaatttctacaaatttttttatcttggagcatgaaaatgttccaatctttcttcatatgcgtcgctaatgatcgcttatgttgattatagtcttaccagaaacttgcatgttgttaaaggtctcgttttgtttggttgttctttgttcagattgtttttttttgttcacgccatggcttgtaatcgtctgtgcagatggctgcttcatcggcttgtcttctcggaaatggattatctgtctacacaaccaaacagaggttccaaaagcttgggcttgataggacatctaaagttacagttgtgaaggcttctttggatgagaagaaacatgaagggagaagaggtttctttaaactcttactaggaaacgctgctgctggagttggtttgcttgcaagtggaaacgctaatgcagacgaacaaggacaaggggtttcttcgtctagaatgtcttattctaggttcctagagtatttagacaagggaagggttgagaaagtagatttgtatgagaatgggactatagctattgtggaggccgtttctcctgagttgggtaaccggattcagcgtgtacgtgtgcagctacctggattgagtcaggagcttctccagaagttgagggctaagaatattgatttcgcagcacataatgctcaggaggaccaaggttctccaatactcaacttgattgggaatcttgcattccctgttattttgattggcggtttgttccttctctcgagaagatcctctggtggaatgggtggccctggtggtcctggcttcccactccaaattggtcagtcgaaagcaaagtttcagatggaaccaaacactggtgtaacttttgatgatgttgctggagtcgatgaagccaagcaagatttcatggaagtggtggagtttctgaagaagcctgagaggttcactgcggttggtgcccggatcccaaaaggtgttcttcttgttggtcctcctggtaccgggaaaaccctgttggcaaaagccattgctggtgaagctggtgtgcccttcttttccatctcgggttctgagtttgttgagatgtttgtcggtgttggtgcatcaagggtccgcgatcttttcaaaaaagccaaagaaaatgctccatgcattgttttcgtggatgaaatagatgctgttggtaggcaaagaggaactggaattggtggaggtaatgatgaaagagaacagacccttaatcagctcctgactgagatggatggttttgagggtaacactggtgttatcgtagttgctgcaaccaacagagcagacattcttgactccgctttgctaagaccagggcgttttgaccggcaggtatatatttgactaaatgccgtgtgtctgtgactttccattgatcctctttattgctggttgcttattgtgtgttgttgtttgatgcaggtatctgttgacgttccagacgttaagggaagaacagatatactcaaggttcactcggggaataagaaatttgaaagcggtgtttcacttgaagtaatagccatgagaacacctggatttagcggagctgatcttgcaaacctcttgaacgaggctgccatattggccggccgccgtggaaagactgcaatatcatcaaaagagattgatgactcaattgacagaattgtagctggcatggaaggaacagtcatgacagatgggaagagcaaaagcttggttgcttaccatgaagttggccatgccatatgtgggtaagtcagaatcagattagatgatgtgtgtgttatcaaaagcctaaatttaagttcattgttcgttcttgcagaacattgactccagggcatgatgctgttcaaaaggtcacgttgataccacgaggccaggctagaggtctgacttggttcattccctcagatgacccaactctaatctccaaacagcaactctttgcaagaattgttggtggactcggtggtagagctgccgaagaagtcatctttggtgagtctgaggtgactactggtgcagttagtgacttgcaacagatcaccggtttggctaagcaggtatctcttctacactcccagcttcagtatttttttctgttatcctaaactagtgaatgaacttgacagtatatcatcatttacttgcagatggtgacaacatttgggatgtctgaaatcggaccatggtcgctaatggattcatcggagcaaagcgatgtcattatgaggatgatggcaagaaactcaatgtctgagaagcttgcaaatgatattgatacagcggtgaagacattatcagacaaagcgtacgagatagctttgagccagattagaaacaatcgtgaagccatggacaagattgttgaaatacttcttgagaaagagactatgtcaggcgatgaattccgagcaatcctatctgaattc

SEQ ID NO: 18 - DNA, 91608 bp, Arabidopsis thaliana
gaattcgaagatcctgcctctgtgacgaaagatgatgtagaaaagatcgctgataggtgagtgcttcatttaattgtcaatttgtgtctgggatttataaacaaaagtttgcttaaacgatccttcttatatgttgcaggtacggtgtcaacaaaggagacgaagcattccaggctgagatttgtgatatttattgccggtgagtcaacaaaggatactgtgttcatcttttctcttagtgtggggaattcattagtaatctttgcatcttaatcttgatttaggtatgtaacttccgtgcttccaactgaaggacagtctcttaaaggggatgaagtggcgaagatagtcaagttcaaaaatgctttagggatagacgaacctgatgcagctgccatgcacatggaggtgctttctagattcttaatcttcatttgaattagccgttagcctttttgtagttgatgcagaaggatcttgattgctgaatcaccaattccttggttttgtttagattggtcgcaggatttttaggcaaaggcttgagactggggagcgtgaaggtgatgcagaacagcgtcgggtgagtcgccagtccctagtatttgttaagtttattgtaggattgttcgaaagagagcacaagcgtgatcacaagttgtatgcttccagtgcaggcatttatgaggcttgtatatgtttcagctcttgtgtttggagatgcttcatccttccttctaccttggaagcgagtattgaaggtcacagatgctcaggtaggcatttccaatttttttcatacttctgattttgcgcaatagttgttttatggaagtttcattttggcaactcactccttcttggtaatctgaagttctgtgctaatgtcttgacctcatttctaggttgagattgctattcgtgaaaatgcaaagcagctgtatgccgaacggttaaaattagttggtagaggtaatgttgttcatgttttacattttgagatgggaagtaatgttacatttgtagaacgggtttgagtttgcttgacttggttatattgattattgtggcacttctttgtccattgggttttgtaatattcgtttatcagcaagttgtctgaataccaaccttaattgttacttcgcatgcgactgtaatggtcccttctcatttaacattgataatagatatggctttttgacaaccaaaaaaagatatgacttagctttttcgtcagcttaatgcatggaaacttacatggttatgtttctaaacatgttcttgcagatattaacgtagaaaaccttgtggaccttagaaaatcacaactatcattcaagctctctgatgaggtactctatttctttgtggcattgacttcctgctatctctggttgtacttcttctgacagtttcttctccctcatagcttgctgaagacctgtttagagagcatacgagaaaagtagtcgtagagaacatttcatcggcactcagcatactcaaatcccgcacacgagcagcgtaaatcattttaacatattgcttacagaatcatgcatagaaaaatcgtatagaataatcattatccatgtgaacagtttggttacacatttaacttttttatttcttataccaatgagttatgactttagctgggtatatgtattcctttgcttgaacattgagtttggtcgggttgaaaaaagagattgaagttttggctttagttttgagttttggttattgcaaaaactgattggtcatatgatctcttttgcttttgtgaattgtcttatagtataagtatttaaaaaaaagtcatgagattttaattttataggcgtttttgtatcttgtgataattaatagtggaaacaaattggatcatctagtatgtctagtttatagtagtttacaatgcatgtcattttaacgacctgattttttccaggaagagtttggcatctgtcgtggaagagcttgaaaaagtactggagtttaacaacctgctagtttccttgaaaagtcattcagaggcagatcaatttgcacgcggggttggccctatttctttgataggtgaagatgcttttgaccttctcttttctgaagaaaaattattggctctcaaccttggatctatgtggcttaggtgatgagtctgattttgagaggagaatggatgatttaaagctcctttatagagcatatgttacagatgctttatctggtgggcgcttagaagaaaataaggtatactcagttttgtataagatattatgtactaaagcttagttgcaagtttttttgagagtaagtgttttcagatgctgtgtcctctatcccagtcgcatgtttttttccatttctaattgtctttctactgtatggtagctcgtggcaatgagccaacttagaaacatactcggtctgggaaaacgagaggctgaagctattagtgttgatgttacgtccaagtcttaccgtaaaagacttgctaacgctgtttctagtggtgaccttgaagcacaagacagtaaagcaaaataccttcaaaagctctgcgaagagctgcactttgatgcacagaaggcaggcgcaatccatgaaggtataagccgaaccttctgttcacaatgaaatcttatgtttttatgttatgcatgaggtatacagttggaattgccacataatcgcccaaatgtaagatgtgtccatgggtatcaatttagttgatggcttgtaaacttgcgggttccttatccttttaagctagcttttagtgttgtagatttggttcttaacagacttctaacaagtctggtgtttcagtgggttacatgctgttattttacagtttgagtatctatttggtctttttttcccaatcatctgacaagcaccttctcttcctcagaaatctatcggcagaagcttcaacagtgtgttactgatggagagctgagcgatgacaatgttgctgctttattaaggttaagagttatgttgtgtattccccagcaaactgttgatacagctcatgcagaaatctgtggaaccatatttgaaaaggtaatccagttatcacctcccttttccctttatcaagggttttttcatggtcttgggtcttggcactgcaatttccctctgcttccctctctgccttcgcattttgttaccaaaaggttttacctctaattacctttttgtttaatctttccaggttgtcagggatgccatttcttctggagtggatggttatgatgctgaaactcgcaaatcagttagaaaggctgcacatggtcttcggttatccagagagactgccatgtctattgctagcaaagctgtgagtatcacactatttactttctccatgcttggtattaggatttgttaaaattttctgacttctcatagcaagacatgaaaatcaaatcccttcattgatgcaggtccgtagggttttcacaaactatatcagacgagcaagagcagccgagaaccgtactgattcagcaaaggagctcaagaagatgattgctttcaacacgttggttgtgactgaaatggtggctgatatcaagggagaatcttctgataaggcacctgaggaggaccctgttcaagagaaagaagaagatgatgaagatgaagaatggggatcccttgaatcgctcagaaagacaagacccgacaaggaactcgctgagaaaatgggaaagcctggccagactgagataactctcaaagatgaccttcccgacagggacagaatagatctctacaaaacatacttgctctactgtgtaactggagaggtaacaagaatcccttttggcgcccagatcacaacaaagagagacgattcagagtacttgcttctaaatcagcttggtgggattctcggattgagttcgaaagaaatagtcaacattcacgtaggtttagccgagcaggcttttaggcaacaagctgaagtgattttagctgatgggcaattgacaaaggctagagtagagcagctagacgagttgcaaaaacaagttggtttgcctcagccacaagccgagaaggttatcaagaatataaccaccacaaaaatggcaaacgcgatagagaccgctgttaaccaaggaagactgaacataaagcagatacgggagctcaaggaggcaaatgtcagcctggacagcatgatcgctgtgagtctgagagagaaattattcaagaagacagtgagtgacatcttctcatcaggaactggtgaattcgatgaaaccgaagtctaccagacaatcccatccgatctcagtattgatgtggaaaaagccaaaagagttgtccatgatctcgctcagagtagattatcgaattcgctggtccaagccgtggcattactcaggcagagaaactctaaaggagtggtatgcaaatcatcttttccctctcttatcgtgacagaaaacatggatatttcagcttctgggtctaaattgtgtatgtatgtatgctttttttttttggttttacaggtcttgtcgctgaatgatttgcttgcatgtgacaaagctgtgccggctgagccaatgtcatgggaggtctcagaggaattatctgatctatatgctatttattcaaagagtgatcccaaacccgcaccggaaaaagttttgaggctacaatatctgctgggaatagatgattcaactgcaactgccctccgtgaaatggaagatggagcattatcttctgctgcagaagagggcaatttcgtcttttaaatctttggagaaatcacttgagttattatgtattgtgttacggccgagggtggaaaaatgattttgaatttgaaatttgaccaaagtctgtgaaaattttgtatcagaaccataaacttgatatgattaatttgaaaatctgcaaacgagaagtgtatcccttatacaatttagagcgcagctttgaagtgctcatgtggtgtcacgtgacgggtgttcccgcataacgaacctaaaaaatagaataacagttaattcaatcattgagaactttttttttaatgaaatgatttgaccgtaacaccgtaagtgaaagttaattgttaattctatggtggtctcacatgactgcacacaactagaacaatactcaacaatcaacatgtatactagatctgatctcgttatagtatgtttttgtcgaaatttctaattatacaaaagcacgtcttttaaagacaaaaatagaagccatatgatccaatcaattgattcatagagatgatgatatgaatcgatgaaacatagtttttagaaattatttccaagattacaaaaaaagaaaaaaaagaagtgaaaattaataagaaaataggagagagttaaatataagaaaaaaggcagaatcatttaacatgatctgagcaacaccttgacaagggaagcgtaacatccagaagatttagcactattcgatccgtagtctaaactcgaaccagattcaaaccacattgatcttcttctgttgcttaaatcagatgtcctcaatggagaagatggaactgaagacgaggacgacgaagaagaagaagccggagaagatggcacactacgattcttggaaagcaaggaactaaagagagtgttggtttttttagggcttacgtgttttgtagaggatggagaagcgtagaagtaagaaggaggaggtgttagtggtgctgaaaccggaaaattgaaatcagaatcagaattgaaaccggaagaggaggatcgtttggagagtcgtcttggagttccgggctgagattcccatttgaagggaacggcggctgatgatccaccgtagtagtcgccctcgacggccacagagaggatcagtttggtcgtggaaaccctagaacgatccagctgaggcattggacactttgtgaggaggtgacttttcttttccgggtttgctcaactatactataagagaactatgaaaagaaagagccttgagtctcttttttttgttttcttactttattgggtgaactaagaagatttagattcagattcaaaagttttgaattgtttgtgttcttattttattatatagttttgaatgagtaagaagcaatttgataaaatattgtagaatctcgaggtgtgatgcttctgggctctgcttcttggaagccactgagagtattatcctgttccagatcatctgatccaattataacttccaagacacttggtcgatcctacccctagaactctgttttgtgagtgattgtttgatttctctactcatatcttttattttagtattagaaaacatatttctaacattttaattatataagttatagttataacatttaattaatatttcattctcaacgtacgttacaaagttacaaaactacatttaagaaatagcataattagtaagaagatcacaatactagctttcttgctacatgaagttaggctgctactcagtttcggtcctgtaaaatcaaggtccaaatacgaaaaaaaaatctgaatctttttaaaaaatttaaacttgcaaaaatcttttttttcttctcataattatgaaaattatttaaagagttttcagaaagtaaaaataatatatccgagacatgcaatcctattagactttgaaagagttttttcaatgacattgtatgatgtaaaaaatactaacataaacgatcactacacacaagaaaaaaaactttaaaaaatacactagaattggtgcacgggaaaggccgattgaaaataatctaggcccattaaagcgaagcccattctcaaccctatatatttgcggggttgatatttaattttatctttcaatcagggatttcgaaaccgaaccgactctgcttatctctcaggtaaatttctctgctccttatctcttcatgtttctttgcaaattcatcgactaattgcatagatagcctacaacttatatatatatatatattctgaatttgtttttttcttttcttacctttaaggccttgaatgatggagggaggcagctgtggccacaatatcggtctattgggagataaaggggtgtccggttccggatggctatgatgctcttcgggtaggtccgtctataaaacgtaatttgaggaagtttaactacactggccctatcaccatcactgccgttggcgtactatcagaggtccctcgagatttccttgaaaccactggagagtggagtcagtctctttctcaagtcttagttgtttctgaaacaggtcccacatacatggtttcgcttttcattgactcccctgattctaagattccacgtccacataatacctatgaagacgacgaggctcccccttgattattttccggagaaataatgcctactaccattggtgagggaagaagcaaccaaaccttgagatttctcatcttttgaattctggggtttaccggaaatcttggtaaatagaaatgtgaaatgtaccatcctttaataatcttttcttattatcttttatttccgtgatttaatgtagtaaaatcaagttcctgtcacttgaagttgtacaacttacaaaaaaaaaacagaacacagagaaagctactctgtatccaatgctctgtgttatcatgcatatattataaaacccatttcaatgatctttaatcgtcatggtcgcttggaaacaggtcagtgcagagctctccatagaatctagtcacaagatcaatgaagattggactattaagattcttccaataatagagaagctcttccatgtccatcaagtcatctattttcccatcttcaacgaacatatggatcatatagttctcgaatcttctgcaagcctctttcacaccatcttcctttaacatatgtctttgactcgtcctcgctttcttgttcctttgcgtcatagccaaaggaaacatctttcttgaatgcagaagcttggaatcatcgatcagactagctgcagtggcatatttgtagaataaaatttagatcaaaggtactctataaaatcgacaatagttacaaaagaaattgttgttacacggggaatttctgggtctgatctggctcatcctctgctccttattagtattgagaaaacagagacgagacaacaaagaagatgatgaagattgtgtggtattgacattgcgaaaacgagcatggaagaaggagatgaatctgttgcatgattttgaaagctttgatttcaagctaatcaaacttgacttcagtctcattctcgatccttccgaagctgatttattctttgttgttgttgttgtggtataatgtgtaggtttgggagggtggttcgagttacgtgggtttcacgtcttttcctttgacacgaagtcgtgatggtggagtcccatgaacttgagccttaatttgaatgttttttgcaaatttaattttaagctataatctgacctagatattgtcacattatgagtaggaggagtgggtaaatatatcggtgtttactgggatcagtagtagtcgttagggttgtgactgaccccgctcgtttgtcgaaccctagcttcaaatatgagtcgttgacccaaaaaaaaaaagctttggtcaaacacacacgtgtgaggtagggagaccacaagctaattggtgaaaaggagacgacacgccgagttttatgcaaatatgtcttttattattctctacagtttcttctacaccattattgttatatactatgactatggctatattaagagattggacatgaacctgaaatcttgtttaacctcttttgttgaaaccctttgtcacgttcgccgaattatgttttggaagcaatttaccagaaatattctatttagtctaattgatacccaccaatcgacctactaccgacagacaatttttgaggacactttgttgctcaattttcaagtctaataaaaccttttaattctcaatctcatctacgtacacctcaattatttcgattacaccggtttagataggatattttatttaaatttgatttgatttggtttaacttggttattcggttagggagagaagccggaatgagtttggtacaaacaaagacattctatgaagtggatcccaattttgttccgtcttgtcccttttacatcccaattctacactttcttctctcttttatttgtcacatagaaactctgcaaactatacatattttttttctctcttttatctgagaagatcacttattttttgaaattagagatgaggaactataagttaagattgtcagttatgagcccaagtgaatggttccacaagctcaagaacatgacaaaacctagaaaaaagcattctcttcctctttactccataaacactaccaagaagagaaaaccttcctctgagtcaaagtctcttccttactcttcaacttcttacttcttcaataggtcacgctcacgcacatcctttgaatctaggatccttcaaatttcaccaagaaactctcttcacaacatacagagcaaaagaaagactgtttacaagccttctcctccttcctcttctattgtatctgcaggttttaacaaaacatttcatcaaagccatgattctctctctgcctcttccaacttgaaagtcatttcttctgaagatgatattatcatcgacatgaataatagagatttcaagaagaaaactttcaaagagatcacgaagtttgattcaacggagaaagcctgtcgtgcaagtaaccgaaccaaggaaacacatatacctcatcatctctctgtgaaggtcagtaaagagaaagaagatgaagaggaagatgcatgtcgaaccaagaagaaacatcagaaaacattagtttctagtggaagaagatcatcagctaaatctccaaggataaagctcagagcgagatctcctagaattcaagtctcgcctcgtagaagcaaatcaagatcacagaacaaacaaattcttgacagttttgcagtaatcaagagttctatcgatccgagcaaggatttcagagaatcaatggtggagatgatagcagagaacaacatcagaacctctaacgacatggaggatcttctagtatgttaccttaccttgaatcccaaggagtatcatgatctcattatcaaggttttcgttcaagtctggcttgaagtcataaactctacatttgcatcgaagtagaatgaactatgatcaaaagctttaaatctctggttaattgtagttcttttaaagagtttgatgtagccgtggagattttctttgcaagaccagtttttgtgttgtctgaataacgtgataaagacatataaatcactcgcttccttttcgtctctggttatggtttgtgaaggtaatagaacatacttattcagtaatttaaaaatcagtaactaaaacatacttattcaatacatgcctcatggatgataataattcaattttagaattaaaatgtgaaacagtatgtgctgctaaatgtttatgtgatattttcagaaacaatatacaaatccaaagagttttattatattagtttcatgtagtgataaaccttggattagattaggattgatggagtttagtcatggtaacgacttatgtaacaagagcgaaaatgtcaaaagaaaaaaaaaagagtcaagaaaaggccaaaagtgtagtgacaagaagccacacggagacaagtcagaaacccatcaagtacggagtagaaatgggttccagtcctaatgagtaatgaagcaggaaacatgaaaatggagcctgaataacataaatcgttagagagagaaactaacactgacacagaagagtatatggttaaagaggaaaagcagagagagagttttaagaacctaaaggctttttgttgtcgtgatgaagaagatgaggaccactgttttgctgctgcttcccaatgcccatctcctctaccatctatttatactggtagtacttagtacggtatggacagacatttcttgggaattgatcaaaccacaaaacataaacattaaatgatgaaacaccaaactcgattttgatatatagtgcacgggaaaggccggtttaatacaaactgtaggcccattaaagcgaagccccattatcaacgctatatatttgaggcgttgtgattcttattcttctctttcaaacaaggatttcgaaaccctaatcgatattgaggtcaagattcaaacaactctgcttatctctgaggtaaatttttcgaaaccctaatcgatatcgactcattgcgtaaatgaaacgccaagacagtagaaaacgtaatagaaaataatatgaaaccgaaatgaactgctcgtctacatttgactaaggaacctagtttacttaacaaaaccattcactagacaatcatcgtcgtacgctattctatgggtcttaaagacaaaaggctacaaaatgttacccagtttttttacaatacgtcattgttcagcagttgttggtactcgtctactcacaaaaaggtctgatgcctactccagtactccaatacctataagcaaagaatggaaaattgatggagcaattatacgtaagattaagaacaacgagagatataattatgattttaatgccgaaaagaaagtaagaagatcatcagctattaaaacaccaaccctcctaagctcaactaacccattataaagttagactaccatgatgggtgagcattgatttgtttacccatcaatttatcacatcagtggtcaaatatatagaaatcataaaatccattattcctgcatattcaatttctcccttctacagaatatgactcgttgacatagtaaaaaaccaacattgatagtattttatatgctgtattaagaagcattatacatacgctcatagttctacaggtagagtttaccttcaaagctaacttgtgtaagcaactattggcttcttagaacttggctcactatttgtgagggttcatatcattacccctcttctactctacacactttagtttcggggaactgagatgctaatgcagcagtactttattgttattctcttctaaaggtcaccagggtgacgattgtaccttatagactatgactatgtttaactcacctactcaatgacggcgctcttcacgtctcatctcaactcgaaatttatctttaatatcaccctgtgagagaatgtgtctattattagaaacaagataaaattaactccgagaaatgaataaagaacagaaagataagtgaagctgtgtacattagttctgcgcactagaactggattctcatctttgatccgtttccagtttgcaccatacctgaatcacaaaagaatgcatcaaatcaatagaaatgcatgaaagatattcatctaacatctaggagaatcttcaggtttcagtacttttcatagcctttgagtacggccagcgtttctgcagtactccaaggaagttttggccttctagcaccttctgaacatcggtttcttttcaaaggagacacgacaattcttttacgttttgatttattaatcctttcaatgtcatcgcccatttctccatctgaatcatcaatggagtcattccactaatcaaacaaacaaaaataatgtgaaaaacaaactcatctgaacaaacaagtcctatgttatacagttgcatgaaaagcacattatattaactcagctataactccgaaaccgaacatgcaaagaaatcaattcagcgagtcctacacaatactaattcccaccgagtgcagcgggctggtcagacaatatgaaataataggaaaagatcaaagaatgaatcgggatagtgctgagaaaacttagttaatctgtgtgtattgggtgggtattccatcgacctagctatttaaacacaggaagtctgaagaaaaaaacataaatgatatgatgaaacaattagaaaaagaagcaaatttacttcataagtgtgtgctgtgctacgtggctccatcaagctaggccttggtgcagcgtttgttgcagaaggattagcaacatcgttttcttgttctgtaatcgtctcattgtttaaatttgaaggtcttcctttttctaaagctttcattagctcgattttactagctctcagctttctgagcgctctgtcaacaactgcagatggaatgggattgaattgactgggtacatatacagcttttgaccctccagaagtaggtctttccagttcagtatctaagaggctctctacaacaaaaggaatgcatcagaccctttcagtatccacaaaagcacaatcacatcgtaacaaagtaaatagagatgaaagaaacaaagttgagaaagtgtagaccttggtcgtcttcttccatagcttcagacgcctgactgttctgattacccacgccctctcttgcttcaaccattgattctgtctcttcagattcttcactagattcaatctcatccgattcatccatgttgagattctctaaaacaagattgggattcaaatctaaaacaaccttcctcaaacaaaccaaagctttgtctcttgtatcttcatccatcagtgtcttacaagccttgtcgtcagtgtgggccttccataatcttcgacagcatttcaagaggtcaagagtaaccaaacaactaaccttatcgcataaaggcataatcctaccgagccatatcgttttgattgcttcggtgtaagccttttttgcatctttctcataagcgagacacttcactgtgcactccacagctactttacaatacgcttccgtgactgatttgggtactttagaaccttctttgtgtaaaatctccacaagattctctaatcgctcgagattcttctcttccacaataccatcctcaatctccatgaaaatcccttcgagtatagcttccttccactgcgagagtgccattgttgctaaatcaaccaagcaatgtttgggctttttagagaaatcagtactttctcactcgccgattccgtctctcgaattgggttacacaggaaaggtcaattaggtttgtaacacttcaaatttccaatttttcacttttcgattttcttccgattacagaggcgaaaacgaagcgatggaagaaagaaccataactttttgccgtttccatctttaaaaatagaaacgcgtgtcgttttatttactataaacggctcacattcaatatccctagggagaaaacggcaagatactcactgcttctaactttttacattttttaataaacgaaaaatcatcagaaggcatttgcggcggaatcggattcattgggtacagagaagcaagacctaagaagaggaagctgcagcagcagcagaacttgttcaccagtcgctatcttcttctcaaaacgagaacaatgtcttcaatgaaatccgtctcggctttggacaatgtagtggtgaagtcaccaaacgatcggaggttatacagagtgattgaattggagaatggattgtgtgctctgctcattcacgatccagatatttaccccgaaggctctgttccggatcaaattgatgaagatgacgaggacggtgaagaagaagatagtgacgggagctctgaagatgatgatgatgatgaagatgatgaggaagatggggaaggagatgaagaagatgaggatgaggatgaagatgaagtgaaagggaaaggggatcatcagaccaaaaaggttttcaattaaaagctatatctctgttttcttcttgtatcgggttttgatttttaaactagtatattttgtgttgtgtgtctcaggctgctgcagctatgtgtgtttcaatgggaagcttcttggatcctccggaggcacaaggcctggctcactttcttggtattttcttctttctatgagtttgaactacattttgaatgcacttcttctgattttttttactaattgaatcactctcatgtttatgtttggtgaagaacacatgctttttatgggtagcactgagttccccgatgagaatgaagtaagcattgcattattttctatggtttcaatggtttggcattatttatagattcatatgaaataagtattctgcttactttagaattttctatctttgaatcaagaaactaaccgagttagaatgattagatataacaatgaatctttacggagcttggatataatggatatggacttcgttttgttagcatgatgtatcttttaattcttccggttttgacttcttgcagtatgatagttacttgtctaagcatggtggatcctctaacgcatacacagaaatggagcatacatgctatcacttcgaagtcaagagagaatttcttcaaggggccttgaaaaggtacaaaaattgcttgagctgctacttcacatatctagataaacgtcattttgctgtaaaatttaccaaggcagtcgatatttatgtcggtatgcatgcccagagattgttatcattgtaaggaagatgcatagttttttatccttcctggtcgtcattatgtaattacttgtctttcctataccagttgttgtaaaaaaattccgtacgcaatatttgagctttctgttaagtttaatcttttccttttcatttttcttattcaaaatgcttatttgaccttagaactgttttctcgttattattagattctctcagttttttgttgcaccgctcatgaagactgaagctatggaacgggaagtcctggccgttgattcaggtttatcttgcttgtttcgtactcttatttctttgtttgaaattatcaaaagatccatctccaatcaacattcagatatataaatctttctatatagttaaaagtgtcttgctaacaaaatccaaatttgtagaatttaaccaggccctccaaaatgatgcatgtcgcctgcaacaacttcagtgctatacatctgcaaagggtcatccttttaataggtttgcatggggtaaggataccgcagtgtgccttacttgccacatttaagatattcttgagaggatttattgttaatatgtccttcatgtgctctggaaggtaacaagaagagcttaagtggtgcaatggaaaatggggttgatctacgggaatgtattgtgaaattatacaaggaatattaccatggtggactgatgaagctcgttgtcattgggggaggtaaaattctctaggtgtatgatctggctgtgattcttggaaaatctttatattcattcctaaatattggcttgtctttactgtttgagtttattgtagtttaatggttacctttaatatcttgcagaatctctcgacatgcttgaaagttgggttgtagaactatttggtgatgtcaaaaacggatccaaaatcaggccaactctggaggcagaaggtcctatttggaaaggcggtaagttatatcgcctagaggcggttaaagatgttcatatacttgatttgacatggactctccctcctcttcgctctgcctatgtgaagaagccggaagactacctagcacatctattaggacatggtgagaaatcacatcgattttatcttttgtataaagttttattaagtgtgcttgtgcatgtccatattgaaggatgttgtttatcacattgtgttttttagagggtagaggaagtctgcattcattcctcaaagccaagggttgggcaacctcactgtctgctggtgttggggatgatggaatcaaccgctcgtctctagcatatgtgttcggcatgtccatacatctcactgactctggtttagagaaggtatcttgtcacatacttatttatacttaatttcccctaagtaagttggacgcaggggataattaatcattttcaattgtagatataaccctttgtctctgaattttgaagtaatatatttacttgtttcttattttggttgataagctgatatagcctgttactagctgcatatacagtagtcttgttcttgccatatttgcttttgttatgttactatgtcccatgttgaccttatggcaacttttgttaacagatttatgacatcattggttacatctatcaatatctcaagttattgcgtgatgtgtcaccacaagaatggatattcaaggaactccaagatattgggaacatggacttcagatttgctgaggagcagccggcagatgattatgctgctgagctctcaggtttgtgcttatatatagttattgtctattaacttattatgttggcatgtaaagcctaaatacttttagtacctatcatgcattgatgtctacatgtaatgtaaagacttcaacatgggtttcttagttaatcattgaaagtgttaattgtacagagaatatgcttgcttatccagtggagcacgttatttatggtgattatgtgtaccagacatgggatccaaaattgatagaagatcttatgggttttttcacacctcagaacatgaggattgatgttgtttcgaaatccatcaagtcggaaggtattttaaagattcgtcgagtatggaacttttgaaaacaaatttatatacttagtattcttcttttgaaattttgcttgtttcagagttccaacaagaaccttggttcggttctagttacatagaggaagatgttccattgtctttgatggaatcatggagcaatccttcagaagtagataactctttacatctcccctcgaaaaaccaattcatcccttgtgatttttcgatccgagccattaactctgatgtggatcccaaaagtcagtctcctccgagatgtataattgatgaaccgttcatgaaattctggtacaagcttgacgaaacttttaaggttcctcgtgcaaatacatacttccgcataaatttgaagggggcatatgccagtgtgaagaactgccttttgacagaattatatattaaccttctgaaagatgagcttaatgagatcatctaccaggcaagtaactaatttttaggaaaatcttcttagatcattttgtttttgcattgacattaatatctgactttttgcaggccagtatagcaaaacttgaaacttctttatctatgtatggtgataagctagagcttaaagtgtatggctttaatgagaaaattccagctcttctatcaaaaatcttagccatagccaaatccttcatgccaaacctggagcgatttaaggtatgtgaatatttgcatgtatagttgtcatatttttaattctccttttatcttaaatttcaagttttgtgtcattttcttatcctcatcatttcttgatttaacttctttttctttctaaccttgtaggttatcaaagaaaacatggagagagggtttaggaatactaatatgaagcctttgaaccattctacatacttgagactgcaactcttgtgtaaacggatctatgacagcgatgaaaagttgtctgtactaaatgatttgtctctcgatgatctcaacagctttattcctgaactccgctctcaggtaacattctgcatcagtgtgattcctgttttacttaatacacagattttgtgactgttctctggttttgtttaaattgggcaaaggtcatgtaatacctctgttatgttttcagatatttattgaggctctatgtcatggtaatttgtccgaagacgaagcagtgaacatatcaaacattttcaaagacagtttgacggttgaaccactcccaagcaaatgtagacatggtgaacagataacatgtttccctatgggtgccaaacttgtgagagatgtcaatgtgaagaacaaatctgaaacaaactcagtagtcgaggtaaaaaggaaacagtattttcttgtgataagagtcagccaagaagagttgaaaacattgtactttcctcgggtataatcatggttttgaattttaacctgcatctgatttgcagctttactatcaaatcgagcctgaagaagctcaatcaacgagaacgaaagctgtgctggatctctttcatgaaatcatagaagagccattgttcaatcagttgaggttagtcatcacatgtttacctagtttttttaatagatcaaaattgtattcatgtatagtcacacatatatatacatattttggatataggacaaaggagcagcttggttatgttgtcgagtgtggccctcgcttaacgtatcgtgtgcacggtttctgtttctgtgttcaatcttctaagtacggtccagttcatttgctggggagagttgacaatttcataaaagatatcgaagggcttctggtaagtctgtaatcaaaaagaatatattgattttttttgttaaatctttacctcgctccacatatgttaatcggactgtaattgcaggaacaactggatgatgaatcctatgaagattaccgaagtggtatgattgctagattgctggaaaaggatccctctctcttgtccgagacaaatgacttatggagtcagattgttgacaaaaggtaaggatctcaagggtttgaagttatgtgacctgtagtatctatagaactttcaatgatttacttggatccatatccacaacggtcactggcgaatgaaaatggagttaactctctcacaggtacatgtttgatttctcccacaaagaagcagaagaactaagaagtatacagaagaaagatgtgatcagttggtacaaaacctatttcagagaatcatcacccaaatgtcgtaggcttgcggtaagggtttggggatgcgataccaatatgaaagaaactcaaacagatcaaaaggcggtgcaggtcatcgcagacgcagtggctttcaagtcaacttctaagttttaccccagcctttgctaatgagaagaaacatacaaaagagttttgcttcgtcttcccttttttttatcttttatattttgattcactcaattttcttcataccctcattggataggttatacttttgggtgacaaacaccaaaaatatccctttttgttacgatttgagaatacgctttttaaattattatttttatctggtggataatttgatatttattgattagaaaagcattatcttatacaatgtatagatttcatttacccaaaaagaagcagcaaaactaaaaaacagacagaaaaaaaaagttatcaatcgataaaaacttacttcaaataaccatcgaaactctcactaagaaaaatcccatttggaacaattttctccttaatgacaggtatatgtccactggaacaataaatgaaaagaaagtataaaatgacctttgattgtacagtgaatgtcttacataaataaccaacggtaaaaaatcaaatgtgaacgtggatcatgaatagcttgtttgataattacgattatatcccgcggttaatttctctctggtagggcctatcaaacgtagaaagcgaaaactatctttcttcttcctctctctcactatttttctctgtacggtggtgagtgaagaccatcaaaaattgcagaaaataggcttaatctgaatctcttctcctccgtcgaagttttgaattctctctggttctccaattctcctgtgagtctctctctctctctcttccctctttctccttccttatgttctccttgtttcatttcgcgtctcttgaattttgccttcaactgatttctttgatctctgtctcataacggcagatctagggtttatggcttctggctttcaataaatctccttcgttctcccactcttttatctaacgagtttctattttctccattttgcttcagctcgagctgccttaagcttcgcatttacgtttacgttatgcacgaatgaggttcgttttctccagatcgctcttgttttcttcacgttttactgtctaccgttatcattccttgtataatttttggtggattagatcatcgtagatcgtgattgaagaagcgagagataaattaggagagcgaagatgagcgagggccagaagttccagttgggaacaatcggcgctttgagtttgtccgttgtgtcatctgtctcgattgtgatctgtaacaaagcgcttattagcacccttggcttcacattcggtaaccttttcaattcttccttcactgttacaggctcctttgattatccatgttgcgctgctgatattgtttcctctggatctattcttgtgtttgtatactaatgcttactctgcgcgattcgtttcgagccttctcttatttgatgaaattgaggaatagattgttgatcattttacttcatactatgttctgaattgtctgttggttatattttaggtcccttatggtacataaacgagaattgccttcatgattgtatatgtttaagattgtttcttatcgctttagaatttaggtgctcctcttcttttctgtatgactcaatattctttcctaggatacaccattgattcttatgtagtattattatacttgcaagacactgttttatcccattttgatgtctgtgttgccataacagcttttatgtcatcttatgcaattttgatctcataagctatctgttcttactcttgttattttgtatgtacagcgactactttgacaagttggcatcttttggtcacattttgttcccttcatgtggcattatggatgaagatgttcgaacacaagccttttgatccacgagctgtgatgggatttggcatattgaatgggatatccataggactattgaacctcagcctgggctttaattctgtcggtttttaccaggtatagctttttccatttcagttactgcatgatgtgatatccatttttaactagtgttgttctaatttctaacccatcttctgttccgttgataatagatgactaaactagctatcatcccctgcactgttctcttggagaccctcttcttcaggaaaaagttcaggttagcactcaaattctcttccattaacacgtgaataattattgatttggaggaagctgttttacatgacatctatatttttcttatggtcatgcatttctggttgacttaatccaaagttctaattttatatactgtgtaatagttgagcaacttagtgatagcgttatgtctctcgctagtttgtggtcaagggcctagttaatgacacccttattttttttctttgcagtcgaaaaatccagttttcattaaccatccttctccttggtgttggaattgcaaccgtcacagatcttcaacttaatatgctgggttctgtcttgtcgctgctggctgttgtcacaacttgtgttgctcaaattgtatcctatgcctagcctttggtttctcattgctttattctttcacctttctatatatcttgtcttaaaccaattcgatgctgttatcttaaccaattgtacacagatgacaaataccatccagaagaagttcaaagtttcatccacgcagcttctgtatcagtcttgcccatatcaagcaatcactcttttcgtcactgggccatttttagatgggctcctaaccaatcagaacgtgtttgctttcaagtacacttctcaagtagtggtgagactcaatttcccggggattctaccaaacttattaactgatcttcttgcttccatgtcgatcctgcatattaacgagtgcttctttgttgattgcagttcttcatcgtcctgtcttgcctcatatcagtctctgtaaacttcagcacatttcttgtcattggaaaaacatctcctgtcacatatcaggttctaggacatctcaaaacatgcctggttctagcatttggctatgtgttgctgcgagacccattcgactggcgcaacattctcggtattctagtggctgtgattggaatggttgtttattcctattactgctcgattgagactcagcagaaggcaagtgaaacctcaactcagttgcctcaggtatatttcttcatctctctgttccctctaatatatttctgttggtaattagatgagtccctcaaatcatattcctttttatagtaccattgattttgcaattagattgctataaaaaagcatcagtatcataggcttttttcaggtctatctatatatactgacttgttatattgcttaatttggtttactcgggtttgtcagatgaaagagagcgagaaggatccgctaatagcagctgaaaatggaagcggagtgttatcagatggcggcgggggagtgcagcaaaagacggtggctcctgtatggaactcaaataaagattttcaagcctaaaagctttgatcatcgctatttttttatataatatcaaactctctttgtattgtccccaaaaaaacacaaactttttaatttctctttttttttttttttgttccctttttaaatatgcatagcagagaagtaggggagactgaaaaatcaacaaaccttccacaccatatggaaaaaaagaagaaagtagagagtgaggggaagaaaagggaacagctttgatgatccattttattatacacagcagctctcttttttttttttttttttttttggatttagtattacaactctgtattcaaaaggctgtggctatattcatcaacactgaaaacatatatttgatttttagactcttttctatgaatctacacaactcattctagctttcttaccaacttgtcccaattcttattcagttattccatatcttgaccaaaccattttgatgagagtaaaaaaaaaggtttctggtatttattttaaaacatagcgtaaggttcaacaaagcaccagtggtctagtggtagaatagtaccctgccacggtacagacccgggttcgattcccggctggtgcatgagctgtgatgaaattggctttagtattggttgggtccaatgcattctcctgaatatcagatgatttcgcctactctgagctctatttttaatttttatttttgaaatattgcattttaagtttatacaaactattaatatcttgtatctgccaaaatagcctgcaaattccacagaaccaattatgttcaagagcttgagaacagaacgtttacaggattcttcacattaaatactcaaaaaagaaagtttacccttttatgtttgacagctactgccaattacactggatgcatttaggtttcaacacatcaaaaaaaatcaaagcaaaaatatcaattttcttgttctttttatatggatttcccagtgcattccatgtccgccatcaagcctagacaggaagaaagaattgctctgttgccttcagcgccaaaatggttggcatggcacagctcatctaatcaaattttctgcttaatcctaagataccatctgcgttggtcaagatacatcaacagctctcttttggctaacttgttcatggtgtattatgtctgacactttgcttggtggccaatagcgaaacacagatctccctatgatgttctttattggaagtggacccctgcgttttacattcaccacatcatccatgaatcaacagagttcccataaccaagacagaacaaccattaataatatattcgaaagtggttaccagttatgagaatcaaagcttttgttgcggttgtctcctaggacgaagacataaccttcagggacaaactgcaaataaacaggaaaaagaaagagatcaagttagcagcattcttctaataatttttaggtcgagaaaacattcaataagcaagcgcaagtttgcttaccattggttccatttcatagtcaattggctctaagacaaaatcctctgcttgaacagtgtcatttactaagagctttccatcacaaacctatatgatacagcatcaataggttagacaggaatataacaacaacagaaacaaaggttaagagtctgttttgaggaggctggtcatcaagaagccactacataagtaataccgataaagatgaccaaagacttcaatggagaataggatcaatcaacaagtggattagagataagggcttacttcaacccagtcaccttcgctagcaactatcctttttatgaaaacatcagcacaactgtaaccatgttcctgcaattcaaaggagagtatcaagcacctttgaaaaaggtctaagaacatttgaaaacccagaaatagtgatttgagatatataccaccaaaataggaggagccttgaagataactatgtctgaaacctctggcttcctgaaaaagtatgagacctgtccaacaccaaagcaaatagacagatttgatcacaatggtttagtgtgattaagccacatcaccaattaaaagatcaatgtgcatttcttatgtaagaagaaacacatttaagaccatttccaataacaaattttagttccaacaatgcagaattggttaaagccgtcattttaaaaacctctcaagatcaaacatcattctacggtcacaattaagaacagaacaaaccagtaatctcaccttctcggctataacacgatcacccacatcgagagtaggaagcatagatgttgaaggtatagactttggctcggccaaagccgatcggaaaaggagagaaacagtaaccgccgtgaaagcagccttagcatcctccgagcagatattcaacagcttattaacccatccgtttccaccattcgagactttatcactcaactccaacttcactttaggatcacagacctttcctcctctatcaacctcagcaatatccgttgataacgtcgccggaatactacaaggcatccacttggaacccctaaggaacgggatgacagaagaagtcttaaagggagagatcccgagaccggtcatacccgaaaactgtggagctccagtcaaattcatgagagagatcatacccaagacaagtggactcttgcagccttcttcgaggatttccctcgcaatggtgctatacattgatgaagctggtcgagcacgagggcctgagcttggaccccatgtgttggatccgggagatttatcaacaatatctggtatctgattgtggccgcagaacctgggacgaacccatgtttcgaagcatgatctaacgtcgccggtaccgacacgagtcccggcggatgaagcaatgctcctagcaacatagctggagtaggtgaaggtaaccctaatcgccataaatgcagattttgaagaaagtaagggtttcttaaggaagacctagaaaggaataaggaattggaagaatcgatctgccggaaagagaaacggagagcttgttccgccggcgagatcgagtaattgtttcaggcggggaagcgaagaagcgaagaagatggagatctcccagaggagaggagaaggttttggtcgaaagcagagagagtcttcttcttcttgttgttggttgagttgagtcatcaattacatttagggccaaaaatgggcctttaaatatacaatttctattcataatatcccataattaaatacgcaagtatcaaaaatggctataacattgacaaaaataaattagaattatctgataaaaagatggtggagtgggtatttcacaaaattacaattgtgaattttgttgtactgagcaaaattgtttaatacatttttagatgtacaattaataaaagcacacgataaatttcatcgtttttttttcaatcttttgctcgtaagaacataattttttaagccgatttgaattttaaagtaaagacattagcacaacctatgtttcttgtcagttgtcacatattaacatttgctaaagatattttggtgtttataaatcaactataagaaaataatatataacctagatatatgaaataatgaatcatgtatagaccattttgatatccctataatacatggtagacatgtagttatgaactagagacgtaacaaggtaaaggctctgggaccgggcgcaggagtgtgtatgtggaaaactataaagaaagtgaatgaccgcagcacatacgtcatctctctcttaaggttcgcccgaagcttcgttgatatttcttaattaatcagtattatctttaaataattagtcgttaacttagttgggttgagtttgaccacaacctaattaacaaaatggattctgtttcgtttttttttcttttagccaaacactaatctctcgttgtcttcccaaatgcttctatttaatcaaatatttatattgtgctcaagatacatcgaggcttcatacggattagaatttgtctatcggcatgttttgttttgttttttcattttttggcatagttttgtgggggcaatttacttgttgaaccctagtttacatgtattctcttgaatttctcacaattttctcaaatttcgatttcatagaaagttagaaacaaacactcacaattcacaaattcccactggcaaaagatgaaaaagcccaaaaaataaaattacgtatcgccatcaaatagggcctattggtttaaatgtggttttattgtatatcagatattaaaacaaaacaattgtcatcaaagcaccagtggtctagtggtagaatagtaccctgccacggtacagacccgggttcgattcccggctggtgcatgagctgtgaagaaattggctttagcattggttgggtccaatgcattctactgaatatcagttgatattgccccattctgagctctctccttttttttttggaagttattttgcgaaatagaccgagcttctccaaggacgtccacagtccagagagtagatgtttcgtctgataacatggtaacaatgttctaaactctccacgttcttattgttatgcatgttctattgttcttgctagctcagtttggaaaggttggaacttttgttggttctctccaacaatgggtctttgcttaaaggttgaatcgtgttagatgtctttcaaaggtcgaatattttcgttaacagtcttacagagtctcaaaaactaatctctcaatgcttcgtctctcatttcaactccgactccaagtttgggaaattttgtctcatggagaagtccggttgggagaagttgtctcaaaactctaatgggatgacggatgtgagggtgtcttggagaagaagctactgaggaactgccttggtgttgtcgtatcaaaatcattgatcccaaaatcaaactattaacccaattggaatgaacttattaaacatctccatctcctagtaaaataaaacaaaacgtagcaaacatcattgtatacaaaagaaaaatgaaatttattagtctcctttgttccttgaagaacaaacaatgggaatagcaaacaacgaaactcacgacacataaccaacacaaatgtatacgtacgtcctttcttgcacaatggcacctcaaaaaaaagaaagaataaataatcaaaagtgaatcaaatgaattgaaaaaaaaaaaaacctattaacagaaaaatgagcctcatcataatcttgtcgtcaataggcagagctactctcactagcagagagagaaggtccttcagatttgactaagcttgagctattgctactaatctccagcccttgcattcggccgttctgtagaaagtccgacacgctttgagaattggacatctccataggattgaaactagaatgcatctgcatatcatggaggttcattgagccatgatatggtggaatagccatgaaagttgaggaagaatactgaatctgctgcattcccatatcaaacgaatctgaattaccagagatttctcctgtctccatcttcatcctttcaacttctttcctcaacgcttcgtttaaagctgtaacatcaaaaagcaaatattgaagaaatgcaccaaaatgcatacaaagaaattagcttcttttttttttgtgcttaccattacgaagctgagcttgttgttccattgcttgcaacctaagtttcagctctgtgttttcgtttgctagtccatttgtgtctctctggatcaatcaaaacaacattgaaatcaagatctgtctatgtatgtaaaacagaggaaagaactttcctattctgttgggatcaaacgaggaatcgccgaatatggaaacctggtagagagtaagctgagcagagagagtggtagcttcggtttgaagagattgaactttgcgctcaagttcttgaatgtatcgagcttttctctctttggatcgagctgcagattgtcgattcgctagaatcctgtaatcaaatccctaatttcattgcaattcttcaattctgtggaaagagaaacaaatttgaagaagaagaagaaggaccttttggcgcgtttgggatcgatgttccaaagctcagagagtttttcaggaggcatagctttcttagcgtccatgatatcaccggcatacatggcgcatccagcgtcaacggaattgctgtgacggtggcgaggacgagaggaaggaggaggaggaggattagcagcgccggaaacggagttggaggagagggaaggattttgaaagggattgggattagaggtgaggctatcgacatcgatgaaagaagagaagagatcgtcgtcggagggaaggtcgtcggaggaaggtggtgcggcggaggagaggggatccatgaacatgaacatggacatatcgtcggagcgagatcggcggtggaaggaagaagatggaatcggatcggcattaggaattggatcggaggaggggataatagtggcgccgggctttgggactggtggaggatctgatttctccatttttttaagagaatctgagagatgaatgctttggttgtgtgaataattatgattattattcgcaattgagaacaatgtcaatggagataatgatggagatgaagaagacgaagctctttctctctctctctctctctctctctctctatcaaatgaaatgaaatgaagagcgtaggagagaaactcgactctgtgaggagagagaagtgacgtcactaactataaaattgcgaaattgagttgatttattaataattaaaaagaaaactagttgatgaaaagtaaaaggcacattggcacgtgaaccatcgcagcatcttgtctccctcccttttttttttatttttttttcctttttctttgtattttatttaattattcgatttcatgatttaaatttgtttaactttaaatcttctttgtagcattcattacaagattctgtagttgcttcaacgaaatttattaatttaagctgttatggcattacatctccccacgtctgagtgtatatttttgtatctttgagtcaaaattttaacaagtaaaaaataggcagaaagccttgtatgaactgagagtctgagagaatgttttgtgggataataagttggtaacttggtatggaactatctatggattgggaaacaagtaaaattcacttatagtgaaaaatacttattggttggatctaaatcatacggaggccttaattatcaggcccatacaagaagacaagtattgttttgttttaagaaatcctcgagcatataatgcgcctgtagtggacaggaggatgttttgggccttctcttaaattggcaattgggcatcactttgtttaccggtcaaaataattaaaaagatggtcgtattgatcgctttaagtaataagttttttagttaagtctctctaaattgtcttaaacgcaagtagtggaccggcatcatttaatagtgattcaaattaaaaacctaatgatgcttacttttaccagctaaagtttcttttgtcttttttttttttgttttattattatttatcaacatacttgtgaattgtgattctccctttttttatatataaataatgaacatacttaagatatagtttctcccatttattgtcacctaacgggtattttttaaaaccaaattctgttggaaagttcttctctaaacataaataatatatagctcatgtctatgctttttaatagtgcccattgtatttcttttcttatttgagtaatttattccagctgtttcttttttttccctctcgtaatgatacgacatagtgacatacatcttctgtttcttctttttttgttcaagaaaatcataatgactacaggtaattaatcacacttctacaaatcagttgataatcagcaccattttccaataaaagtcgatactttggaaaatttcgtgacttttagtatcgtgggggccaaaatgcacataaagatacgatatcgatgaccaaattgccatatactatatgattccaatataccaatgattgctactatttgctaatggtatacgtttttaaattttaattaatacataaaaaaaaaatcaaggtgggataaaaaggtaactttattgacaatatttggaaattcatcgcacctggcaagagatttacctactgtcattaaaaaaggattaaaaaaacgacaaaaaggtcaaagacaggtcagacaaggaatcattaaacaaaggaagaaaaatagcaagtagaatggttttgacggaagaaggtggtgaagttatggcggcggcgcaacggaaacttatgatgacgctcttccgtcggtctcatccattacctgaaatagtcaaacttagaaaatgtcgtattatcactcttcaatgctcccacccaataccaactactttcctctttctttgtcttgtgtttcttacttggtcatggccttttccttctaaactctctctctctcgagatttcgttttttccttgggtctcctctgtttcctcctctctcgatatgttttcgacccatcatgtctctcgtctcctcatacctctgctcttcttcttcctcttctgttgcttttcttctacttttgctcaagacgacatcaccaatcccgttgaaggtttcttttttgttgttgttgttgttaaaaggctttgtctttggtgttagatcttcagacaatttgtgtctgtgacaatgggttttcttagctttcgactgatttggtactgatcattgatgttttttttggttttagtgagggctttgcgagtgatcaaagaaagtttgaacgatcctgttcatagattgagaaattggaagcatggagacccgtgcaattcgaattggactggtgttgtctgcttcaactccactcttgatgatggttatcttcatgtcagcgaattgtattgtcttcttcactcttgcttttttcttttatttggtcttccttgagatttgtttgagttagctttgtttatacttgtaggcaattgttcagtatgaatctctcagggaacttgtctccggagcttggccggttgtctcgtcttactatcctgtacgtgtttttaacacgatatgttgcttgatcttttgtcatactcaatggtgaataactttctttttgtattgtacaacttcttctctaatgccaggagtttcatgtggaataagatcaccggaagtataccaaaggaaattgggaatatcaagtccttagaactcttgttagtccaggactttgttgtttacttccctgctttatttgctttgggattggctgctaacttcacttttccaggctcctgaatggaaatctgttaaatggaaacttaccagaggagctagggtttcttccaaacttggacagaatacagattgatgaaaaccgtatatcaggaccacttcccaaatcttttgcaaacttaaacaaaacgaagcacttgtgagttctttaatctggtgtcgagttgtacttggctgtttcaatatggtgattccttctccccttgaatatgttacatttattgcttttttttggtcaatcttatctttttccagtcacatgaacaataattctattagcgggcagataccaccagagcttggaagcctaccatccattgttcacatgtgagttggtagcagtagcaggcttaaatgattttacttgaaaaatgctatgttttttacctaaactcagttttcatgtctagaacatgctacacacgctttacctattcaatgtttatgaacatttacttttttttttcttttttcttacagccttcttgataacaacaatttatcaggctatcttccccctgagttatcaaacatgccgcgtttacttatcctgtaagtttatgtcacagtttctgttgatttccctggtcctgtcaccataaggactggttacccatgtgtttcttcttttcttttttttgacctttttcctcatgtttattttggcagacaattagataacaatcactttgacgggactacgattccacaatcttatggaaacatgtctaaacttttgaagatgtaagtgatagtttcattatgtatctgaaatcactgatgtgtgaggctggaagggctgtcatcttctattaatgcattcaacaattcaatacgaaagtcatgcattggatttgaattaacctgtgggaatagtaatcagccatatttgagctaattaggatagtgcattctaaatgtagagatactggttgtcgttttctattttttcctgatctttttgggcataagatacatgtgtatgctatgctaacttatgcatatttgtcgtatgcccacgggcaggagtcttaggaactgcagcttgcaagggccagtgcctgatcttagcagcataccgaaccttggttatttgtaagtcttataacttatctagacgcttccttatatagtcgtgcaagccttagcgaaggcgaattaacctcatctatttctggttgtcggacatgaattccagggacctaagtcaaaatcagttaaatggatctatacctgcagggaagctttctgatagtatcacaaccatgtaaacttttagcgcttttcataattctggcctttgatttaatccgggcaatgtactgggattagtattctctttttggggttggaaatgaagtgcttttaactttgatatcttctgatgaaaatactgcagcgatctatccaataacagtctaactggaaccattccaacaaatttctcaggccttccacggcttcaaaagctgtaagtctgtttgattggtgtagcgagttttgtttggtttctgaaatgctgttgttcgttctatcttggatatgaagatggctgattgtttgttttgttgtctacctaatgtgacaggtcgcttgcaaacaatgctctgagtggttccattccctctagaatatggcaggaaagagagctgaattcaaccgagagtattatcgtgtatgactgttacaaaaacaatcatatctcctatcctgttacctagaagcatgttccaactttctttatattgtctcttgacaaacgtcagttcctttatgttttcagggatctgcggaacaatgggttttcaaatatctctggcagatccgatctccgtccaaatgtgaccgtctggtttgcttctgctctttcctatttctatttattatctgcccatacgtacttatttttgctttgcatatcattctagctactcaatgatgtatataactgctttttggatcttgtttgctcattctgaaatgtattaaactcttttcctcagattagtgtccacttttcgggtatcatttaacaacgtttgttttttcaggcttcaggggaatccgttgtgctcagatggaaatctgcttcgattgtgtggacctataactgaggaagacattaatcagggttcaaccaattctaatactacaatttgttctgactgcccacccccttatgaattttcaccagaacctcttagacgttgcttttgtgctgctcctctgcttgttggatatcggttgaaaagtcctggtttctcggactttgttccttacagatccgaatttgagcaatatatcacctctggtcttagtttgaatctgtatcagctacgccttgactcattccagtggcagaaaggacctagacttcgaatgtatttgaagttctttcctgtttttggttcaaatgccaacaattctttcatattcaatcgtagcgaggttcggcgaataaggggcatgttcactggatggaatatccgagacgaagatctctttggtccttatgagcttatgaatttcacattgttagatgtctacagagatggttagtggcagaatattcgtcctctcatatttattcaaaacagaacgtggttaaaatacaagtaaacgagctgatgtctttctgctacattaaacataaaagtgtcatttgtttatcagcgtccctgataacaatagatcctgtcttacctttttgttcttacgaagctataaaacttttgcatacatggacattgttttgactgtcatgctttttatgttcagtgtttccttcagcttcgccatctggtctaagtaatggtgcagttgcgggaatagttcttggttctgttgcagctgcagtaacgctaactgctatcattgcccttatcattatgagaaaacgtatgagaggatacagtgcagttgctagaagaaagcgatgtaagcattttcttgtggatgccgatttgtgctcgagtaaatgatttatcggaattgtacgttttttttggtttttggtgttacaagtttgattcattcatgtgcagcttccaaagcttctttgaaaatcgaaggtgtgaagagcttcacttatgctgagttggctctggctacagacaattttaatagttccactcaaattgggcaagggggttatggaaaggtatacaaaggtacacttgggagtggaacggttgtggcaattaaaagagcacaagagggatcattgcagggtgagaaggagttcctaactgaaattgaattgttatcgagattgcatcacagaaaccttgtttcgttgcttggattctgtgatgaagaaggcgaacaggtactttgtccaaattcctcttctggttgatgtccaaaacgtttatatgtatctcttattgcttgtattgttaagcgtgcagatgctggtttatgagtacatggaaaatggtactttgcgagacaacatttctggtatgttttacttcttcactgagtcatctatagtggtgcttgttctctatgtgaatcagcaaagactacccaccgatgttcactgttcttaatgtgaattctttggagatgacttataagcagcatagatgatattgtgtgcttttaagttcggctctattcctcgtgaataacaatttacatacaaatatgtgttttggcagttaaattaaaagagcctctagactttgcgatgagactacggattgctttaggttcagccaagggaatcttgtatttacacacggaagctaatcccccgatatttcatcgcgatatcaaagcaagcaacatattgttggactccagattcaccgcaaaggttgcagattttggactctcaagacttgccccagtacctgatatggaaggcatctcacctcagcacgtgtctactgttgtaaaagggactcctgtaagatctcattcctgcattgcttctctaaagtttttttctcaaactcatgactgagagttatttgtcgacttgcagggttaccttgacccggaatatttcttgactcatcaattgacggacaaaagtgatgtatatagtctaggcgtagtgttgttagagctctttactggaatgcagccaatcacacatggcaagaacattgtgcgagaggtaattctgagtagataataagagcgtgtgttttccttttaggcgttatataaattgtgtggaatgtttgtttctgtcagatcaacattgcctacgagtctggttcgatattatcaaccgtggataagagaatgagctcagttccagacgaatgcctcgaaaagtttgcaactttagcgctgcgatgctgcagagaggagacagatgcgaggccttcaatggcagaagttgtaagagaactagaaatcatatgggaactgatgccggaatctcatgtagccaagacagcggatctctctgagacaatgactcatccatcatcgtcatcgaattcttcaatcatgaagcatcattatacatcgatggatgtctccggctctgacctcgtcagtggagttgctccctcagttgcacctagatagaaactttcttcgactcatacaccatacactgtttctttgattattcagtgtgattttgttgttgttctttctttgtacaggaaaaatgattgtaagcgatgtaacggtatatgttgcagacattttaatatgtctgcctttgtgagttatctgttccgcttcttatgtgttttgacttggatcatactggatttttttaccttcgaatcaatataacagtcttataattatacgtacactttcccaatgttatacaaccaataataataccaaaaaacacattacaaagatttggctcaattttgttccttattgaataacatatacatagctaattaatatcataaatactccttcgttgttgtttaacataaatatggcttcactaggggaacgagcgagctgcttaggtgcatggacattacttcgttggtcgaaccaacgagcttgccaccaatgaagacggctgggaccggctttgaacaccctagcctcataagagccttctctatctctcggcattcagggtccttatcaatctcgtggatcttagggttaacaccaagatcttggaagagaacttgaaccgcataggacaaacaacaggagctcttggtaaatataaccacccctttttcggacgacattctcataactttgtccattatcttgcataaggtgaagaagaagaagtatatggattgaaaggagtagctagagtctcaggctatttataacaggagggaagaataactgaataagaatccacatacagagatcacaagaagatcgttgaaaatgttcccaagtccgactttattatatatgagcaagatgattcgacgagaccgaaccttttcttcggcagcctttacccttttgattgtaaggaccaataatatgaatgatcattccatatattttctcttggatacaaagatgcggtctcaacgatcctcctacaagttgctaaaaagagagtgtattcgacgttgaatatagatagatagatgcttcatacttttggaccatttgatttattctgcagattccatgaatatcggacataaggaatcttggtgacccaaactatgcaacaagaaaatcaacttgcattcaacttttcatagctattccaacttggttgggtctcttaaaggcaaaagagctcacatatttttgtatccttaacaaatcttgccgtaatgttgtttcttttgttcagattatggttttaatgtttaatcaaagcttgtacaagtgtaacgtagtatacacataacgtaatcatgatcaaagaagggcaagaatcatatgagaccaaaaaaataatgacaagccaaggcaatgggaaaggaaaacaaattcagaaaactgaaatgaagatgaagaagagcagatgatggagaagagaatcagattgaccataacagtggatcgagcttgtcagtcgtttttcgtgccatatagatatgatgagaatcaaagaggggtatacaacgtgatgattttgaagggtatagttgtcattcttcttactgtagattctgattgaggggtaggtaatttgatttcgctgtagaaattgattggttttgggaaatattcaatccaaggatagtgtcgagcaaccatggatttgtgttttcaaaatcccgtaaagtgtggtgatcgtttgttctccgcattgaatacctctacgtattacaagctgggtacttcgaatttagggtttaatggtccagttttagagaatcggaagaagaagaagaagctgcctcgtatggttacagtgaaatccgtttcttcaagtgtggttgctagtaccgtacaagggacgaagagagatggaggagagagtctgtacgacgccattgttatcggttctgggattggtggattagttgctgcgactcagctagctgtgaaagaagctagggttttagttcttgagaagtatttgattcctggtggcagctctggtttttacgagagagatggatatacttttgatgttggctcttctgtcatgtttggtttcagcgataaggtttgtttgttcatcatcttgtgattttcaggagaactgaacattagtagaagaagcactagtttgtttggtccttggctaaagtaataatggcttaatttgaagggaacaggggaacctaaacttgataactcaggcattgaaggcagttggtcgtaagatggaggttatacctgatcctaccactgtccatttccatctccccaataatctttctgttcggattcatagggaatacgatgatttcatcgctgagcttacgagcaagtttcctcacgaaaaggaagggatccttggattctatggtgactgttggaaggtctcatgtgatttaatttgacttttacgagtgttcactgatatatattacaacttcttaactgtggtttgaacagatcttcaactcattgaactccctggaactaaagtcactagaagagcctatctacctttttggacagttctttcagaagccgcttgaatgcttgacactcggtattcatctaaatcttctgaaatgaatttggacttaaagttgtgtttggtgtgtgtgtagatatttattgctgtgagtccgtatacgtcctgcgtagatacacatagaaaaatctactgacatgaatcttgttgtgttattctctgtgctgtatagcttattacttgccccaaaatgctggggctatagctcggaagtacataaaggatcctcaattattgtctttcattgatgcagaggtgagaaaaaaacattattttttcttaacttgcacaatttttttcactcaaatttatatccagaatatagcatggatatcacccttcatatttgcctgcagtgtttcattgtgagcacagtcaatgctttgcagacgccaatgatcaatgcaagtatggtaggattcttgtttttgcatttggtgtctactcgtgttaccctttattttattttttcttatgtcttcaaggacaggttttatgtgacaggcactatggaggaattaactacccggttggtggagttggtgggattgccaagtctttggcagaagggcttgttgatcaaggcagtgaaatacaatacaaggctaatgtaaaaagtataatacttgatcatggaaaggcagtaagtttctgtatgagtcttgttgaagttttatttttttcattaaccctttgaaattcctttttggttatgaaaatcgttttattttctggaccttaattttcaggttggtgtaaggctagcagatggaagagaatttttcgctaagacgataatttcaaatgctacaagatgggatacgtttggtaagagaaaacaatgacttatgtaactgtcgaatagcttcctaaagaaaaagaatattttacaaatcttgttttgtaagtgtacttaaaacttgtattttgctgtgctttagggaagctgttaaaaggagaaaagcttcctaaagaagaagaaaatttccagaaagtgtacgtcaaggctccatcatttctttcaattcacatgggtgttaaagcagaggttctccctccagatacagattgccatcattttgtgctcgaggtttgatagtttcctactaagatctattcacttgccaggtttatagttattgaatagcgactttcgttttgctgcatccgtaggacgattggaagaatctggaggagccttatggcagtattttcctcagcattccaaccattcttgattcatctttggctccagatggtcgacatatacttcacatatttacaacttcgtccattgaggattgggaggtaaggctactaatattattgctattttccttagctgtagaattatcctattgagtttttattgatttgctcatctttgtttatcaattcgtctatattttggtactagggactccctccaaaagagtatgaggcgaaaaaggaagatgtggcagctagaataatccagagactagagaaaaaattgtttccagggctcagttcatctattacgttcaaggaggttaggcttgttctttattcccctactattttacatgcacattgtagaaatggtgatagtaggtctgcatgatatgagaaatctgtatctgaaacccatgagaataagcctatgccttatttgggtatttagcctgtatatctaaacgttttttgaggcaggtgggaacaccaagaacacacagacgatttcttgcgagggataagggaacttatgggccaatgcctagaggaaccccgaaaggtttattaggcatgccattcaatacaacggtaagctaaagaaagagatagatagatagataacatcaggtttagttagttctggtggtgaatggttttgctaatgaaagaatggttggactaataataggctatagatggtctatactgcgtgggggatagttgttttcctggccagggagttatagctgtggctttttcaggagtgatgtgtgctcatcgggtagctgctgatattggtgagaaaatgccatatttttgcaatatgttaaatagaatgggttgattattatgagcataagaagcaatcacttttgtgttttgatttttagggcttgagaagaaatcacgagtacttgatgttggccttcttggtttacttggttggctaaggacactcgcatagatccaatacattatttccttttcttctttattatgttaatttctattgttttactatttcttcatagaattttacttttctttattttcttatttcctcgtttacttttttctagttctatataaagaagaccttcttgtaagaaatacatctcataataattttcttaagaagcatagagtttttctctcttctactggattatagagtttctggtggattccagaattttatttttcaaattcatagcttgtagacttgtaaaccgatataggtttggcgcttgcattttttagggtttttcgaccgcgtcagatttgtgcatgggaaaggttgattcataaaaactgtaagcccattaaagtaaagcccattgttaactctaaattatcttcattcagagttatatcttcattcattcaggaatttcgaaaccctagtcaattatcgagatcgatccaaccaatttttttttaaggttaaaagtttttgattcgtgaatgatgatggagcctccgcctacgaaggagattgctttggcccctgtatatgtgtattgggacatgaagaggtgtccggtccagatgactatgatgctcgtcgggttggtccgtgtatgaaacggattttaaggaaattaggctacaatggtcctgtcaccatcactgctgttggctcactagcaaaggtccctcgtgacatccttgaagcggtttcttccactggaatctctctttatcacgagttctacagtaagcatttctcatccttattccctttttattccctttattagataaagagagtctctctaagtatatagtttctgaaacaggtcgtaaaagcatggtttcgtgtttccttggccatggtatattgaatccacgtccatctactatgatggtcatatcccgtccaccagtgtacattcctccacgcttctattctaatattagccgccgacgtgaaaatagatacaactccattttcccgtttccacttgagtctcctcgagaagcctcctccaccctctggaaaaagtttcttttagctgatccagggccacttgatgaggaggatagctgcagtgaaacgcctggacttgcctcctggctttgctctgtgtgccgtcgtattggttgtggtccaggtattgctggtcaaggcgttgataattttatcacgcatatctctactcgagaacatgaactcaatgtaagctaagcatccttgccactagtttaactatattccctttctcagttgttcttttctttgcctacatttgaccctgtgttgtctttttcctcgcagcgtcgaggctgtattaccccaaaaggtgatcgcaataactccagattgaaagagagagatatgtgtaaagaagaacataagaaaatgatataatgagaacaattctttttaatccgtaatgtgtgtgactgccaaatattctcaaatgatccaccattttcatgattttttggctgttagaaataaaacgtttagaatttgtaccaaaatacggggatggatttaaacaatcaattgtacgttaagttcaacacatttgaaaatgatttatacgcatgcatcatgagcattattgtattattgtttattttatataggtccctttatatattataaaagagtgcaataaatttggttacgactttgaaactcatcgagctttcaacaatggcgaccattccctcccacaaccttcgtcctcatacgaccaaccaaaggactcagtactctctttccttcagaccacacttttcacgctctactctgatcactttcccggcaagatcatcgccggcgagggctatgtccagaaccgacgaggaggcttcaatatctacaaggctcgagcaagaaagctatgggctgacgacggcagaggacattcgccgacgggatggagaagcaaaagaatccaagaggttgagagacacgtggcggaagatccaaggggaagatgattgggccgggttaatggatccgatggacccggttctgagatctgagctgatccggtacggagaaatggcccaggcctgttacgacgccttcgatttcgatccattttcaaggtactgcgggagctgcagattcacgcgccgtcacttgttcgattcgctcgggataatcgattctggctatgaggtggcgcgttatctctacgcgacgtcgaacatcaaccttcctaatttcttctccaaatcgagatggtccaaggtgtggagcaagaacgccaattggatgggttacgtggctgtatccgacgacaacgaagccacgcgctgccgtttaggacgccgcgacattgccatcgcctggagagggactgtcacgcggctcgagtggatagctgatctcaaggatttcctcaaaccggtatccggaaacggattccgatgccccgacccggccgtaaaagccgaatccgggtttctggatctatacacggacaaagatacatcctgcaatttctccaaattctcggcgcgagagcaggttcttacggaagtgaagcggctggtggaaaggtacggcgacgaggaaggagaagaactgagcatcaccgtgacgggacacagtctcggcggtgcgctggcggtgctaagcgcgtacgacgtggcggagatgggtgtgaacagaacgaggaaaggaaaagtgattccggtgacggcgttcacgtacggaggaccgcgagttgggaacattcgattcaaggagaggattgagaaattgggagtgaaggtgttgagagtggtgaacgagcacgacgtcgtggcgaaatcgccgggactgtttctgaacgagcgtgcgccacaggcgctaatgaaattggcgggaggattgccgtggtgctatagccacgtgggagaaatgctgccgttggatcatcagaagtctccgttccttaagcccaccgttgatctttctacggctcataacttggaagctctcctccatctccttgacgggtcagtcattcttctttttattacttttttactttaaaaagtaattttaagatttccagctaatattttgacaagtcaaaagcctttgaggagacagatctcaatgtccacattttccaacaccatttctttattaatacgattttcaaaaatttggtaaacattattgcctcatcaaatgccgaatggagaataatggggtcatttagtaatctgatttacgtggcacttctttctttcatgggtaggttggagagaatttaattatcgaaaactactaggaaataaatttgtcgtttagagcataatagtattagtatgagttgatgaatctggattattgtttaaaaaaacataggtatcatgggaaaggacagagatttgtgttatcaagtgggagagatccagcgttagtgaacaaagcatctgattttttgaaagaccatttcatggtccctccttattggcgccaagacgcaaacaaagggatggtgaggaacactgacggccgttggattcaacctgatcgcatccgtgcagatgatcaacatgctcctgacatacatcaactcctcacccaactccatcatccatcacaactcttgtaatttatcgatttttttttggtttttaatcttcctaatttgtgtcattgcctttttacattacagataaacaaaattgaacgtccctatcttagtgaaaacccgtgcatagtttaaaataaattttaagttttcatcaaaactggcttgatcatcatctgttaaaatttcatctgacaatgcctagactaagtctcggtctctcacccttcttgatcaacctgttcataagaatcccacctgtttcggtcactcactcttcttgatcaacctgttcataagaatcccaccaagaaacaggacccaaaccatcatcatccatattcccctgcgcagtacacaagattgattgaccactggaccgacgtaggaaaaccaaaacaaaaaatcatggtgtctcaaaataaaagttaagtatctataagagaggagggaatcaggaggcttatctgaccttacttaactagcgttgtttataatgcatatacaagtggaaaagtttcagagaatgagtttgatgaatgaacttacagtgaccaccattggagcaaaaggctttgcgtcctctgctcgctcagttggaactgatggatagctgatgctctctactcgaaacttgatctgccatttacaatgcctcgttataaaaacataccacattcagataattatgcttaaagatacatgcaggaaccaaaaattcacctgacaggcatcgtcaacaatatagtcttctttcggttctccatattcccacacccatatcatttgcttcctgtgaaccaaaaaacattatactttgtgatcaaatgatatataaagatgttggtgcaatctcctactcatagttggagagctggtagtactacataaactgcaggacacatattcttacctattataagggtcaggctcacagcggttgggtttcggcataagtggagcaggcacataaatatcgtcaaagaatccaagtgttactgccaagtatagaggtaccgtaagcatgtaaatgattaaccatatccatgatttcaaagtattaatccaattcataagtagctaataagctaacaatgtactagagtagcaggatgcagacagtgcacaacattggaattcttcagggaacagtataataaagtactcacagcgcaagccattggcgtcagattctttgaactttgcagctatgacctcaccaacaaatggacggaacacaacaattctaagacctacctacaatcacacaaacaaagtattaacaacacgacatgagatattgaatcaaggcaagataaaacttttgaaaataaaattcttaaccaaaaccgtacagtgaaagttagactaacagataacgattccgaagaaccaaaatctcagaatggtttgaaactctagtacggtaatgatgagtctacaaagatgtaactcaatacagtgcagaaagtgtgcaatacacggtgataggtcaacaatgatgccactaacagtgacattgggaggccataaaattgatataaaaaaccatgttcaactgataaaagaatagagatgagaaaagatcagcaatttggatataccttataggtcgcagcaccatcaccgggtaacacaaaccctccttctactgatttaatgtcgtaaatagatacacaaagccccaaatcagctaaaacctttcatagcaaaaatccactttgataaaattagccaggtgtgtatataaataagcaaacaatggataccataaaagtgaaagaaaaagggcaatgagcaaaccttgtccaagaacacattttgaagcactgacttaatggcatcttcgagagggagattaagtagatgcggaggcactcttagtgaatgttctagctcgctaagataaaacatttctgaaaattttgttcaaaattcacaagtcagatgcatggaaaattggaaacaaacaatcaaagaagtagaattcgaataacgaatcagacaaattcggagcattcttggtcattaacatgcatatcatcaaaagttccaaaattcaaatctaaaattcattaaatcatagtacgtaataatagcccaatcctcaagattaagcatgtgcagagcgtacaaaaatctgccattgtcataactatacgagagaacaaaactatctaaaatcgggcaatacctaaaccattgaagataagatggtctcgaagggaactcggagagatggtgatgaagacaacgattagacggaaaagtgagaagttgggaatagattggaagaagagagaacctactaatcgagtgaggaagatgcggaagaagaagaacgatttagggtttagttattaaagtcaagaattaaaacaaaccgatcggtttgtcatcgttacgcttataaaccgaaccgaactgaaaaccgcactctttttattcataccggtgggccaaaaaaggaaattgggccaagtccaaggtatgacaacaatctgttgctgtcagcctgtcactatagtctaagtaatattaagctctgatgaaaagtgtgaaaaaagaagaaccaagatatacactgatgtgggataaagaatgaagctaatcataacattgatatcatgcttgagtagcttgtttaacaaaaagaatctgaaactgaacctaagttgccagattttttttttttttttttcgtatcaagcttgaagattgcactgttgcaagtaggtgtgatggtaagggacgtgtatgttccagtaacgtttgtaattctcttttccaatgtccaaccacggcttcatgaccccatcgtagtgtataactgccgcttgttcgatgtcaaccgctttgactcctgattcgcgacctaaccccatcacatgccatctcttgtccaatgctaatgtttgcctatagaaagtcaaccaacctattggtaagctcccagctttccacaatggtctctttgttccctgccaaaaaaacaaattccccaaaaccattgttaggtttacgcccattacatagacaagatatgttgttgcttgtaaccattcttcttctaggagatgatctttagcactagcttgcttatgttctttgctagttacagcaatgttatttgtgttctaaattcaaaacctttcatcctcgatatagccaacctaaaacctaataattattacaatctttttcatatataatgacgaatcaacaaatctaagaacccatttgaaaactttgaatatggctacagtgttatttccatagggagagcaagtgcagtagagtgtgtgtgtgtatatagcgtaccaggttgaagtattttatgtatgtagaagtcaacttccgtattctccattcttcgagatcaattagattcatcccgaaagcccatgtgcaagctctaggactaaatttcccagcgacccatgtgtctgagaaattaataaatgtgctcattgatcgaaatgaagattcaccttcaagacaagtctctacagctccaaccacctttcctttcatatcaatgctccacagtctacttaaatctctttgaacaactacatcatggtccaagagtaccatcttgttcaaacccgggaatatatccgggagatagaagcgtgcgtgattgagtgtagaaatgaatcttgggtcattagagttttgcttcatcagtaattgatcataatctctaggcaggacatccatatcatcaatgtttaggatttggatagtagctttactttgaatgtttagcagaaaccacattgagattgctgggtaattaagtgaatcagtcacgacatggaagactattctttctggctcctgcaaacagcaatcagaagccacattaataagtggcggaagtaaatgagaagatatagtgtaagacactctaaaattaggtataacatataatgataaccaagtagaaatttgtataagaaatgcatgatacctttgatgaagatatcgtagagttaacaacgactgaagaagccaaaacattgtcagagaagacaacataatgattgaaattagcgtcaaaataattttgctggttaggcatctgccttttttcaggatccagtgaaaagtattctgatgtcagccgcattgagagacagtgaagcccttttggggtggtccttgctgcaagctgcattagatacgctgcttgatttttctgcgcctgaacttgttcttctgtgttataattcatggcacggagtttggtagcgatggcagggcaattgttaaagacacgactagccttatataacacattttccatgggcttcaccctgcggagagcgctgaaagaaacaatcatgtcagaggttactaaaataatattcttaaacagcacgacttttggcactaaaaggttgtagttgtaacagcaaatttctgaatgcaattatggtatgttctccttttgaatcaagcagttgtgcttacccctttgataagtccttgtcctttgttgcatcaccaacagaccgttccagctctttcagccgacctctcaactccttcacaacttgagagttacttccaggtggagcgaaattcaggtaggctttagcttgaataattttgtctctgatctccttcgttttcacatctgttgctctgtcgggctgaacccttgtgttcttttcacccttagataaagggggcttgaaatccgttttattagcaagttggttgactgttggtagaatttgaccctgacacaaaaaaaacccaataaattgtaatcatgaaacatctaataatttgatggaaagtgaaacttggcttttctattccttagataaactaatcaacatggaccgcaatgacttgtaatctgattctaggattcaatatcggagttattccataccctgagcaatcatcaagttcatgttactttatatcagctggactgatcaagttcatgttatcttcaaatcagttgtatttatatatacacaccttttcatcagagctaactgtcatcttctgtgaaacaatcacttgttcttccctgtttttgtaagtattacctacaacccatgattacgacagataaaaaatctgaggagttaatgacatcagagcaaatcaaagcaagattgaaaatatgatcccaccaccatcactttcagcagacgaattaaactccccatccttgaagagaatgagccttggccccttcaagccttctccatcctcctaaatcacagagagaaaaaacttcaacaaaacgcatggtcaaaaggttttaaggagatgacctagaggaacctgtaacttccaacttacatgttcaatagcgctaagtctaaggtcatttgtcgtgaatctctgcagaataatggtagcatgtcaacaacagtgtattgctcgagaaatataaagcataaagagaatgataaaacaagactgagatctgaaaacttggcacaaaatcaacagcatgctgaaaacagatgaatccagagattgaagactaaggaacacatacaattttggataactcttcaataaattctctacgacctgcaagaagacaatcggcaatggaaaatcaaaacaaatgtcagatgaaaaaatcccaagaccaagacaacttctaacaaaagcaagcgaatttcatgtgaatcaatctaaaatcaaagcaatcaagcatttccacacgatcgtcaagtacaatgaaatgaaaataagaaggagaggagacgaaactgaccaacgggagtgatgctcttaagccgattcgatacgaaaataagcggagcgaatacagatatcgatagcagagcgaggatcaaaatcctctgccatcgacgaatttgtttcatgaatctacaaataaaaaaaaatccccaaatctatcttcctcgatgactattcttatcacatcaaaccctgaatcgttctccaggaagaagtagcaagagactcacaaatctcggagatatcctgcttgatcaacaagcaaaagaacgaaacgtgaagaacttagggtttctgggattgcttttctctagtgggagattctattcctcgcttgaatttctggatttggggtcggagagaggagttttagattcagagcttcttcatgcatcatcgggggattgtgctcacttatatatatttaattaacagaaataatcattgtttaatttgtgttaggtctctataaaattaaattaatgttattggtcgaacgaattaatttgtttataactttatagtatatagttttttgggtgttcgtgttgacatgtcaaatgttattagggtgaaaggaagcagtgatgcggatcaggtgcgggcaggtgtacatgtgaagacatgtgattatgccgttgatgaagctgtaagtaatttaatgtgatcagtcttctttgcaaattttatcaatcaccagtcagacgaagacacgtggataaagtttttcctccctcctcttagaagacaagaaaggaacttcagtctcatatcaatggatgattagcctattattatgaaaaagatatctagcatgtcggccaaaaaaaattatggcataaatagaattgtaacgaaaaatgacttttgccgattctgttcattatttttcaacaaaaatgttaactggttaacgaaaaatgtttaactaagtcaaatgggtgttaacgttgactatggatgcttttttttttttgagccaagtaagattacattttgggttttttctttatttaatgaagttgttggcaatttgcttaattcgctattggaacgacgggtcttttcatttattatgtgtaaaatggtggaggtagattatggagtacataacactcggtttaataaatcatgacagtatcatataaagatacttaatatgcgcaaagctttgaatgatcaaaatcgctagctagtgtatcatcaaattgttgccgaaaatcttaactttgacgtcggttaaaacactaatcagcataggacacataaaactacatacgtacatatgaaaatttctctgtttttcctaatcaccattcatctgtatgctactaaaaatcgaggtgtcaatattgaaagtttgaaaccttattagccttcatgcttcgattagcgaatgggtacataagccttctacaggccctttggaacaaaacctcttatctgatgttatctcgtaccccattatacgaatgacgaatcgttacatttggtcgttgattcgaatgttccatattcattgattaatgtaaacgaaatccattattatagttatacaaatcatttttaccatcatctgattataatatgaagagttcaccatcatttacttttcaaaatattaggatagcaaataacaatttctcacccaaaaagttgaaaagaaatttatgtcgttcaactttttttttttacaaaactcttctttcctaattagattaaccaaaataaagaatgtttgacctagttttcctaattaaagtaacacaaagattttgacccaaaaaaaaacgtctttgagcgctcgttttcttgtcgacgagagagctcttaagacagaacacaaagataaaaagagaaacccttgttccaataaaataaaaagaagtgacacatcgcgtctcttaaattttaatagacgacgacggccacttcttgtccgaatcgtacgtcaattcttcttccatctctctcgcaccataacatttattcttcagatcaccagcgaccgagcgaaagaaacgacacttcttcgccgttttcgtccacatgcagttttggggatagcacgttgtgagtgattaagcccaacagataaagagaaagatgatgattaaggtgaagaaggagacgatgagggcatgcttaagctgctctatctgcgacaatatcctccgtgacgccaccactatctccgagtgcctccacacatgtcagttcctctttttaacccaccaaatgtttcgaaattcgctgacattggctttgatttcttctcaatttggatgattatattatagctctgtcttcttcgtctcgtcctataatcgatacaattgaaaagtgggtcaatgaatagtttttgttgaccaaaaagaatatgcaattttgactgcttcaatctctccttcttcgtctttctagtgatagttgattcagcattttcatgtatagtttccttgtgggtttcagcttcttacttgtatgcaattcaatttgagttttttcttataccaagtatgaaatttgctcacatttattataagtcatgttgttagttgctatctactggaatggaataactttttagattactttcgtacgcagtttgtaggaaatgcatctatgagaagatcacggaggatgagatagagacttgtcccgtatgcaatatcgacctcggtagcaccccattggagaagctgaggtaagctattcgtgttctgtatttcagactctaccagttctcatcaaaatatggtttagtttggttaaatttctttgctccttgttcatctaatttgtggactcaatccaattgcttttcttgttggtgaaatgaactgctataacacaatctctggaatcttgttcatttaatacacgtagcacaatggtttttatgagagagagaccatttataggatgttgtaggagaatctaaatagatctcttttgtactttcctttttcttactcgttattgtactgatgggagccacttgtgtgcatggttttaggcctgaccacaatttgcaagacttgagggccaaaatctttgctctaaaacgaagaaaagtgaaagctcctggaattgtgtccttaccaggaaagaggaaggagagatctatatcttctttggttgtgagcacacctatggtgtcagcacaagctggaacaacgagaagaagaactaaagcacctacaagaaaagagttacgtaatggttctttggctgagagaactgtgaagaaggaagaatcttctggggatgagcttctggagagcacaagctcacccgacactcttaacaaattcactcagaataaaagacagtcaaagaaggtgatcactgaactactctattttctcgtaatgacttcatatttgacatgatttggttacatatttatttttgtttggtacacttcaaaagtaaatattcagtaaaaatatttgatactgttattggtctcacattcatttgagttattttgttttttgcagtcatgtaaagagtccatctccaataaagaaaacaaggatggtgatgaaccctgggattccaaaatggattggaaacctttgaactttctggttgaagtggcaaatgggacaaagcccttgaagtcttctgcttctcaagggtcaggttcaaaatctgagcacgcgaatgtatctcgcaatcaatttcaagggagtaaaaccaaaactaagaataaaaagagaaaatgtaaacgtgaggatgacaagagtaataatggtgatcctacaacatcagaaactgttactcctaaaagaatgcgtacaactcaacgcaaaaggtctgccaccactttaggcgattcaaggaatttgccacaaccagatgagtcaagtgcaaaacaggagaggagaaatggtcccgtttggttctcacttgtggcgtccaatgatcagtgagatttttgctctcatatctgaaactatttcctttcatgatctttctctctttcttcattttgtttctcttctcttggtatattgacaagggcttactggttacagggaaggaggaacttctttacctcaaattccagcaaattttttgagaataaggtaggttacagtttaggtattctttgttttatatatcctgtgttgtcgctgcatcttacatagtccctcatttttctgttatgaggaattcttttgttggggaagataatccaatgtctcattctgtgatagggatggaaatacaacagtttctttcatccaaaagtacctcatgaggaagctagatctcgagagtgaaaatgaggtaagggtctttatatgcactatggcacgagaaaggatagaacgtttgaatataatggaacttatatgtttggttgataaaaaatggacatacttatggtttatgttcagatagagataaagtgtatgggagaagcggtgatcccaacgctgacgctttacaatttagtggatctatggctccagaaaagttcaaaccaccaacggtttgctgcattggtaggttcttctgcaaaggattttacgatggttcttgtctatgctcggaagctaccagagtgcaacatgtaaaggactttaaagactcatgttgttgcagaagaagattctgtggagacagggtaatcttttcttttcggtttatggaatctctcaaagcattacaagagagaacattactagaactacaggagcagtcgaatgtgttgtgaaattagtattaatatttttttctatagacgaaatatacactcatgagtcgcttttctgtgcaagaaaatacaaaatttgtttcccttttctttcttcttcttctactatgtgtcctctctggacttgcatgtaacattgttgtcactttctaatcaaatgttgtagtttaagatgttttagattgatttatatgcatttatttgggtactacatcatttctatggaaactaaggttttcaagaattactgttcaagtgttgactgtggatgacgaatgtagtagaactgtgatgacctatatggaggtagaaaactaccaaattaactacataaaacttatctgacaaaagacgaatgaagttcattatcactattttgtgttatcgtgagtaccactatgtggtgacaaccatcatgcttaatatgagtaacatatttatataacaaattgttatgatgttcaaaaaatgttacgagtatgcaatttaacagattctttttaattcatgctttacatatagccatgatgcttaacgatatccaaaagaaaacaaaaaaaaatcattgaagagattgcacctagactagattgcctctcggatgaccttgtacatgtgttgctcttaagaaacgtaatctatgcatcataactaaaggaaagttatacatgtgttttaatatcaattaaaattggttgattacatacttaaactagtaaatcacaatctatgaataatccggactctttttaacatagacacatgacacatcaacaagtagtgtgcaacatattctagaggatggtcatcttaggtagtattcattcaaatgattttggatcaaaaagtaattgaaatcccacgtttattggttcggttcactccttgattagtcaagtttcatattaacataattttcatcgaaattctctttagcattattcgaaaaaccaaatatactgtaatactagcaagaaaaacaatagttttgacatatcttgcttcataaccgaatatctcattacaaaataatccatttttcacgtttagataatcaaacgaaccctcacagaattttctacacaatgcaaaaaacaaaaacgaatttcatcgagtatatcacgagttatggtcaaatgaatcgagtctaaaagcacaacaaatatgaccaaagcatctaatccacatccactaacttactcatcccaccatctacactccttctttctctgccgtcgataaaatttgatccaacgattaatattcaaacctgagaaaagagtagcgatccgcgtagtcattgttttaaccaatcagaagccagatatgaattgccgtctaatacacatctaactatataaatcggacgtttccaatgatcctcttcacaatcctcataatcactttcgaaattacatttacgctttcttgcaatcaaattttccgatcttaagttcagaagacgatgtcagaggtggaaatagagaacgctgctacgatcgaaggaaacaccgctgcggatgcgccggtgacggatgcggccgttgagaagaagcctgcagcgaaaggacgaaagacgaagaatgttaaggaagtgaaggagaagaagactgttgctgccgctccgaagaagagaactgtttcatctcatcctacttacgaagaggtaaaaatgagattcgatttcgtttattcgtgtttcttattaagccggattctgattttggaatttagaaattgatttttgtgttctttgttgatgcgatttcagatgattaaggatgcgattgttacgttgaaagagagaactggatctagccaatacgcgattcagaagttcatcgaggagaagcgtaaggagcttcctccaacattcagaaagctgttgcttctcaatctgaagagactcgttgcttctgggaagcttgtgaaggtcaaagcctcgtttaaactcccatcggcgtcggctaaagcatcatcccctaaggcggcagcggagaaatctgctcctgcgaagaagaaaccggcgactgtggcggttaccaaggcgaagagaaaggtcgctgcggcttccaaggctaagaaaacaatcgccgttaaacctaagactgctgctgctaagaaagtgaccgcgaaggctaaggctaagcccgttcctcgtgccactgctgctgcaactaagaggaaagctgttgatgcgaagcccaaggctaaggctagaccagccaaggcagccaaaacggccaaggttacatctccggctaagaaagctgttgctgccacgaagaaagttgctacggtggccacaaagaagaagactccggttaagaaggttgtgaagccaaagacggttaagtctccagcaaagagggcttcttctagggttaagaagtgaagttagggtttgtaggtagaagaatggttaacgatagtttagacttgtataattcaatcatctttatgcgactttgtttgcttttcttctttcagtgttcttgttattcacagttcctttggactaccccttaaatcatatatagatttcatcaatgaagcaaactcgagtttctttgcagctaatttgtgtcaggctagtgctgttcttgttgagttatagtaaacatggatgttattatacaatcaacaaacttttacaacattgaagttatacaatgaacaagtttctgttcttccttgtcaactctgcccttgttttctatgtttaccattttcagcttttggtgttgttgatgagatgttgtttagatcttttttcaactttctgaatggaatatttgagttcctgttgaatgctaaaccttgaaggtgaaagaacaatgtctttccagattgaacctgcttcacaagcagggttgggttgtctatagagctcgtaaatggagcctgcgttctcgtttaaccctcctactcgcttcaaacaatctatctcttctgtatctactagcaatgtcttttccttttctttccaacctatcagctgtttcacaatcacacttcacctattagtatttttcttatctactattatctatgcaccattgataagatgttcttgttaactcttagtgcaggagaactataactagcctaggggtgagttggggctttctaagttggtctaggatcttggcttaggcattggtcgagagtttgaaatttctcttgttcaaatcggttaagttctttgttgcattgagttaaagtataagtttatcggttccaatttcaaaactaacctttggagagccttccagcgcgttagtgcagtagagcctagcattgtcgacaaggctgcaatatgtaggaaatgcttccgcaaaccgtttgtgagatctcagctgtgatctcaccctaactgctcttctgcacatgatagctctcctacaatctcagccaaaaacactcttttaagttaataagagacaaacttgaaagatagattgaaagataagatggtgctttgtactcacctaatgcctcttataactgctaaatacgcatcgcacacaactccaactagttctattctatacggttttctcctacgaccatcctcttgaatctgttgcctttcaccaattcgttcccaatagttctctgttataactccatcatcaccaaccttgtatccagctcccattctgtaatggtgtcggtgtacgttcctcgccattgttattgtctgcaccacaaaaggtacccaagagagtgtcccatccattatcacatcccttccttcgttcagagccgtcactagcagggatgaagctgcatctgttgatgactgatgaacctatatattctcacaaaacaatttcaaacctcagaatcaacattttcatgactccgacaggttcttgaagatgtttgtggatggcttaccaattcagctgtctggatcatatcgacatggccacgagagcttaaggctctgtaaatgacatcagactctttgaaagcatcagcttcaatcaccacagagtctgctcctgcccagaatgctctgcttccatagtgaaaaccatttggttagcttctttgcttcagctacatagatatatacgtttctctatatgtatagtagaagtgataattatataatgagatctttatttactctttgagtatgtccttaagcacagtgcttttccctgcacccatcccaccacccataaggagtagcactggacttctgtctttgtgagccactggtgccataacttctgtgcactgcgagtcatccacagacgcgagccccattgctctcatttcctctaccaaagtgttgaacactcttgccacttttaagttcttagtcaccctcttaatcctcagctccctagatacatatacacacaaaatcaattattcgtcaatcactaaaacagaacacacggctttctaatacaaaataaatcctgtttctgtttcttttgttcattaccttgtagctgccatcacaatttgtttcagcttcctctttggctcagcatcagcgctcagtacctgagattcatatattatgacattgagtgctttggtctacaatgtgttgtaataagagaaaggtttttttcttttcacacaaacctgagtaatcatgagatcggcgtggctccagtgaaacgcaaagtagctgagaatgcatctttcaaactcctcaacaagcttaatgaagagggtatcagcatcaggttcttcagagaaaaagctgtaaatgtcttcttcacaacattcagatttacttatgtattctgctgctaacttgcagagatttggacactctcttctgtccttgaatcccatttgccttgctacgtttcatgtcccaaatcaggaaaaaaagcgttaacttttggtacaaggcattccttgctcatggaggataatgtgtttatatattttaccgacgtaatgagagaatctctcgagtttctcatggcctttgtgtttgtgagatgatttgagacgagggatgattttggtgtcacgtagcctccgcagacggtaatgcactgcggctgctatcattaaacctatcgatgacaccaccaatatctgagagtatgtcgaagttctgttgcctgaatattctgtcaaaaacaacaacacaatcaggaataagatttttttcttcttcttcaaaacctgtaatatcaaaaacttcacctctctgcatgacgatggattgattagtgaatggtgtgtgttttgttgaaactcagattgttcttcgtcgccattgttgttgtttcttgagtcttcattgtgttttcattttccgtaatctgtggcgaagattaaggaatctgatttctttaccaccatccaatttggtactaaaaatagctgaggagatcaattggtcttggaaaactctatttataggcagagatcccctcaaatattcaacaaaactgtatgcaaaaccaagtaccatattttaggtgtccaaaatcaagtaaaagattatcagattcgacccaatgattttttccgtagttcattgagaaattggtcaaataaaaattgatcaagttcatgtcgaaaaagatgtaaaaggaagtagcatgttacattaacctaaaaccatagtaaattataatttctaactactgagagcaaatcctctaccaaaaaatatcctaaaaacctaagaaaccccacaaatagtacaactgttacattacataggagcagtgcaagttgttctgaaatggcctgtctgattacaccgaccacaatgaaccacacgcctcacacggtcacgatcctctgcccttactctcctcttcctcggagcacctttcatagcctttggtgtttttattacattttcactgtctctctctgaatcattttctttccactgaactttgtctgatattggctctagagtttctgcataagctcttctgtaattctccactgtgaaacaactctctgtgtatctataaacgtcctcttcgcaagacaagagagctccaacggcgtggctacagggcaaaccataaacctgccaccggccgcataaacaagaacagttttcgatatttacaacgacgtttccttcacaagtcatgacttcaaattctgcttcgtttgctctgtaaactcggtgagcacgagattgttctatagcagcaagcatttgtttctcagcagaaggaacaagcacattagaccaatgcaagcttgtttcacggcgttctttcaacatatttatcaaatggcggtggatacactccatcgtttggattataggaagacctgaggtatcttcaacccaattgctgagtgactcggtaataacatttgcagttaattgtccaaaccttgttccttcaaagtatgatgatgcccatcgagcaggagacttgttttggatccataacgaagcttccggggatatctgctcgatcttgttgatttttgatttgaactcgagaactgtgagacaatgcgcagcctcccaaaaaaggtctacaagaacagagctttggaattctctttggaatcgttctgtgagataatggagacaaaagccatgaaatgctgctgggaaattagcctctaccccatcaacaacgggtctctctccgctggacaatatggtaagctttggcatattctcatctagaatcttacgaagctcggagagaaaccgatgccagttgtcatcgttctcttcgttaacaatagcgaatgccaaaggaaacacagctccatctccatcaaatccagtggcaagcagcaacgtccctggatatttgctctttaaaactgtactgtccagtgcaataagaggccggcaagcatttaaaaaaccagagattgatgcttggaaagaaataaacaagtgttgaaagcacccatcaatgggattcacatgaaccacagcgacgctcccaggattagaccttctgatttcatcacagtattggggaagaaggcgatattcttcttcaaatgacccacgaagagtagacccgcgaagagtagccattatgcgctctttccccctccatgcctgcttgtaggacagtgaaataccatgaactcgataaatctcctctagtatctcctttggtttgaaatgaggattttctttcagcttttcagcaacaacatcagcaacccactggactgaagcttgctgatgaccaagatgcgaaatcccaccacaagtatgactcccgtgaatagtccttatcgtaaaagttggagcattagaaactttggcgcagtgaatcctccatgggcaacccttgctgttgcactttgctgtgaagcgagtcttgtcagatttaatcgttcgcatctcaaaacgcagagaaattgctgcatttttaatcgctctcctacaagcataggcatcagaaaattccataccaacgaccatttcatggtcagtaccagcaccggacatggaccagcattgagagctaggagaaggcatgactgatttctgagaaaactcggtgctttgactcatctccaactctaatttatcatcggtatcttgagactctaccttatggatagcgcccgtggcttcaataacagttgatttatcaatctcagagtcatcattatcaggaaaggagcgatagccgtcattttggttaacatctaaacatgccacttctttcgtttcatcgatccctctgtggtcctggaggttgttccagagctcatttccgttacaggaggcaccaatctggaggttgatatcgagaagttgttcgaaggcggaattgtagtcatgaccaacgaagagttcatagttgtgtcgactacccgtgaaatgatcttgtctaaacgagatatcacggttctcagacttcacaagctcgtcgtttgccattctaataactaaaagaaaacactgcagaatctaatcagattattacagaagatcctgaaactcacttcttgctgtgtcctttagaaaattacctgtcaacataaaagacaatgcatggaggagacaaaacatcatcaaaaacaaacccaattcgaaaatttaccaacttgatcatgcaagcacattcagcagaatacaaacaagcccaaaatccaatgctttcgaatataagaaacagagaacagaagcaaattgcagaaaagcaaacaaacaaaaaaaaaggaggattttgaaacttacaatagaaaaatttgagaagactctaaatccattgaaactcaattaaagaaacgagtacacaattaaagggaatcgcacattgaaagagaaggaatttggcgggtaagaaattgagtgtagggtttaactgtttcaaggagaaaaatattattctcgacaaaggagaagaagaggcgacaggattgatatcatcaggttaaaaaggtaactctgtaaccttgttaggtgttttaagggtatgttggtcatttcatatccgtcgcttaagttggaaatagcatctcattggtataaacgcctaagatttatttactttattcgaggtcacattggcccaatccatgatttactaattagtgttaatgacttcaacgcgtctacgatgacgtaattttgtttttgtagattttgatacgttctacattattaatggtgattggcgaaattaacacaaaactcctcggattgaagtaaatcttcaagtttggtactaacataacttccacaaaatcccgaccaaactatcgcatcttaacgactttaacaatatgaagacaaacagaaaatagtgccaaacttctctttatgtgaactatttatcactaatgttgtaagatcaccttctctttcatatctcccaaagaaaaaaatattgccaaccaatcatttacctgaaatttcttcatccactaataagattcagctgaaacaaaaaatctccatcattacccgatgttatcttctggtttacaagtctctatgcaaatccttgagagccatcaaaggtctccaaaatcacgccgccaaagaaaatatgtgtgtcaggcgagtttgtttcaaagattcaagatgaagccttcacacaacacctcccaagttcaagttctgcaagcaattcagaaaccactttttccattgagattgtttctatcagctgcttgttgctcctcccatcctttatcatcccttttgaaagaagattgattctagatgactctgaattttcagccaggagttgttcgaaaaacttctcttcatcattgagtttcgaggccttcatcagatccaccacctgatgcctttttgcaacatttctacctgctccacagcccattgcagttgctgctccaaccgcatttgcaattgttaaggtattaacaagcggcatgttgcgtatataacctaatgcaattgcagccacaaaactgtctccacatccaacagtgtcaaccacttccacctgatgatgatcatgttttcgtaaagaaaattagatcactacacaaacttacttactctatgatacatacataataattcaattttcaacaccttgatgtgaatgccgaaaatgaacgatatttatgatctgtaagcaggtaccttaaacgcaggtgccactgagacactagatttcgtcactagaattgaaccctttgggcccatctttacaatcacccatttcgttccctttccgttcctcagaatttcttgtcctgctttaacagggttcctgatgccagttagagcctccacctaagtaattcattaaagaggtcaacaataatttgacacagtagagaaattttcagcattagcgagagatgcacaatgtacctcctcagatgttagaagaagaacatcactcattcttaagaaatgagcaagtgctctacgctcatcaggagttcccttggacagactctttccccgtggtccaggatcgaagaagatagctgtcccaactttggcagcgtaatctatcgttgacataataaaactagggctgaaatcgtcaaagtcataaccattgcagaaaagaacttttgactgtctgattgccatctttacttcatcagataggtcagtgatccaactgaaagcaggttcctccttgaaatcagctcgactaaaaaaagagaaacaactagagagaataagttcctatagtagtaaacaagaatattacccatcagaaatttgtttcacaaatagacaaaagaattaggaataaaatgggacagaaattccctgagtcaacaaattcaaagaactaggcattggaggcaagtatgacaatatcacccactagcgtttgtctcaatattagaaacaagatctctaaacaagaaagccatatctttctagacatatagcattaagaacactatcagcaagaaaaatattccgatagaaaatctggtatctacacttttttgtttccaaaaaagttctatcaaatgaaaagttatatttctaggtccccatcaccatccccatcacagttcatgaatgagatgatgcattcactatatacccttagcaaccgtttccccacataaaccagctctaccatccatagatattatcaagttttggcgtggcaaaaagcagtacctgcaaaacccatgcctctgcaaaggatccacaagaacccagcaaatgagagtttcacagaatgagctggtatctttttcatttgttcctccattcaatgcaaccgtacctattccttcctcatgaagcacatcaagaagaaactcaccatagatttcatccccaacgtgaccaatagcaacacaatgaagccccaatctagcagctgctatagccatgttacagttgccacctgcttcccagtatttctataagcaaaacagggaacatatacttcactattaacatcaacagactcaacaatactttaaccttaattcaactgaaacgagaaaacaaagattcaattttctcatcaaagagattgagctaagaagttctttcgatcaatccgaactaaggcagaacaaattatacatacaatgttcgaaattatcaccattgaaacactaagaagcagttaaagtcaagatttagaacccaaaccttatctgggggagacatagagagttcgtccatgagggccttgcgttctccacgagaaggagggggcaattcgtgaacactgagaacaatgtcgacgcagagattacccaaggttgagacatctataggtttctcgaccaccgcgacatctccagtttccccgaaagaacagatggaggaggagccatcggcgtatataaccggagatacatcagcggcgctgctccggcagcggaggcaaacagagctggtcacatgagggactctagcgaatggcgggaggagaggattagggctttgggtggagaaattggagagggataacgcatagtgaggagagaaggagtgaaattttagggaaaaagcgtggtgatacattcagaaaaacccaggaaaaaagaatgaagaagaaagagagttgattttgaatctgcttcgtcgttctctctcagcttctccttcgtcttcaatcttcttgaaatgagatactttattgttcttcaccatttgaggaagaagaaggaaggctttcttgttctgtggtaaactaaaccggagtgaaattggaatatgaaattataccgaaccgggtttgatgtggttatttaaaccgccttgaaattaaaacgggaggttttataagaaagggtttttcatctttacctgatttatacttgtcgacggcggacaccaacagctttcttcatcgtttagagctcacttcaagccatggccgccgacgaactgatgccgtctcacaggtcacacaggactcccaaatcaggtcctaccgcgaggaagaaatctgaactagataagaagaagcgtggaatctccgttgacaagcagaaaaaccttaaggtgggttactcctacttgtcctctctttgtcaatgtcttttaagagtttcttcgttgattggggtgtttataggaacaatcgattttacttggttctgcaggcgtttggtgttaaatcggttgttcatgcgaagaaagcaaaacatcacgctgcggagaaggagcaaaagcggcttcatcttccgaaaattgatcgtaattatggcgaagctcctcctttcgtcgtcgtggttcaaggccccccaggagtactgtctttgagactgatgttgcattttcactctcggttttgcttattttctcacaagttttgattgttcctgtaggttggaaagtctctcgtgattaaatctcttgtgaaggaatttacaaaacagaatgtacccgaggttcgaggacctattaccattgtacaaggttctgtgctgtatttgtttattgcttcttcttcttttctttttttgtgtatgcatctatcttgaattttagggttggaatttactcctgctctcattttggctggtcatggatttaggtaaacagagaaggtttcaatttgtggagtgcccgaatgatatcaatgcgatggtggattgtgcaaaggttgctgatctagccctacttgttgtagacgggagttatggttttgagatggtgagacactatttttctgtagctttctcctctttccataatgatctagattgtgaagaatctttcttatgtatacaagatcactgttgggccttttttgtgatctacatttttttgtgataaacaactaaggtttgacacgtgaactgtcttttaatctgtttcaccctcaggaaacctttgaattcctcaatattatgcaagtgcatggatttcctagagttatgggtgttctcactcaccttgataagttcaatgatgttaagaagctgagaaaaacaaaacatcatctcaagcatcggttttggactgaaatatatcatggagctaaattgttttatttatctggtctcattcatgggaagtaagtatctgaattggtgcatcaccaacatgaatgacatgtgcaaggagcgtctgaggttcacctttgatttatcttttattggtaggtatacgccgcgtgaagttcacaacctcgcccgctttgtaattgttatcaagcctcagccattgacatggcgaacagcacatccttatgtgttggttgatcgccttgaagatgttacccctccggagaaagttcagatggataagaaatgcgatagaaatatcactgtgtttggttacctacgtggttgtaacttcaaaaaaaggatgaaggtatgtcatcactgtccttagatactggttcatctgaacctttttctatggcctgaatccttgacctatttgtttgcttagcagtatgtggcgcaaaatactcaatattttgggaaaagaccaatttttaaattgagcctagagatgagctgatttgatgtcaatttgatgttatatatacagtcttccttactggtattcgtccatagattcttagcgattcacatatatttagaactacctaaagtaacccgttgtattcacacgtagctagttctctcatcgagtgaagttctaagaggaggagcataaatttgtataccttctgtgttgtactgaaattttctttgcttctttatctagtggaatgattttgtgtgcaaaatggtatcttagctgttacagtttacctttctttcatgtttaacatgcatctgatataatttcttatgattatcaggttcatattgctggagttggtgacttcattgtagctggggtgactgctttaactgatccttgtcctttaccttcagctggcaagaaaaaagggctgagggacagggataagcttttctatgctcctatgtccgggattggagatcttgtgtatgacaaagatgctgtttacatcaacataaatagtcaccaagttcagtactctaaaactgacgatggaaagggagaacctactaataaaggttattttatggtgttttattgtcatatgcttggtctgtatgtaactgcagtagtctcttttgagtgtcttgctcatttcatgtttaaagaatttctacatattttaaatttggtttacatcattctccatgatagaaacccaatagtttttgctcactttttgtagctctagcatctctgattgtgacattttttcttttggcaggaaagggcagagatgttggtgaagatttggtaaagtcgttgcagaacacaaagtattctgttgatgagaaactagataagacattcattaacttttttggcaaaaagactagtgccagttcagaaacaaaacttaaggctgaagatgcgtatcactctttgccggaaggttctgacagtgagtctcaatctggcgatgatgaggaggatatagtaggtaatgaaagtgaaatgaagcaggaaactgagattcatggtggaaggttgaggaggaaagctatcttcaagacggtaatttccttactggatctgattttcgtaatgcttctatttacattgcagtcacatcttcagttggataatactagtgactatgagttcaagagttagtgaatgtgaatttgcttttttcattagtttgtattcttcttgcttcattcaccactactgtcagacaatttggaaagaaatggtgaaacagtgtaagtaggttaagtcattgcagttctagtgggatcactgtagtgaaaaagtttttgggaagcggtatgagtatctatctgatgttgactcattatatcttcacaattaagtggttgtctccatgtctggctgtgtgtgacgcaggacttgaatgaagatgattttgaggaagcagacgatcttgaattggattcatatgacccagatacatatgattttgaggaagcagacgatgctgaatcagacgataatgaagttgaagatggtggagatgactctgcttccgattcagccgatggtgaaccaggggattatcagatagatggtatgttaattctatgtttgaatatactttcgtatagataatgtcatgagagttatgggacatctatgagaaggttttagattttcttctgaaagtacattgtcctttctcttttgagtttttgttcatttctaaacatttttaccttacatggtctgtcagataaggactctggtaacatatcacaatggaaagcacccttgaaggagatagccagaaagaagaaccccaacttgatgcaaattgtgtatggagcatcatcattagctactcccttgataaatgagaaccatgacattagtgatgatgacgaaagtgatgatgaagacttctttaagccaaaaggagaacaacacaaggtttgtcatctcaagtttgacaaaatttggtgatccttttaatctcttggaaaggaatattaatcgttattttttcatataaatccagaatttaggtggtggattggatgtgggatatgtcaactcagaggattgttctaaatttgtgaattatggatacctaaagaattggaaagagaaagaagtatgtgagagcattcgtgatcgatttaccactggtgattggtcaaaagctgctctgagagacaaaaatttaggtactggcggtgagggagaagatgatgaactttatggtgattttgaggatctagagacgggagagaagcacaaaagccatgagaacttggaatcgggtgcaaatgaaaatgaagatgaagatgcagaagtcgttgagcgtaggctaaagaagctggctcgtcgagcaaaatttgatgcagaatatcctttttacccgaatgacatcatttaacttatgtaagcacgatatcatttgctgtctttcatctctgttttaggccaataagttgtctactgctgtctgtgtttattattctctgaaacaactcacatgaaaatatggtgaagaattatagcttagtttatcaaatgggtcactaagttctaagttcatatatcgctctggtcagggagtttcatggttgctgtttagatattcttcctctgcatgtcttatatgtcatatttggttttatgctactgtttctatttgcattttggcaagttgcttttggttcaaccttaacttcgttgtacaagcaataaatccgagttagaggaggatgacaatgataaaggtgatgggaacaatcctcgtagtcaagccgatgaaccaggatacgctgataaagtaagtagattttgctgcaggcagctaagatatatatccactgttttaaaactcactatttgctttgcagttgaaggaagcgcaggaaattacaaaacagaggaatgagttagaatacaatgatcttgacgaggaaactcgaattgagttagcaggattccggactggaacatacttgaggctggagattcacaatgttccttatgagatggttgaattctttgatccttgtcatccaattctagttggaggtattggtttcggcgaggacaatgttggatatatgcaggtaagctacaaagattttcttttcttctggcccaaatgaaggtccaaatgggcacactgctcttttcagcttaaaagatgaaatatctttttcttatttaaaggtaattgaaagatgatattttatttgatagatgcttatcgtatcacatgtatctttctacttaggcccggttgaagaaacataggtggcataagaaagtactaaagacaagagatcctattattgtgtctattggatggagacgctatcagactattcctgtatttgccattgaagatcgcaatggcaggcatcgaatgctcaagtatactccagaacacatgcactgccttgcttcgttctggggtcctcttgtcccacccaacactggctttgtcgctttccagaacctgtcaaacaatcaggtatgtgattgcactctgctgcttgagattttgatcccaagttaacttagagtgtgtttgaacttttgtgatagagaatcgatcttctgtaattcaaagtgcgtcttcatgaaatgggtagtgtgagtttaggactgaccaatagtgaataatcgtatggatacttagtgtgttttgaatgagaaaagttagaagatgctttcttcctcctggtcgatgtcacaacctaaaatgacagttatgctttcatattgttggagcaggatttagcacacatatcagtccattctgctccattgtttattgttacgatatcatgcaactgttcaaaattatttctattagttagaaacccctaatggcccacatatcatgtaaggggaatttatcggttgtttctttggttagatctgttgtattcttctcctgctgagtagctctcctggtgtgtgcttcaggcaggatttaggataacagcgacttctgtagttctggagtttaatcaccaggcccgtattgtaaagaaaatcaagctggttgggactccgtgcaagatcaagaaaaagactgcatttatcaaagacatgttcacttctgaccttgaaatagctcgatttgaaggttcatctgttcggacagttagtggcattagaggacaagtaaaaaaggtatgcttttgatctccttgtaattcctagtttttccacatatgttggctctccggttttctaataagctttcttttgtcaggctggaaaaaacatgcttgataacaaggctgaagaagggattgcgaggtgtacctttgaagatcaaatccatatgagcgacatggtattcttaagggcttggactacagtggaagttccacaattttacaatcctctaacgacagccttgcaaccccgcgataagacctggaatgggatgaaaacttttggcgaactccgtagagagctgaatattcctattccagtgaataaggattcactctacaaggtaaagccataaagtgcggtagcattgatatatatttgaaggtctaaacctaaagtttatgtggggaactaaagagcggctatctcgctaatttctctctcttttgtgtaacattttgcaggcaatcgaaagaaagcaaaagaagttcaatccactacagattccaaagcgtctagaaaaagatttaccgtttatgtcgaaacccaaaaatataccaaagcggaaaagaccatcactagaggataaaagagcagttataatggaaccgaaagaaagaaaagagcatactatcatccagcaattccagctgcttcaacatcacacggtaatgttttaaaaactaatagcatcatactatcatgcagcataaaatctttgattgatcttgtctgacttgatggagaaaaaaaaaacatgcagatgaagaagaaaaaggcaacggatcagaagaagaggaaagagtatgaagcagagaaagctaagaatgaggaaataaataagaaacgtaggagagaagagagacgggacagatatcgtgaggaagataaacagaaaaagaagacgagaagaagccttgattaatttattaataccttatttcaacttttgtgtaatactaaaagttttgttttcatctctattgttcttctgtgttgttttttactttaaaacttatgaatttatcaatcacatttctcgaatgatcactttctaccccaaatttttgaaatactgaaacttttcttggttactctaattatcactacgttttgtgcaagcaaaaatagattagactgttaggatttgctaatgaatgttaaaagaaaaatgtaattaaacagaactggtaaaaagctgacaaaactggaatgggtgggaacatcgtcttccccttccccttcttcatcttcttcgtataaaccctaaaccctaaattctctctatcggttagctatgaacaaaacagtcgtaagatgtcttctttctcgttcacaccatcctttgattcatttctccaccaatttatctcttctccacagagttttcacctgtagccgttatctcactgctaggtttatgtccactcctccgccggatgacatgtttggtttcgacgatcctttctcccccagtgattcgcgggaagttgtggatttgactaaagagtactcctttttgcacgattctcttgtcgactatggaaacgttaatgttcatcaagtagtgcccattattactcaatcctctattgacgctagagccattgcagatgctgtttctggtgtcgacgatgtgtttgggagaaaatcccagaagtttcttaggcaatttagagagaaattgagtgagagtttagtgattgaggtgttgcgtttgatagcaagaccatctgctgttatcagtttcttcgtttgggcaggtaggcagataggttataagcatactgcacctgtgtataacgctttggttgaccttattgtacgtgatgatgacgaaaaagttcccgaagaattcctgcaacagattagagatgatgataaggaagtgtttggcgaatttctcaatgtgttggtaaggaaacattgcaggaatgggtcatttagtattgcgcttgaggagttagggaggctcaaggattttaggttcagaccttcaagatcgacttataattgtttgattcaggcatttctcaaggctgatcgtttggactctgcatctttgattcatagggaaatgtctcttgcaaatcttaggatggatgggtttacacttagatgctttgcttattctctctgtaaagtaggaaagtggagggaagctctaacattggtggaaacggaaaattttgtgcctgatactgtgttttatacaaaattgatatctggtctgtgtgaagcttcgctttttgaagaggctatggatttcctgaataggatgcgtgctacttcctgccttccaaatgttgttacatattcaactttgctgtgtggatgcttgaacaaaaaacagctgggtaggtgtaaaagggtgcttaatatgatgatgatggaaggttgttatccaagtcccaagatttttaattctcttgtacatgcttattgcacatcaggagatcattcatatgcatacaaattgctcaaaaaaatggttaaatgtggtcacatgccaggatatgttgtctacaatatattgattgggagtatttgtggtgacaaagactcccttaattgtgatctgttggacttagctgagaaagcttatagtgaaatgcttgctgcaggggttgttctgaataagattaatgtcagtagcttcacacggtgtctttgtagtgctgggaaatatgaaaaggcatttagtgttatccgtgaaatgattggtcagggatttataccagataccagtacctattccaaagtccttaattatttatgtaatgcttcgaaaatggagttggcgtttttgttatttgaagaaatgaaaaggggtggccttgttgctgatgtctacacgtatactattatggtagatagtttctgtaaagctggtctaattgaacaggctcgtaagtggttcaatgaaatgagagaggttggttgtacacctaacgtcgtcacatataccgctcttatccatgcttatcttaaggctaagaaggtcagctatgcaaatgagctgtttgaaacgatgctgtctgaagggtgtctccctaatattgttacatattctgccttaattgatggccattgcaaagctggacaagtggagaaagcctgccagatttttgaaagaatgtgtggcagcaaagatgtcccagatgtagatatgtacttcaagcagtatgatgacaacagcgagaggccaaatgtagttacatatggagctttactggatggtttctgcaagtcgcatagggtcgaagaagctcgtaagttgttggatgctatgtctatggaaggttgtgaaccgaatcagattgtatatgatgctctcattgatggactctgtaaggttgggaaactagacgaagcacaagaagtgaaaactgagatgtctgagcatggattccctgcaaccttatatacttacagttctctaattgatcgttatttcaaagtcaagcgccaagatttagcctcaaaagtattatctaagatgcttgagaattcctgtgcgcccaatgtggttatatacactgagatgattgatggcttatgcaaggttggtaaaactgatgaagcttataagcttatgcaaatgatggaagaaaaagggtgtcagcccaatgttgtgacatatacagcgatgattgatggatttggaatgattggtaaaatagaaacatgccttgagctcttagagcgaatgggttccaaaggtgttgctccaaattatgttacttacagggtcttgatagatcattgttgcaaaaatggtgcactggatgtggcccacaatcttctcgaagaaatgaaacagacacattggcctacacacacagcaggatatcgcaaagtcattgaaggattcaataaagagttcatagagtctctagggcttctcgatgagataggccaggatgatactgccccttttctttctgtatataggcttttgattgataatcttattaaagctcaaagactggaaatggctcttaggcttcttgaagaggttgcaacattttcagccacgttggttgactacagtagcacatataactcactgattgaaagcctttgccttgctaataaagtggaaacggcttttcagttgttctcagaaatgacaaagaaaggtgtcattccggagatgcaatcattctgtagtctaatcaagggacttttccgaaacagcaagatcagtgaagcactattgcttctagatttcatatctcatatggtttgtcctctctgactctttcttctaagtttgaaaactgcagtagtcgttaatgtttgtcaagctttatttctttgcgatgttcacttgaatctatgtgtatttgactagagctaattatctagtggaagaaaaggcatttaccgtggtagtttatattgtttatttgttctctccatcattgtgagcagtgataatgcagattggtactttttctggtattcattacttaattgtctcaattttgcaggaaattcagtggatagaagaaaagaaaacatctgatgggacttaggcatattggtttatgatgtctagttctgatattctcagctagttggtgcatctgatgttgagcatcctagtcaaaccctgaaaattcgaaggttggaagctatggataatgcatgaggcgtgtaggatttttggaccaaaattctttgtaagttcattggttttagatcacatagtcagaaatcatgtcttttccggtttttcctatgaatatgtttatgtatgcaggttctgctttgtacatgatgtgtaaaattatacttgtaatgactctcaacagagttgaatggcctcctttgaacactctatgcatcagatatgcagagctcagcttctctctcagatcacagtatttgcttcttctggggtgactcagtttcccactctttagtagtccaaacatttttagatgctgtgttttctgtttataagaacctttacttcactggtcaattctcagctaatatatgaaagataaattcatacttgttttgtaatcgatacatgatatgttctttactgttgcacctttccatattgatgatgatgttagggatgttgtatcttgaaaagaacgtatttgcatagatgagtagtagtatgcaatcgatgcatgctttgtattgaaagtttattactctattgctaatccaggcataacgtgttacagttcctgcggaatgagcttggatgaacacggacacacaggaaagggaccaagaagatctcaaagcattaacaaagtatctctgtccgaagacacaaggtaaggcactcatcgttttgttggatttttacctgagaagacagtccatatagatgtaggtggttacatgacgatagttttgcaggtaaaatatggtgacaaaaccatcaaaagcttttgtgcaaaatggaggagttctatctaacgagaagctgggtttttttgcttgaaacagtttggttgctatcacacttagcatgacaacacactacctaatgaatgaagaaggcccaataaggtgtcagatatgatatgcataaagccagtgtttgtgtataatacgggacaagggccctttactgtacatatagatttattttggtttaccctacagtctacagatcaatgtatactttattttgttttttgttattaaataagatgagagatcttcccctctgttaatatgtctggcttgttttggattttatgttaatgcactggctttctgacattggaacactatctattatggaagatcattttaaaggattaatctatctatgtatgtatgtcgtttagggaaagaaaacaatattggcaaaagataacaatagctaaaacttgtaaagaaattcaacttttccttttttcattagtatagaaaatcccaacttggtaaaagaagacttgagagtcaaatgttgttactataaaacaaatatgaccaccattgaccggaaaacgagaagattttttcgtaattcgttgttaatttctctcgttggtcagatatatttcgatatctattattattatttggtgattttttcatatctggaaattgagtaagtaacgatttttttttttaaaaaaaaaaaagagagagagagagattaggaaacaagaaagcagaaagagaggagtgattagagagagagagagatcaataaccaaagaagaaggaagggaaggggattagattacaaaaacgccaaagctgttaactttttctttttggccatttcctatttctcccttcgtctccatcaagcaaccctctctctctctctctctctatcatcatcatcgcagaggagacgatcttacgcgacgaatccttgagagattgagagggacaagcgagttttgtaggtgtctcagaccggttatttttttctcttttcttctttttatctgaatgattttggatttcgtagacaattgtgtggtctctagattcatgctttctaggcctttttaacgcatctttgctttcttagatttcatgttttacaattcgatttcgtttctgattttcttttcatctgggttttgtttctgatttgtaaatgttcattcttttgtggattgtgatccttgagtattgttttcttctggccgtatttgctggcaatatgaggttgtcgtccctttttttgctttttggtttttgcatgtattattatccatcttctgcccataaacaatgttctcaatgtagttggatcttgtctttttttttctgagaattttgattttatgaaacttgtaattacattttttttttctcaatcaaattgctatcaagatgtaattacattgctgaaactgtgtatagtagaagacatgtttttggctcacacatctggtcctatctcttttgcatctaaattcagttacttgatctatttcaggacccaaggattgttgacggtctatattgaacaagtaaacaaggatgcgtaagtggatctgttgtacatgtcaaatagaagactcaaatgaagagcaacaactgaaaagttcacagcagcaatctgatggtatgttatctagatgccacctagtacctcaagtattctaattatcacgtactagtggcttccattcccacctttgtataacagttatcatatcttccaactgaggggaataagttgacatgttgtcaacactttaaacatcttatgacttcgtgttgtgtatcttaaaaattgattttctgtttatgcttattgtgttgagtatcttcatgtatgcagcaaatcataagaattcaaaaccagcacctgttgcaaaacatgaggttaagaaggaagctcttcccatcgaggtccctcccttgtctttggatgaggtcaaggaaaagactgaaaattttggatccaaggcactgattggtgaagggtcttatgggagagtatattatgcgacactaaatgatggtgtggcggttgctctgaagaaacttgatgtcgcacctgaagctgaaacagataccgaattcttgagtcaggttattaatctgcattttgttaatgaagcttgtgtttacatcctctttcaacttgtcatattagttgtttgctcttccttaggtttccatggtctctaggctgaagcatgaaaatctcattcaattgcttggtttttgtgttgatggaaacctccgcgtccttgcatatgagtttgcaacaatgggatcgttgcatgacatcttgcatggtaagattagctttttggactttaagattctctgctcagttctctaactaaataaaccccctgttttgaccaaaagtattcatatcggtgccaaacgataatttgtccatgtaaggttgcttattgtgcgattacaggtaggaagggagttcaaggagcacaaccaggtccaacacttgactggataacgagggtgaagatagcggttgaggcagctaggggtttggaatacctccatgagaagtctcagcctcctgtaatccatagggacataagatctagcaatgtccttctttttgaagactacaaagcaaagattgctgatttcaatctctcgaatcaagcacctgataatgctgcccgtcttcactcaacaagagtcttggggacttttggttatcatgctccagagtaatgtttcttaagcccttattgttttgtattcgtatgaatgtctaataaacagctaaaatgttaatccgccctcttatgcagatatgcaatgactggacagttaactcagaagagtgatgtgtacagctttggtgttgtacttctagaacttcttacagggaggaaaccggtggatcataccatgcctagaggtcaacagagtcttgtaacctgggtgagtatacatacgttctggactataatgtttcgtattaattgtccccttggctttacaatttcattttattggctgtgctcaggcgacaccaagactcagtgaagataaagtgaaacagtgcattgatccaaagctaaaagccgattaccctccaaaagcagttgctaaggtacctcgatacatacaatagtttcatattcatgtctattaaatttccgttttcgatatattcgtgtctttgagattgacagaatatgttatgttggcaatataatgcagctagcagcggtggcagcattgtgtgtgcaatacgaagctgagtttagaccaaatatgagcatagttgtgaaggcgctacagcctctcctgaaacctccagcagcagctccagcaccagaatcttgaaacttttaaatcttttttttcgctgcaactatcagaaagaatctacatagtaccatttgccataaatgataatgaggttggttttgagagtgataactactattattaaaagatgatattatgtttcatttgatgatttgattttgcacacaaattttgttgtgctagaaagagagagagataattgatggcaaagtttattgttgccgtttgctgagtgggagagaaaggaactctgattttatttatatgatccctcttattcctatttctctctaccttttggattaataacctcaaaaattcgaataacttgatcattgaatatttgcgttagtcgtgtatgataattacaatgttttagttttcttaacaaatcgttaccttcttcttctttttgtcgtctcttatttatgaaaaaaaaaagaaaaaaaaaaaaagaaacaagcagcataacaaagctaaaaggcccaactgaaaagtaaataaacaaaggcccaaccaagcccaagagaaaaccaatgtcagttttgtttttttgtttttgaatttcaccggttattcattaaagaattgtttggcccgccaacaacatacgtgtccatatccacagtctctcacctctcgcagtgcccaaacctcttcttcttcttcttcttcttggcttctcctcctccttttccaatttcaaaacccaaaaacaaatcagcatggccatggctacgcacttcaccttccctttcaactatgttgtttccgaaggctctcatggaagaagaagtttcgtccggaagctggtcagagctgtagcctccggagattccgtggctccggcgatttcggaagaatcaaaagtgaaattgggtggctcggatttgaaagtgacgaagcttgggatcggagtctggtcttggggtgataacagctattggaatgatttccagtgggatggtcagttctcttaatttcgattctcaattttatacattttgtgaaacaaaagtattgaaatgaattaaaagttaatctctttttttttattctctgtgatggtagacagaaaattgaaggcggctaaaggtgctttcgacaccagtcttgacaacggtattgattttttcgataccgcagaagtttatggttccaaggtaagcgtaagaaagctgatcactcttcgtaaattggtttattctgaaactaatttggaaatctccatcttttatagttttccctgggtgctataagctctgaaactcttttaggaaggtaatttgtttcgaaaacatataacagtgtgccacactatcctcatatatattcctcttgactgtcattggtgagattttcgaacagattcatccgtgagagaaaagagagatatcccggagctgaggtttcggttgcaaccaagtttgctgcattgccatggcgatttggtcgtgaaagtgttgtcactgcccttaaagattccctttcccggcttgagctttcatctgttgatctctatcaactgcattggtatgcacccctaattcatgttggagtaaacaacactagaaggtaacaatctcactattttcttaattatatttcaggccaggactatggggaaatgaaggttttttcttaagagcagcactgaatctacttttaactagagttcgtgtcacttttggtgattatatcaaatccattgacattgtgagttatgtttttaggatatcttgatggtcttggggatgctgttgaacaaggacttgtcaaggctgttggtgtttctaactacagcggtatcatttcaatctgttttttccttctcacggatgcatatcttatgaactttcaaattcattatacttactgttgtgcgatttttcagagaagcggcttcgtgatgcttatgaaagactcaaaaagagaggaattcctctggcctcaaatcaagtcaactacagtctgatatacagagctccagagcagactggtgttaaggctgcttgtgatgagcttggagttactttaattgcatattcccccatcgctcaaggtaatctgcctttatctcctttgcgttgtgttcatgtctatcgttctctagaaaagttgcatcaggctcttatagtattgacgcaaaacaacctggctaatgaacacatacattttccgttatttgctcttttgtcttttttccaggtgctctaactggtaaatacaccccagagaacccaccctcaggtcctcggggtcgcatttatacgcgtgagttcttaacaaaggtaatagctttcgctgcatatatctaagttatttaacacaggcgtgtatgtctgcaaaaccatagttacatctgaataaccctcgagtcttctaagaaacagatttttggattttgataacttgtatatctcactgttataaacctgtcgattttctcctctaatcctgcttttttcttagtaagttctgttttgagacaaagtatacacttttatacaaaacacaacaccaatcaatgtacctatacagaaattatcaaaaggtagcataatagtgccaggtttcttcactaactttgacttgtgacgttacagcttcaacccctgttgaatagaatcaaacaaattggggaaaactacagcaaaactcccacacaggttctttcccttttccttatgcactctgtttttctttttccctgtccaaaaacgttaagaaaaatacaaaagagtaattgtgtgatccatattaagctatccaagtgtacaccctcgattttgcatcaaatcatatgccttcttgttttgttgtgttgtgctgtgcagatagcattgaactggttggtggcacaagggaacgtgatacccatcccaggagccaagaacgcagaacaagccaaagagtttgctggagcgataggttggagtctgacagacaatgaagtgagtgagctacggtccctggcctctgagataaaacccgtcgttggtttccctgttgagtatctctgaactcttaacactctgtttgtagcatttgtaaagctcaaaagttacaatatgaactaaaagtagtatatagatgatggtaaagtgttgtaatacatatgcaaataaaatctttttgcctctttgagaactttacagtagccaaaaagaaagaggagggcctttggcatatgcttcaatagatctagttagagtcagacgtcaaaattcatctgcgttttaacctttctgttgactagaagaaccatttgatgcttacctcttttcatatcagcttcaagcaggctttcttctcactatctttgtgctttcaaggatttagatttagtctatagcttctttctgagtcaatatcttattaatttgagaaaatatctattgaatatagttgttttttaagaaaacttggaaaacgagtctgttatcataggtacacaagtgatgccgaaaaggtaacatcatcttgatagttctcaaaagctcagtttcattttccattttttacaagagacaaatgaagaaagcaagcagagcattgttacgttgtgttgctttcactcaagcaacactgaaagaagtggctgcgctctcgacaaatttcctggctcccttgaaccacctcttgtctccagcttgtgctttgcagatgtaaagcttccctccattcacggttgctgtgatcagctgatgcttcccaccttcgtctccatcagccgttcttgtcaacacagacaagtaatagtagggtttcccaccaacttcctgagatgatgactccagaatgtttgctgttgccactgcattgttgtcaaagcctccctgtaagaacatcagattcacacacacacagagttagaacttgataactcactccacctaaggtaagaatctttcttgtaataatcatcgactactagagaggtctttgaaggttatcagttaaaaaagcttttgagttttgttttatcagttaacaacgagggagacaatgtgttctctctttagtgtttgattctcttattctattctatcagcttctggtttacttataacaaataacaatgggaagtttacctcagaggcagtctcaccgaagtaagcttgtttccctaggaggtaattaacctgcataaagcccaaatcaccactcagtctcacacttcattagattttgtaacatcaatacctttacagatgatggagtaaagcaaagacctgagagaggaactcttcgggagaaccgtaatcagtgatggacttcttgtcggtaggagtgaccatgacattgagattgctagtagcatcgaagttgtcttcgaacctaaggacttgtcctggatactcaatctctttgcttgggttccattttgctggaacctgcactttgaacccatctccattgtatggcaagaagtctgtgttcgtctttggcttcccaaacacgtttgctgcaacaaaccaaaaaataaaaataggatgaaaaaaacacaatatgttcttcaagattcttcttcaagaaaatgaaatgatccaaggttattttattttataaacgcaccagcttcaccgtaggcggcatcagcaggagatactttggaaccaacagcagcggcgccgacgaggagagtgagagcaagacggcgggagacggcggagttatcgtcttcatgagactgttgagctttacagatgatctgaacaggtttggagagcgacacgtgacgctgggatgaggaggaagatgatgatcgtgcggctgatgaagccaatgcgctctggtgtaggaaacacgcactgtacgccattatctctgtctctctttctctctttctctcttctctccttgtgtgtgattaagttatgaaagtgttttttgaggattgttggtgtgttaatgtatggaggtgaaaccaagagtgaagctgattggttggtttcggatattggaggatctctctgttgatgtccagataaggctgttgaggtgttgtattgtgccacgtggcagatacgctttcttcttgttccacgtcagattcataagccttcgattccatctattttagtattttactctaaagccattccatgatcaaatcttttttctgctcacactaagacactacagtactggatcaataatggcttttcttctttcagttacatgcgtatatcttaaaacgtttataacgatagaacaacggaagcactaagtgagaatgaatacaaattatctaacaaaattgttgaaattaagaatctgttacacttatgtagacaagtgccatttcaaaacttggtttcatgacaaacaccgaaatgctcattaaaacaccaaagtggaatgggcatcatacttcccttcttctttcggttttgcttaggttggtgcagtatttgagccacactgctcattgatcggaaggtatgctcggtttttcctcaatcaaacctgacttgtttccctggctcaatacattagtggaaggcattttctcttccatattgttaaccgaatcaaagttgttagctaatttgcgctttttcttttttggtttcttagctggagcagtgtttgagtcaggttgctcattcccactgacaagattcgaaggaatgctctctttctccttacccggatccaacctgttgactgactcaggatctttttgctcatttccgtttgccagatcagaaggcttgttttcttccatgttccccaagtccaggttgttgactgatttgcactttttggaccttgatcgcttcttttttggttgcttagcagcttccattggagcagtggttgggtcaggttgttcatccccattagcaagattcaaaggcaagctctcttccatgttaccataatccgagttgttaggtagcctaagctctgtttgctcattctcattagccagatccgaaggcgtgttctctttcatattccctaaatccaagttgttggctgacttgggctctgtttgctcattctcatttgccagatcggaaggcttgctcttttccatcttccccaaatccaggttgttgcctgatttgcgctttttagacctggatcgcttcttttctggttgcttagccgctgaagcatcttcacctggagcaatgtttaggtcatgttgctcatttccattgacgagattagaaggaatgctcactttctcgctacccagatccaacttgctgactgacttaggctcttttttcttattcccatttgccaaatcagaaggcgtgttctcttccatgttccctaaatccatgctgttggctgagttaggctctgttttctcattcccattggccagatcagaaggcgtgttctcttccatgttccccatgtccaagttgctagctaacttcggcaatgtttgctcattcccaatagccagatcagaaggtgggttctcttccatgttcccgaaattctcttcaatgttccccaaatccacgttgttgagcgacttgcaccttttggactctgactgcatcttcttttgttttgtagccgccgaaacatcttccactggagaagtgtttgggtcaggttgctcattcccatcagcgaaatttgaaggcaagctctcttccatattacccaaacccaacttgttggctaattcgagctttgaccccattggagtagtgttcgggtcatgctcccgaagctcattggggttagtggaaggtatgtcatctctgggactcgttgcatctaccactgaagtaataggttgcacagctacagtttgaactgaagattgtgcgaggctatcatatgagagaacagaagctattgcatacatagaagcaccgagatgaggcggcaaattttcctttggatgtttaacctacaaatgcatatggaaggttgaaaaggatgacattgccaaaataaaataatgaaaatcttaaatcgtagtgataactcatgtaccttgaacaaaatggacgccattagtctctctctcaagatgtacatttgagcaatttcaaaagctgtaaccttgaaaggcagccaccgatccactactacttttactgaattttccggcccaagcattattttctctccaggcctaccaacttctttatctatgtccatcgcgtctcctacatttcctactttgtggtcttcctcgtcatcactcttaacagcatcatagctctctgtagtagaaacggctatctctcttgaaaacagtaacacaggtatagtgggaagaacagtgcagctccttatcaccacaccccaatctcctcgagtgatctcatcaaaaacaattaaagcttcgtcaaacttggtagaggacatgtcaacattgtttgatagcgagggcacacggactttggctccagcaatagtctctattacagaccttgtccgattcttggaaagtgggcacatccttcccaacatagggtacaatccaactgctataacagcacggagaatacccggatcatgagcattcaggctacagtttgagctgctgctaggtatgaccccatgtctattaagttctccctgaagcttgcgacacagatcatccagcctcttcatgacaacttgggagatgaagtacttagaacaaaactccttagcttgaccacttgcttttgcatttttccagcactgaaaagccgcgacagtggcaagatgatcactgtggtctccataaagcgatgcaagttcatgttttgcggcagcagccttttttctatcacctggcgacaagggcatggtaaacggatccttctcgtcagctgcacatgccagaataagtgctggatccaaacagttcactaatatggcgaaataaatcatcttgctaatccgaggatgaactggaagctgaccaaatttctgtccaagttcagtcagctcttcttcaggagtcaaagctccaatatctttaaggatgattaatgcattttcaatactttgagcaacaggcgggtccatcaatttctgaaggaaatcatttacgttgcaattcggatccagcatcttaacctgaacatattgatattatagaaggacatcagtaagaaatcaagaacgcaagaagtctcaaacaggacgctaccatgcatgaatgacaattaaacatcatagaaaaaatctacgttagaaagaacagcacctgcaagcagagttcatccactggcattctcataacttcaggaactctatattcgggcaaagacgctgcccggagtttagaatatagatgataacagatgccagcttggcaacggcctgctcggcctgccctctgttttgcatttgcttttgatacccaagaagattggagcgttgacacgtcattatagggatcataactcttttccttcatccgaccactatctatcacataaaccacatcatcgatggtaactgctgattcagcaatatttgttgcaagtacaattttgcgacaaccacgaggggggcgattaaaaactttcttctgttcctcagctggaacccttgagtgaagacatagaatgatgaatttagcactatgtgcaaaaaaccgatcatcaagcaatttctcttttgttttgcttatttcctcccacccaggtagaaaaacaagaatggcaccatcttttgaatcgctgcatattttcttcattaacttcactataagacccacatctacttcttctggtttgattgtcgccatatacttatcaagtaagtcttgtgcttgctgagaattggactggatgttacccgcatgttccctgattatttgagcagtttcaaattgattctccttttcagctaattctaatgctgttataccttctttggacttcagtgtacagtcagcgccgactgaaaggagcttacagacatcgctaaccctgccctttccagcaaagaccataagtggtgttaggcctgtcgttgagttctggtaattgtaagcctcatgacttccttcagatgaaactagatctacgagacaatcaaactcatcatttgtccatgccaagtcgattgcttcatccaaagaaactttatcttcatctttaaaatcacgtttgacagcagaaagtagatgactattcttgtctgaattcaggacagagagcgcatcatccagaaaaaaggttctcacctgtagatacggacgcaaaaatattgttttccaatacaatgagactaagaagcaaattctataaagagacggatagagagagacataaagagagaggaattc

SEQ ID NO: 19 - DNA, 91470 bp, Arabidopsis thaliana
aagcttctataagctaatatgattgttccgtaaccaaagaccattttcatatttgtttgcgcaaagcttataacaaaaaaaattgtctgataatgaatcataagccaagttagaggatagataaagtggaatacctgtcgggatccatttgttcgtcgtccgatcgaaacacaaactacggcgatttatcgtttcaagtagattttcagtaaaggcgtttaagttccagtcgagcatatgggaaacgacgcccaaggccaaaacctctgcctcaccaagaggtgttaagccttttgaggttttaagccttttgaggttttaagccttttgaggtttcgtctttttacacttcggcccaaatccagtttaatgagttaatttgtggacctattacaattacatgtttattggttttaaaacctacggtttaggcccacctactatacagtatttaactatttatttatcttgcttcgagtgagactacaaaccagaggctcgtcttctgctgacaactattaaactcataagccaatgatgtagttactgtatcttgcctcaagtatcctgtttctactgtaaacatattccacatttctgccaatcatagatagctcagtgatgtcaatcagggcagtgtttttattcattccagagtcagttgatgagtgtaccaatttttttccagaacctttcattcacttttcctaaaagcagttttacataagcagttacagttgaaaactcaaacacgcaatgtgcatcattagcaagttacgagcaatgtcgtacatacgaggaaatgtgctctgaggccagattactgttgttcaatcatcgtcacctttgacttcattacttggatgattgtgtttctgagcttggtacaaatcagcaatctgaaaatgtgcagggaaaattgagaattagaaaaaggaaaagagtttcaaaaccagtctggtcttgtctttccagtattgaaaacatatgagtgtaattagaatgaaacttcacctgctcagatgatgttgcttcctcgggcttcttgtcttcccgtacacgaagtagacgaggaaaacgaagagaaatccccttttaacgaaacaaaattgaaaaccaatacgtaacaatatatcagcagagatattcaaaccaaaaaggaaaaagaagaaaataagtcggagaaagttaaaccttatcaggatccactatgccagtagctgcacggtgcacagggctaattgttaagtcagctgctttcacttcccagacctttaagcaaacatattttttacctttcatttcaacccatacgatagaatggcgaaactaataaatataagataacattttgagtacaagcaaacataatcctacctcagtgggctcaaaccaaacatctggattgaggctgtctccaactcggtagtattgctggatatttgaatcattacaattaaataagaattcatgctagagacatatatgataaggaagaagaaaatatcctacttttggagtagcaatcacttgagagcgaagactggacgaccgctcgtcaagcatggcatcagaaaatccagtacctagtagcccaaaccgtataaccaaggtttaagaaacttgaaaaactgaacacacatacataatatgaaataccaaggtgtattcatgtattcgactgaccaattttacaaatgctctggaactcttccttatcaacatcatagcaagcgagtaaaaatgcaccatagacacctagaaggaaatcataaggctttgttaagagcatagagaatgaagaatgtatcatccaatgtattttcgtggttttcacctgtgcgttttccacgtccatggaaagcagcaattggtacaagatccacagagtccccaatgctgcacatgtaatcctatagtcagtaaaaaactgttcgatttaaacttttttaagaaaaatgtttaagagagtcttgcctgtccatatagtctttcttcagttttagccaattatttgatcgctttgcaggctcataggtagcatctgagtccaatgttttaatgattaaaccttcgcagctgcaaaagaaaaaaagaatatatagatgaacgggaacatcatagagataaaaggcataggcctatgtaatagacataggtgtagagaaatcacaacatgcgtgggtcaaattgctaaaaatgcaattttcatcctgaaggcaaatcatgaaaatcgaaacagcatagagatattgaagcagaactcaatgtcatatcatatatcactacaggcatggtcaaattgttaatttatcatatccttaaacatgtaacagataattggataactatctaaaatagaatacccgaaatgagtaaatatctaccagaatctctaaatttatgtgaactcagatgaaggtgaaagatggtgctaaagagaagatgctaggcaacaatcagtacgagtatgatcaaattgctaaattatcatacccttgaacatataaagataactctctaaaataaaaaatacctgaaagcagtaaatatctaccaaaatctctaactaatatgctactaaagagaaagtgatatgcaacaatttacaccaaagtttactgcactttttagagatacagagaagtgtcaagagatatacccaacatcaacagaagcgtcaagaaacttttgtatttcatcgatatcgttagatgttacagcagttgcaaactggaaatacccaggatcttcctcaaatgattcgtatagcttctgctagaagcaaggtgaacacaaatgattacatatttgcacaacaagaacttgactgcaaccaaagaaaaacaaaatattataatgatatacagatattgctcacctctcggcgaattttaagattctcctggataagttgttggccatttagatataacatgtcaaaagcaaagatgcatacgccaaccttgatatcattgacattcacatttttacgggctcgagtgctcaaaatctggaaaaagaaaagaaaaaaaaagagagagaaaaaagacatcaagtcaaatagtttgaaatagctaacttcaactaatgtaaattaatccaataacaggagctttataacaattgatatatattaacaatcctcttcacaccaacactaaacataagcaaaaattaggtgaatcaccaaaactgtctgagtgccattaaagatccataagtgtaacaaggtttattcagtaacgttggcaaaattaaaggttagacagtgtccaaaacccgaaaatctggtctaaaagagcattacagctatgcttatttcttaattcactggctaacaagatggaaactctaacacatttaacatttctctggcatttctataaaataacataccgtaaatgaatagacaaaatataaggctgcaaccatactttaatatcagaacgctattcacttatgagttacctggaacggaagaattttctttttctccctgtcgaaagcaacaacttcacaatccagaataaaagatttcacagaaggcttctttaatctgcattgagatgtttcactaacttcagtagaaagattgaatctctaatgttttcaaccagttacaccagatgtttaccttgataacgcaagagcaacatccgggtacttcccagtgtttctttcagcatttcgactgtatatctcaaatgtaccatcctccataaaatgtatctgcagaaattgattgatgataagccataccatatttaaataactcatatctaagaatagcattcatcctaattcagtagacaccaaatatcacctgtgcacgttccccatcatatttgtattcacatgtgaaaacgatgtcctggaatttattcagtatctcagctacacctttggttggttttgcaagcatgggtccaattggaacacccaatgtaaagttacaagtttttggaagattccacacaccgccacttagaagagcaggaacaataatgtcatagacaggaagtacagtgaatacttgtttaacaatctttgcagcctacaagaacagagcagaatgatggatccaggaaagaagtgtaatggcataagattacagaaatgcatagaaggtaaattgtgacgtctctcaaagaatactacatagagatcctacagcaacacaacatccttagagtagctcagaaaatatatttttactcacaaaactcggaaagaaggattctgatatataagtgggagatacaaaaacaaaaagagatagcagacctcttctaaaggagacttggtatttgggggtggctttgagtgctcttcattatatacagcggcttgtcccaatgcggctaagacagtctgacctgagaaccctaaccgcaattttgcctgcaaggtaaattaagaagggcgaaataaggaacccaaacggataagcagaaaaatagtggcggttgatgcatacctgaagtaatcgtgttaagtaaagaggttcacagtctgttgtcgccacaagaagtgccttcattcgattcttcttcttttcattactatcttttccactttcctgtaatagttaacatgcaatagtcccactcatcttctatgcagtcagacaaaaagacggttgactgaatctcaattgaaagcataaacaaaatttcaagcattcaaaagccacaaggttataaataccttagcaatttgtcgaaacgtatcgaaaaccttgacaacagtcaatggttcgggcttgaacatcatagtctgagtcgaacggcttccttttgctacaagtcccaagtctcccagttcctataaatcaagttcaatttcagaactgctaattttcttattcaaaaaccttatagcaattccacaccagacaagctcattgaattacaaggcaacaaaagttttaaaaagtcaacataccgtattctgcttcttaacatgatcctcagttctaccaaaagcctcagagatagccttgataattgtactctcaccaattcccaattctacaccttcatgagccggggcaatctcattcgccgaaagataaacagtagcgaccaaatcctcaggagtagtggcaataacagttctcaacatgttacacagaatatcagtaatcacaatccggccactttcatttgagatcagatcaaaagccaatgcgacaaacagaaacggaactctctcccctttctcccagcaagacattttttcaggatcgaaatcattcggcttcttcttcagcaatccaattttgctcttcatttcgtctgtcttgctcaaagtcttagcctttttcgctcccgtctttgaatcctccgcaattgacgatgtatccgatctgggatttgcagaatcagaaacaggctccagcagatcctccgtttttggaagtgtaccttcggaaacaatagttttgcccaaattagcatcttgggtttctccaattttccttttgttcggcgagcgagacaaattagttgtctggggagtcttcttcttggcggctgcacgagcattggacatgagagcatcaaatgcagaagggcgggaagaagacatggctctatggcacgagctaagacgcaagtgggaaatttggcggctaaaagagattaacacggaggagaattgagagatttgggttttagtacagagagaaggtatgcatcggaggtaattcgacgatcgaatcgctaacatcagtcgattttgaaattagggttttagaaaggacaggtgttgcaagtttgcaaccttgaagaaaggtgataatatattggcggcagaatttctcacccgccactctctcctttatgttgggccaaattaggaccacctgaagaagcgggctaagatatcttaagatggttcggatttgccgaaagaatacgattttttatccagagtttctacctgtaattactaattagggttagtccaaatctttaatagatcccaatgatcaaattttatttttttgaaaacttcaaatttggacaaaattgtgatgattatttcaaaggttattgtaaatataatattttataaattacatcaaatgctatcactaatggatactcatacactaaactgtgccctagttttaaatttttgttattgggcctttttattttatgtgggtctatgatatggaaaaaatatcgttatagcccaatagacagtataatgtcagcccaaacgtgacgcgtatggttatcgaactgtgaaatctaagtatcttactcattcgcacaatgagcgcgtagacgccacctatccgaaatccatgcgaaattgctgttttccgtaaaattaaaaaattaagcgcgtgaagggctgtttacgagttcctcaacttttaatctttatcttgtttaattggccaattaggatacaaatcttagtgtagaattaaaataaaacacatatttcaataatttagtggttgcacatgcaccctgtatttcttcactaaatccgcctgttaatttgtgggatcgatgatttaccttctcatcacctagtatatgtatttctcccctatacatgaatgatgaacatgtgttttgtagtccttacaacacaaaaaaatctattgtgtgcttcctataagatccgttacactttgtttgtaaaggatcttaatttcaataaggaaaataaaccaagattgaagctaactcaatttcaggataaatgcttctcactcttgttgttggacgactaacacggaggctctagaaggaaaatattcagatgctaacaaatctccaatgactccaagttcttcgaattccatccaatccccgagtcctctggtgactgtagtaccaaccccacttcttcgaccgactatgaatagatcatagtcgtaagacacggagtgcaaaattttggatgtctctgtgccatctcccaccgtccagtcaatgatggttgacttatctccaggcctttggtcttcatgacggttcatgtctaccatttggctatgaatcctcaagctactctcatcggcataagacgtagggatcagacgcaagaccgttagaatcacttgttggttacctctcatgtggtcagctaatgccagggcctctttgtcgtcattcccacccacgtaaatcaagcacacctgcatttaatgtatgaaaataaaaaatattcaacatcatttagaataaacaaaaaaaaacaaaaaaaaaagaatgtagttacttacacggcacggagattctagggctttggtttgccaaattggtttgcgataaacaaagattccgacagaacaaggggcgcgtttcagaacattaagattaagacttcttagggtttgatcgtctgagataatgacatttccgttaggctcccaagtgcggtgaaacgagaggagaataagattggaaccttgactaagagcaaaccaacatatttgttcatgcatctctttagcggaagttaaagacgtgaacatgtttatggaagcggagtcccaataaacctcttgaaacagttggaaagagcttatgacattttcggaataagaccgacttccaggctttggtttttgaagctggtgggagataaacgtgggagtagcttgacccaataactctattaggtgaagaacacaacattccattggagagtctttagatggggaagttgctctaagaaggctaatcatcgatgttatgttgtcaggcttgttgatgcacaccagcgtttgcatttctggcttctctttcaagtttcttcttccgtaacacacaaatctcttagaccggtcatacaggaaatgtatagccattggtgttaacaaagagtttacgagaatgtatacgcccaggagcgacaagacctccagactaatcctctgttaaaaatgagaaacattaaaacagaaatatatatacaaattaagatgatcatcatatccgttatatgagtatagctaaaatattcttacgtctttttcgaaggctgtaagtacgtaacccaactcgaaactactcttggtgcccataatgacacctaggataattgagtctctcaaaggtatctttgtagctaaggcggctaaaaacgaagtagcgaatttcgctatgtatacgatgggaaggaaggaaaaacactcgtacatatgtccatggagatgccttccatttccaaactcctttcgtagaaatgaccaatctagtttgatcatgctaagtgatccaaagaggggtaaaaaaatgccctcgttgaagctatcgaatttttgtataaatactgatcctaatggcggcccgttagggacagccaaaccaagagcaaatgcccctagcggtccgaagaataagaagcggctccaataaagataagataagtaagcaagcaagagaccaatgtagagatagacgttcttcaccggggctccttctggcgtatgtcttataacccaaagcataaattgtcgcacaaggtacacaaaaataaagaatgccataaaagctaatcccattttcactccttgagtttcatcacggctaacgtaagccgatacagtcaagaaaaaggcaagcaaatctgttaccattcccgctgactgagctatttggccgaaatcagtgtgaactatcttgaggtcagtaagcaacatgttgacgcaagtgaaaggcgtcatgctcattgtgaatgtcattacggtatactccatttctgtcatggtcagaatacttgatttctctctagatgaataaaggagttttcctatttgccatgggatgatcattgaggtgatcccaattacaacactcttagttcctgactttttcattattccaacatctgtagtcactccccttagaaaccaatctaggacaaaagcaaatgcgcctatagtatcaggaacctttgtcatatactggttataatggataaatatatgctttaaacatggtatttgcatagatccaaacatctcacttaagactgctccgaccttcaagaacaagaaaagaaaatgtgttatattattcgaacatccccaatgacatgcggatatttgaaacccgtaattacgtacaagcatcatggaggtgaacttggggataggaacacctaacttcttgaacaacatatcaaataaacgccataataggaatatggagagaataatgatctccaattgtggaagagggtactcccaaaaatccattcccttagatccggaagccattttctctgcaacgccatgtgagttcaacattatatgtggacttacatcgcaaaacatcttcgtccccatctctgctcttttctcatcgttgttccacatgaactctttgcgccaagtcgcattttctgcatccatttgggacaaatcttgtctacgtaaaaccaaaaagaacaaaaaaaaaaattgacaatgaaaagattttgcagtcaaaaaaagaactaaaattaaaaccggtctgatggtttcacacagatcccaaaggatctctaaaattaggataagggtataaatatagggattgtctcgtccaggtgttgtctttgtttttggcgcttgtaagttgtattactttaaaataaaatgacctctttaggcagtctaaataaacgctttacccatttttaataagatgatccattaattaagacctcaaattcaatcttttatcaaagggaacagagcagagtactctgttaggtaccaaaatctctttttgttgagaaaaacagagtattttgctctgttccctctgatatctctaacacatactaaacttaattataacgtgacaaagtgtgtatgttaaacagaccctgttactacaagagaatatatatttttgaattgtgataacaaaggcagctatagttggaaggcgttatcatagagcaggcactgccacaagaaattactctaatcttgttaactcaaaatttgattaaaaaaatcgtgaagtttatatcatcatatccagaagaaactcgaatcaattactccataacttcaagcagcctaaaactaatgtttattgatgtagagaaatacaacattgaaaagctgagcattgaacatatctcgcattatttcttagaaagattttctcctttggctttttgtatgatgaatgtacacttgtttttgaacaaccaacactgatgcacttgaaggatattcatgtgatgctaataaatctccaataggtcccaattcattgaactctgtccattcactaattccgctagtagcctcagttcctattccgctgccgcttccaacgataaacaagtcataatcatttgccattgctcgtaagattcttgaggtctcagatccatcagaaaccgccttatcgatatatgtcaccttggcatcattttctttgatgttggacccaacgatgctagtcacggactcctttaggttaatcgattgctgttgctcccactcatcgttatccatttcagaagattttggaatgaatcttatgatcgttagccttgttcgtttttctgtcagtctcattcgatttgttatcgccaaagcttctctatcgtcttttccaccgttaaaaatcaaacatatctgcaaagatgagagttttatcaggttaaaaatgctaatatattagtaccatttcttttgttcatcataaatggtaaaggaaaatgaaaagattttctttcagcatttaatttcatttagacgttgcaaaaatattcttttagattttataaaattctgaaatttgtattttcacgtacccaaacggataattaattagttttcaaaataaaatgaaaagcaccttgctgtgggacttagccatatgagattcaacgatgggcttgcgatagacgaagattccaacagagcatggggctcgtctcaggacgttaacgttgagcattctcagattatcatcgttggagataaccgtggatcgatcaacggaccaggttcggtggaaaggaagcacaatcaaagataggcttctggatagggctagccaacaaatgtcctcatgcatgtgttgggacacggagacggaagtgaaaatatccaacgatgtgtattcaaagaattgtctttggaagccacggaaggagattatgacattgtcagacagagaagtacttccgggctctggtttttgcaactggtgggaaatgaacataggattggcttgacccacaagctcgacgaggtgaagtatgttacacgccattggggaatcttgtgatgggctaaaagtttccaagaggtcggtcatggaagttatgtgatcaggtctgtagacgcacataagacattggagagccgcaccgtctttcaagatgcccaaattcctttttcggtagcatctgaatcttttggttgggtcatgcacgagctccaagagcattggtataaagatagagttcaagagggtgtaggcagctaggattgtgaaaacctctggccttattagctgtgaaacatgtccaaagatttgattaatttttatgaaaataaactaattcttctgactttaaatatatatagaagagtttaattgtacgcacctttaattcaaccgcgtacgtgtagtaggcgagctcgaagatccccttattactaagcacaagggctaaagcaaaagagtctctcaagggcattttaaaagcatacgcggttatggtggtaacaacgaattttgtggtattcaccaaaagaataaaggaaatgacctcatagatttgaccctccatccgtattaaatctccactctctttgaacaaccgtaagagatctacttgcatcatggttaatgatccaaagagtggcaaaatagagccaagattaaagctctcaaacttttgaatcaaagtagtacctaaaggatatccatttggaaccgtcaagccgaaaacaaatgatcccgcgggtccaaaaagatgaataaccttgttaaaaaaagtgaagcaggcgaaagcaatcccaaaaatcgagtagaggtagaaatccttgaccggcctcccttctggagtctgcttgatcacccaatacatagccggccgcacaacgcatatcataacgacgacaaagaggcagaaacctacggtttgcatgaagccgtacaatttttcgtagtagattgcattaaaaaatgttacaccaaaagccaacatgtcagtcaccatagccccagagagggctatcctcccaaactctgagtgtttgatctggaggtcttttaggagtgtgtcgatgctcgtgaacgcggatatgctttgcaagaatatgatcaacctgtattccatccttaatatgcttgagtcccctcttcgttctctatatctaaaagtgaggctgccacaaatcaagggtataattactgtaatgaatccgatcacactagaccttttctccgtcctaaatggcaattcggcatccatggtcacacctttgaggaaccaatataaaacgaagccgaaagcccctagggtctcggccacctttggtcggttatcatcagggaaaaaaatgtcatggatccaagacttgttgctgaaatggcaagtttgacctaaaattatccctgccttcaacaacaaggcattacaacgtttaggaatatgcaccgtactgattttaaaatttaaaacgtggagggaagagggagattaagaaaactcacgatcatcatatatgtgaatctaggtactcgaagaccaattttgttgaatgagatgtcgagaagccgccatataaaaaaagtagaaaagattaagatctcgagattcgggagcggatattcccagaagttcatccctctcttgaaagtcataacctcccatatcccgtgcgaatttactatgtgagggtgtgactcgcagaagatagacgagttcttgtcttcattgaattctccccatgacacgtcccaataactcatgtctatctcctctgtagccattttaaggagaaagacaaaagttaacgaagagacttgcttagggatcaagaagatctaatggaatgatttagggtttgtaattcgattgggaaagaagaagactagggatggttttgttataaacgttgactaattaaggtcgaataaccagcaaacaacagatacgcatctcaggtacagttaatatttacccattttgttttctttttatagcttcattcttctccatctcttgttccttgtcaacattagcacacgtatgattgtacatcgtctatttcaccaatcaacaacgccaaagctatacatataacgatatatatttagggaattttgcatccacttgcacactttctcagggatatatatatttttgttttgacaattttttctatgtttggtgaaataggaacttatactttaaaatcaccatacaaattaagtcattcaaacagctaagcatgcaaattaaaccaaataatatagcaaaggaaaatggatactaaaagagtcttactaatcaaggcagggtaagataaataacaatataaactaaagaatattgtacctaggtcaggataccaaattactctcttataaaatttctccaaattcaaaattactaattaatgcttgaaccctacgtatacgtaaagcataatcacaggattaagattcttccaagtagttaggcattaaatattcattggctagtcgtatttgtggtcttaagactataaagaaatgagaacaagtgtaaatcacctacaaaccattttgaactcaattcctattggttggtaatagattcctctaaaggttttaattgggtaatttcattgaatgtatactacgtgcgtgaaattctcatcatttttaatgatcaaattggtggcaagtaggtcttttaagactatatactaatttgctatgtaatttatttgtctagtttgcttatttttgccgtttttctttattgtatagcgaaaaggagattaaaacttgtaaaacatgtaaatagatgtaactctcacattgaatgttaatttaattataaaacatgtactatttttttctgatttcattgtttttaaaaaattatgtggaatcaattaaatttaaagtcatatttgcaaatgttatcatcacaaggccacggagacgaactgtcacttaaaaatttggggctacaaatgtgtctcgtgtgagaagtgtatttctattttttgtatcttataaatgaataaagagtagttgccaatgtaatatcatctacaagctacattctgttgttgttgcaccaccaacaccgaccctctacggggaaaatcttgagacaccaacagatctccaatcacacctaactcatcaaactccgtccactcactcaatgcactcaccacgtcggtccctactccggcgctcctccccaccacgaataaatcaaaagaattagcaatcgagagaaggagtgttgatgtgtcggaaccgtcgttaactgtctcctctacgtattccacaaaactatgttgtccaacagtattgttattgttcctcagaacctccttaacctctgccgagtccagcatctgatcccaccctgtagtcatcccatccattttcgctgggattagcttcaacactgtcaggttcacattcggattcctcatcatttgccttcccaatgccaaggcttctctgtcgtctttcccgcccacgaaaattgcgcagacctggttttagacaaatcaagtttcacacgtaaacacaaattcaagcacggaaactaatgattagcgtatggaacaatcaaaccttcaaatatgtgttacctcaaaagacggactgctcttttgcgcagataaaagcttttgacgatggacaaagatccccacggagcaaggtgcttgtctcaagacatttaagttagcgttcctacgcatgacatcgtctgagaccaccgttgtctggtcaagggaccatataatgtggaaagggagcatgagaaaagaagcttgtttgtcgagagcgagcgagtaaatctcttgatgcatgtacctagggtttgagatgcatgtgaacaattccagcgatatcgatttccagtaatgtttgaagttatcaaaagcgattaggacgttgtttgaataagaccggtttccaggttcggctttttgcatttggtgggagataaagactggattgtctaaacccacaagctcgacgaggtgaatcacgtagcaacttattgtggattcatgtagaggaaaagactgtgctagaaggttgatcatccctgagatgtggtctgctttgtgaatgcacactagaaacttcagctctgatccaagcttcaagctcattagattccgcttctggaaactaatgaatcgttttgacgaatcatataggtaatgtatcaacactggtgatatcgtagagctcactaaaatcatcgttgccataatcgtgaaggacttcacatgaagaacctgtaacacaacaaaataatcttataagacagaaagaaaaaaaaaaacattaagtgttggagagttgaattgtcttgaatataaagttaaatatgggaactcacattgctttcaactccatacagaaaataacacagctcaacaattcctttgttgctgaggatgagtgccataacgaaagagtcggtcagaggcattttggctagcaatgcaggaatcattgagaagataatcttggcgacaaagacaacgatgatgatggtcaaggcttcatacaactgaccgtcaaaatgccttagttgaccgatctggttagctaaccaaggtccatcgatttgcagcattgagaagaacaagaaaagtggcaaaaggattccagtgttaaagctttcaaacttttctaccagttgagaccctagaggaggaccgtgaggcacacacaaacccaaaaggaagggtccaacagccggaaacatgtgaatttccttcaaaaagtagtaaccaccgaaggctaaaatgagtatgatgtagatgaagcattccttcaccggtctctcttgtggtgtccgtttgatcacccaaaacatggccggtctcacaacccaaaccatgaatatgacatatccgataattcctacgccttgcagcgcagaaaccctccagtccatccaagccacaagggcaaatagattaacaccaaaacccgttccatccgccaccatagcggtcgaaatcacgatcctgccgaactctgagtggttgatccggagatcccttaatagccttgagatacccgtgaatgccgagatgctctgcatgaataaaattgttctgtactccattcctgtcaagtatttccccccggtctctcttagcttaccaaacaccatgttggccgcgataatggggagaataacagtggcaattcctgttacaatcactttcgtacctgtcttcctaaccatcccaacatccattttaacaccttcgatgaaccaataaaagacaaaagcgaacccacctagcgtctcaggcacttttggcctagtatcatccgggaataaaatgtgctggatcgtccagtcattcggcaaaagattcgtttggctcaaagctgccccggccttcaacataattttccgatcaatcagtcaatgcaaacaacttttatacaaaagaacaaaagaggaagaaagggttcttacaatcatcatggaggtgatctttggcacagggaggcctatcttctttagggataaataaaaaaactgccataaacagagaactaggacgattacgctctcgagatggggaagactgtagtcccatatcttcatcccgcgtataggtaaatctagcttctcccacacgccaaaagagttcacaagaatcggtatttgttcgcagaacttggacccgtcttcactaaagccatatccatgatatgagaaatccccccagaaggttgcgttgtatgccccctcatatgcctcgttacgcgactccatttctcctagattctttttcttctcaagagaagaaaaagatcaagagaaagagatttacagtttccagaaaaaattacaaaatcttggtgttacattgtcttattagaagaaattaacactactaaaaatagttgataatctttgtctctctctattttttttttttatcttgttgttgttaactgtctgtttacgtacctggcgactaatttatatgtttgttttacctctctgcttatttaagaacctccatcaatttgtgtctatccaagttttgttagagatcccgacatatacggattttgcatgtaatcttacgttataaaaatcttgatgaagttattaaatcgtcatatattattagaaataaaaatcgaatcacttacagagcaataaaaatgtaaagcattttaagcccaaaaaaataaaaaatataataattaatgatgaaaagaaaagagaaatggaatgactggcagaaaagaacaaaaccaaagaggaaatttaaaaaggaaaaacacacacacaatcaatcaatgtcacatatagcaaattttgcacacaaatgaaaccaattcaagatgaggataaatcaaactaaagacgagttttgcataacactctctggaatccatccaacgagcttgatgtaacgttgatcattaccggcgtacacacagccttcaacgtacgtcttctcgaccggaaaatccacgtcttgtagctcactctagccgttatatacacttccatttcgatcgtcccttttgatttttcagcccttaagtccctggcattgaacttagacagtgccacattgtgggacacaagctgcgtctcaatcctagtctcgttcttaggacgttgcttgaaaggagagatatttttgtgagccacggactggttatgatgagccgtggagatacgcatggagtggtatcttacggagacatgtttctccgggttgtatgatttgatcacgtagctgaattttgcgttgatgtgatcgtcattgttgcctatagcaaactcttggaccgacgcggcttctaccgtgtagatgagtcgctttggcctgagtgtgaggtatgtgatcaatatggcgagacccacgaggagtcccaagaggacgagggcgacgatgatgcataggacggggttcatacgcctgcccggcaggggttgtgctcgaggttgcgattggggttgcagttgcggttgcgttcgccgagccggttggtgggctgggtttggaggcaccattgtcagagaaggttttgatggacttcagttaattgcttggaaaggatagagagcaaagattgatttgattgctttgatatggttcgacgatatatataaagggactaacacggacaattagattctttgcctttgtataaggattagtcacaaaactactgatttaaaattcttaattctttagcattgcttgtgaatgaatcaagaaatcttggaagctggaagattcctactttttttttttttttttttggttttaattctttgcttctttttgtaacgttgtacaacactacaacttgggtgttgataacatttatgttttctctatccgattcgtctgtaaattttgtcgtacgcatatttatatctaacatcaacaactgcatttacatgtaaatattacattttcattaacacacagcaaaataaagaaaaggagacttcgtgtggtgtatgtatggtttcaatttagttaataacaaaaatcaacattctaattcacatgaaggtactacagtttcatttatagatgaaggaacaaagaattgtgtgagattgtaggcgtcactcatcagtacattcagctaaaagcctaaaagtttttcttgaatagagagataaatttccatttccattttacttttaagtctttaactaacattgttatgattagttatttaattatgctcctttgctttgtcggaagcctttattcctttcccgaaatgtgcaaaggaaaaaaagatagtcagaaaaaatgttgtgaacttaagggaaaaaaacaaataacattttttctgcagaaatatgttcccctgctctatttttttggccaatcaaagacaattttgtaagttacaactttcttctgcagaaataaattcacatccgtataaaaaaaaagaaggaaaattatgacttattaactctgttttcggttttagaacagtcagaacgacagcgtatcaaaaccagttcacttctgttaacagttgggcccagacccagtttaagaccgaaagagggacttaatatatttgggcccaggcccacttttatatctgtttcgttaacacttaacagagccgttaagaagcggagaaagcagaacagagcaaagtgggagcttctttctctttcttttctcaattgtgttcatgtaacaagaaacgtgatcaagcagataaaattataaccaaaacaaagaactttggtgttcttctgtgctgtgttttcaccttccgtcaagagtgcgtttgatcgagtttaaagctttttcttatgcagagcaaatatatgtgttgctcagctcgtaaaaaaaaaacattagtgtaaacgaggataatgttccgttcaatcgaaataacaacaagacctactacaaatagattatagaaagatcaacaataacaaaacctaaaaatagagagaaacattgccaaaggttccgaagttgcccggtcaaagagaaagacacatgatgttcgactattatccattgtggttgccgttgaccacacttacgttttcaagtcggtcaaaatcttgatctcttttctcttccaaacatgttcatcgactcttcttattatagcctatagtaggtgtcggtgatcccttagactggttcaggacaagatcagaagagtagtcataattattagaagaatagaggtaaacaaaataatgataataatcatcattaaacgactaacccgaagatcttcttcgtgagtttttggctcgactttgctcttattattagccatgctaccggcaccgggtgagagatggcgatcataattcattagttgtgaaaggtacaagaagatagttttatagaaaatgcatgtgacactagtgaaactttaaaaagttattgcaaagtgatgatacatgcttttttgtataataaagtatgcctttgtaattagtataagttgatacagttgaagtgggatcaatttttatttttcaccttttttgggggggggggggggatatatttctacatatcgaataacttatggtatattccttttggtggtgctgcttatgcatatattgttgttatgcattctgagttggttgtgtgtttttatggtacaaaaacacatatatactcagacacgttctcatgtatgtgtatcaatatatgtagaggttggggtggagaaggtcaaggagaaaggatctttcaagggatatgcggcgaccaacttcaatgctcagcatgtagtgagtactttttacttttaccttttccatagttcccattatcttttcccttattctgcatcacttgtcaatggctctgtttctacaaacacacacaagatcaaattactttagtggatgtcactaattttaacgacacaacaaatgtaagagaacaaaatatgaaagctaaataaaccacgattcaaatgatcaagtccatctccattttcaacaacataacatatattctacagaacatgtaacataaaacgaaatacaactatagaaaccatactctctaagttaaaccttacactaacagtcaagttgaaaaaaacattacacgaaaaaagatacaacgattagggaatcaaaaccaactaacgtttcctactatcataaccaacgaagttactaacagctttagagccttcagcgacagcgtggcggctaagttcaccaggcagaaccaacctaaccgctgcttcgatctccctcgaagacaacgtcctccgctttgtataatcgcttaacctcgctgcctcctgcgctatcctctcgaacatatctcccatgaacatgttcaccaccgtcatcgccttcgacgttatacctaaatccggatgcacttgcttcatcaccttatacacatatctcctatactcatctcccgccaaatcgtctctcttcttctttttcttcttcttcttattctcctgcttcttctcaaccttatctgttttcttcaaagtgccttcactcttggaagcgggagtttccggtggctgaggtgaaggttcatctcgaacctccaccggagtctccggcggctgaggtgaactttcatctcgatcatccaccggaatcttaacggtggtaacgttttctccgacgggaagtgaccgttcgtctggaacctccactggaatctcaacggtagtaacgttttctccgacgggaatggagaaagtgagatcttgcgtctcttgatcgttcgctgtctcggtgatcacacacggatctccttcttccgtgacggttactttgattgtctcttccactactttcttcttcttcgtcacggaaacaacctttggttttctcggcgccatattcttcgttagaaataaccgaaaatgttatgtggttaagatttaaaaagggcgttttgggatgggtcgtaacagtacttctgcgattgacatgtggtgccacgtgtcgttcgaataccttagcattggtgattaactgtctactacgcggtggttataaaaactaaaaagtaagaaaaacttatccggtgattcgtatctgttttaaataactagcccaaagcccggtgggcatataaatgggcttaaatgactagatctaaacgggtctcaaaagcccaatacaacatccttaaccgtacttaattttacacaatataatttttgttttccattatatatttttaatgaaattatatgtgaccaaacgacaccacgatcaccctttcaccagcaccagtttagaaaagaatttcgttcccataaacaatgtaattaggtttcattccatttcattacaaatttgaaacatgtttggactggccgctaattatctgatcgctaaaaaactttttttttctagttcgtattgtatttttctttctatttcatggttttgtggtagcagaaaaaaaaaaggatctcagatataaagaacgttgggacttaggagagagtaattagggacgagtaattattatcataacacagatatcattatgaatctaatctttaatttataaattatgtcatgttcgatgtctgaatcattcaatgccaatttttttactaacaaaaaaaaatcactaccaaaccaaagtaattatgtttttaaccctaaacacctaaagatagatggttatcataattcacctactagtctcccattcatatctctaagttcttaaccctgctaaatcttagaaacaaaatcatatcccaccatttttacaaaaaaaaagaagaagatcgatatatacaaaatcatgtacagaaccagagttaaaatcccataagaaaatacgaattcggactaaagatttattaaaataggtatataaaagtgatcgaaaattatgtgtaaatcaagtaaagaaagaagagtatatctacagaatcaaatttgattcaggcactattactccttcgtttcttacggacatggtttggttcgtgaacaaataaagtctctacctcttggctcccgacgtcggtggcttcaaagaaccgaagatctttggacaatcttgtcttctttgtgagagaaatctcacgcggtcgctttcttggcggcggaggacacgtctccacctccggaatcttgtgatcacttgaagttggagtacacagagattctaacaactcttctttcttcgagctatcttgatgatcttcttcttcttggcttctgggtttctgctctactgtcttttcttcttctagggtctcgagaagcttagacatggtcacatggatgtgaaagtttcgtgggcttttaccttccaaaggaaagaatattaatttgaaagtgaaattggaatatagaaagtgatatcatataggtagagagagagagagagagaaaaaagaaggggattaaagagtttgtattttgcgaaaatgtacatgtatgaattaatcttgaatattcggatattcaatgctttttgtgcaacttaattgtcttgggaattagaagtgaaacttttcaactgcccctatgtccaaacctatagaaatactatgccggagtcaattagttagttagattcatttgtgtttactgtttaacgtaattaatttgaatataagtttggttaattacccttgttacctattaaaacttgaatgttaacggagaagcttatccaaattaatgtctcatgtgtcacatcattcttcgattgtatgtctaaatacgtacaaatggttggcataggataccatttcatcaacttaaaaataatattttcatttcataattgatgtccactttccgactcgcccctttggaattattcgctccttcgcagcctactatataaaccaatcagataccgccatgtcatcctccactgatttgtgttcgagaattgctcatgttactgtagtcttttctccatgaacaaaattacttacaacttacaaggctaaatgatgtttgataggtttaacattttaattactctgtgctctatataagtccacaatttgaataatcaaactgaaacctgtattttaagtttgtccccccattgaagtaagtatatggttatgttggcatttagtgtttgcatcgaatggtcgtttatgtcaatgaaagacgtcccgtcgctgccattgaacgtacgtaataagcattaaatcttaacagtgtgatgcaaaatttctcttatagctcatcatcctcttttttttttcttaagaatttgttgcatgtgaagatatttggtcactagagtatcgtttctatagatgttcaagacagtagtagttggaaggccgtattgaaaacagtctgagatggtagaaagaaaatcttattttacattgatctaatatatgaagactcttctgatgatgcatatatatatttccaacttcgtttgcgctttattcctacggattgtcaaacttttaagagaaatatgttgtccttttaggttgttattggtcatcagggagatgtaggggccatgactgtacattctttttggcctatcaaaactcgattctcttttttaactcattggattcgtgctgatcatgctctttgagaatgtattcttatagtcaaattcaaaactgttgtagttaacatttgttaaacaattaatggctttaaagtcatacttttgatacctactaaaataaaacgttattaattatgttgcaaatggttagaaggtgtaagatatacaatgcaatttggttaggattccagaaaaggctaaagaacagtgacactactagcaaaagtgaaaaaaaaaacatggccatatttatgtatacaaagtctacgcttaagaggaaaatgaaggcaacagtaaaatagtgaagaaaatgacaatcttataactaagaagatagagacatataaccccatttagtaaagaggaaagttgtaatgagaatggaaaaaataaaacctagagactcagttaatgggttgaaatttcaggctaaaatatgtttcgtcttcttgtacgactacatataacacacataacaaaactaaaactcgtaaggtgtatgtgtgaaactagttgtgtatatacataagaacaaatggtgaaaaccagtagttagggatagatctctgtccaaacatattcttgatcgatcttagatcaatcatgcactcatagagatctacttcgtttgtttgtttattagactcattatctctatgagtgattgagtattatatgaatccgtttctaaacaaagatgccgaaggagttgatgttggggtctgatcgcgccagaaaacttaggtttttctctctgtgtttgaaccaaaagtcgtggtaactctgtctcaaagaatctaataaatctctaattagaccgtttgtaagtaaaagaaaaaaagcttcaagttcaatgaaaaataaagataatgattgggacttttaggtttgtttgtgcttctttaattattttctaacaaccttttatagaaaaaaaactctagactagtgaaaattcggagagtttcatgttgctgcgactacaccacgtctctatctaaacagaaaagggtcaggtaaaggagattaatgtaacaatcgcacacgtggcacctttttctttgtcgccttccaaatcattaattaaatttccatttatttattttctctgctgtcatcaccaataattttaatttaatttttaccaaaaccagaatcaaaattttgaacggagaagaagattgaattcagaaaggaagaggcagatctgttattctctgttgaagtctgattgatctgatcggagctattgcggaggaggggtttactgcaattgcacggtggtaatggctgcggttccgcctgaaaacggcgtggacggagatgacgaaagagaggaagaagaagaggacgaggaggaggaagaagaagaagaagaagaagagaacggagatgaggctgaggaggagccacgtctcaaatatcagaggatgggtggcaacgttcctgcgttgctatctaacgatgctgcttcctgcatcgctgttgctgcgaggatgatcgcgcttggtacgcacgacggtaccgtgcgtatcctcgatttattggggaatcaggcaagttttccattgatttttggaatttcgggtctatttcaacattgtacaagttttagtgtcaatttcaacattttaggagttttagtgttttggtgatactcctctaatgatgatgacctgaggtcgatagatgttaggctttattggttggtggtggaacagtttagttagtttgctttagctatagttttgtcaaagttcaattttttttgttttgtttatgatgctttgttcaggttaaagaatttcgtgcccacactgctccggttaatgacatcaactttgacactgagggagagtatatcggaagctgttcagacgatgggtctgttgttataaacagccttttcactgatgatgagaagatgaaatttgattatcatcgccccatgaaggccatttccttggatccagattatacgaaaaagcaatctaagagatttgtagctggtggcttggctggtcacttgtatatgaactccaagaagtggttcggtaataaagatcaggtttgtgagaatgtgggtagattacgttttggaatagaatctactcaccgtgaatttgataagaggctagttttgtaggtgctgcattctggggaaggtccaattcattctgtgaagtggagaggaagtctcatcgcctgggctaatgatgttggtgttaaagtttatgatacagccaaagatcagcgtgttacatttattgaaaaaccgcgaggaagccccaggcctgaggctttactaccccacttggtttggcaggttcgtataaataactcattttgtcagattacttctttgattgtgaattcatatgtaacagcgttgatttgaagggttattttttattgtttccaggatgacactctccttgtgattggttggggaacatcagttaaaattgcgtcgattaaatcagaccagcaacaaactggaacttttaggcagattcagatgtctagtctaacccaagtagatattgtggcatctttccaaaccagctattacatttcagggattgctccctttggtgattctctggttattcttgcttatatacccattgaaggagatggtgagaaggaatttagcagcaccactactctatcgcgtcaggtactctctttgtggtggttttggtgttgggtatgagatatagggacataaattttggcatgtcttttgggaagtggttgagtctgattttaagtaatccagggaaatgcccagaggcctgaaatacgcattgtatcatggaacaatgatgaactcacaatggatgctcttcctgtacacggctttgagcattacaaggcgaaagactattcccttgctcatgctcctttcccaggtcagagatttgttggaaagtagtttgttttctaggggaaggaaagcatatgtttgaatacttactcggaaaattgatgtgagtgtaggtagtagctacgctgggggacagtgggcagctggtgatgaaccactgtactatattgtttcgccaaaggatgttgtgattgccaaacccaggtagatttttgtggtcactatttcttgtccatgttattctattgctttgtaaatgaaccttgcggtcgctaacttattctgttttttacttgttagggatgctgaagatcacataaactggcttttgcaacatggattccacgagaaagccctagcagctgttgaggctagtgaaggacgaaccgaactaattgataaggtactttttcgaaaataggcgttgaaccttttatttgtcttcgcattatggttcattctttcgctctttactgttctctactaaaattggatgaatgcataggaaagtgtttttttccgtcatattttttatttttctatatgcaatatttcatgatctcgacattcaaaaaacacactttagtttggaattacccttttcaaaaaagaaaaaaaagaattacccttttcgttataccaaaggattctctgttcagatgtttcataagcctggaaaatcttgttcgagaaaccaactgttaagttctcttttctttattgtataaacgattttcaattctaacacaaacgagttatctaggtgggagctgggtatcttgatcatttgattgtggaaagaaaatatgctgaagcggcatctttatgccccaaattgttacgaggatctgcttcagcctgggagaggtttgaacaaatttgtatctcttctttgcaaagtgtttgttttggttgttttgtactttatctaacatcatgtgtctcttttcaggtgggttttccattttgctcaactacgccagctgcctgttcttgtcccatatatgcctacggataacccaaggcttaaggatactgtgtatgaggtttgtatatatcaacaactttctacagataggcttaaatgaaaatattttatttcatagaaattttaaaatagataagtaaaaaaaaaaacttttcttgtaaacgcaaacatttgtttgaaacagtggaggcataagatttatcttgaagtttatttctttacgatgcaggttgctctagttgcactagcaaccaatccctcataccacaaggagcttttgtcagcggttaaatcttggccacgttctgtatattctgctttgactgttatctcagcaatagagcctcaactgaacacatcttcaatgacagatgccctcaaagaggtcagcattgtctgtcatgttaagctgaggtttattaacatttacggattcagagttgttttattatttcatgtatcaggcgctggcagagctgtatgtaattgatggacagtatcagaaggccttctccctatatgctgatgtacgtatgtactaagaaagtatttgtaaaattatcttcccagatcgtattcaggcctccttccgttgatagtcacctaaaatttccttttccttttttatctccagcttctcaaaccagaagtgtttgacttcattgagaaatacagcttgcatgaggcgattcgcggaaaggtataccagattttttttttcacagtttgagacttctaacattatgtaggcttttcctggacgatccacaatttaatcatcatcattaatgttagcatcttaggggttcatgaattttttcttagatataggtacaacttctgtgtaatacataattcaaacaaatctggagatccacagctgattccaatttaaagttatgggatggtcttgtgagtagtattatcttgggatttaggcatatctactgctattttgttatggcctcagaattctgcaatacagaccggtgaactttgttttccttatctaattgtgtaggtggtccagttaatgttgcttgattgcaagcgtgccactgtcttatttatccaaaatagggatttgattcctccatctgaagttgttccacaacttctgaaggctggcaaaaatccacaagttctgaaagctggcaaaaaatgtgattcaagatattacttgtacttatatctgcatgcattatttgaagttagtcatgataccgggaaggattttcatgatatgcaggtatgtgtagttaacttgatatatggaatgaatttttccattctctttctcttttgcttaaatattttcttaaaatgattacatattgtaggtagaactctatgcagaatacgatactaagatgctgcttccgttcctacgtagcagtcaacattacaagttagaaaaggtacttaacattacaagcaacccagcttactgaaatgaactatctctgggttatgtctttgtgaacttgatctattgcaatatctcaggcatatgaactttgtgtcaagaaagattttttaagagagcaagtgtttgtcctgggaaggatgggaaatgcaaaacaagctcttgcagtcatcataaataaactgggagatatagaagaggtgattgttactgtgtgttcagtaactgctcttttttccgcaaccccttgtacactctaattgatgtctttctgactggtaattaataaaacaagctatggtggttgactttgattgatattctgcaggctgtggaatttgtgtccatgcagcacgatgatgatctatgggaagagctgattaaacaatgtctaaacaagcctgagatggtaaaagctgtatttgtgatgcaaatcacaacacaaaccagtcttgattctgggaaacttgtgtccatgtagtactgtttccttaatcttctgttcttttccaccaattttaggtgggcttgctgttggagcacacagttggcaacctcgaccctctttacattgtaaatatggtcccaaatggcttggaaatacctcggttagttttaactattacccctcattgctgttactctattcatgagttggttcaatcacgtgttcttacttaaataaacatcgaccctcatctatgtgatgccaaacctgttggtttacccaaagctaagttcgcacacagagcattggcagaatcatatgcttcctgaacacttttcatcaaaataatgttctcctcattgtttcttctgctttcagattaagggatcgattggtcaaaatcgtaacagattacagaactgagacatctcttagacacggttgcaatgacattctcaaggtacaaatttaatgtcaccaatgtccctctaatcatatatatctggaacagactccagggaatttgacgtgtgggggttgttgtacagacggatattgttaatcttctggtcaaatgcttcaacgaggctaggcgtggggtctgcctgagccatgaagacgacgattcccgtgcgaagagagaagacaataatcgctcatcattctcgcagagaatggtagtagataaatctttgagcataaagatgacagaagtgaagtcgaagacacggggggacacacggtgttgtatgtgcttcgacccggtctcgataagaggggacactgtagtggtcttcttctgctgccatgcttaccacgagacgtgcctcatggatgcagccttcagtaacaacaatcacaagacaaccaaaggttcttcggggtatgaatatagctacgataacggtgtggatgaggaggaagaggatgaggaagaagatgaggatggtgatggagacagacctgggcggtcgcgtttacggtgcatattatgtactactgccgccgctgcgtccgctcggtagcgaccccttttgtgcatgtgtttgtgaagtatttttggtgtgcttcgaacatatatatatttttttttaaagaagaaaatgttcattgtttgttctgtagttctctaaaatatagcaaaaagagaaaggcgagagatggagaaaacatgtgtgccagaatttgtgcctttgtattatttcccgatgagtggccaagtgttacgattgaattgactttgagttttttacaaaggccaagtttgtttctcttccttctctttacgcttagtttctaagcccatacctgaaacatttacatttttttttttggctcctctgtcctcgatctacaaaaaaatcgtcatttccgataattccattttcagtgtactgcttcttgttgtttgtcgtttagcagagagtaaaatatatgtgacagctctcttgttctttgatcttatgatcttatttttgttttggtcggcgatcttgtcatcttttttttttttttttaaatacatgatagctaattcaccgtttcctatgagtacgttttttttctgaaatatagattgggaaacaaattttgtaaataattttctataagtgtatgagcacctatgctctgtttttcttcttgagctgtaatgctctgtttttgtagtactattttattctatgtttctaataaaaatgtttagacggcaaaaaaaaaagacagaccttaggcatttctaattaaggtatatattcacataacacagcaacacgagcaaaagccaaactaactcgtttattacaaccaggcagatatagaagtgaagtgtggaatccgccaaagatatgtaacatataaagaaagccccaatgttatagtttgcacaaaccattccctttttagtttcggacaaatacaagatataaagcttcaaaacaaaggaattcaaaaacattaacagtaatactatataacaaggaaaacgtaaactagaatcaaccaccatgatatatcatttgtttagaatggcctaaaataagggaagagaaggtttctgttgggagaattttttttttaaaaagaaagaatggaatcgtagccaccacatgatttgaggtgtttgtaaagagagacgacctctaagatgcgactggttttgaagtggccttcttaatggcttccgcataagtcgtgtgctggtatgttaaggtcgattcaagcaagtcccaaagcgacgtcttcgggttccatcctaattattgtccacaccagagtatttattagaaaaacattgtgactgttagaaaagactaatcagacaagaaaagaggaagttaccaagttgacggttgatgatggtcatgtctgggattctcttgtcgctgtcatcataaccttctccataaaactctttggagctcacgtcgatcgttggactctcgatagctgtctctccactcactttggcgtagacctgtccattttttgttttgcaacatttgagcgtgtgctataatagttttatcgaaaatcactcagattcttatctatgaccaatttttctcacctcagtcatcatttcagcaagttgtctcactgtcacttcattgtttgggttgcctacattgaagatatgcccattggctctctctggattttcctggtaaagaattccgcaagcaattcagatgcaacttctttaataatataaaaacaaacgatatatcaccagggataagcaatgaatgaaactcacgatcatcaaaaggacagcttcgatagcatctttgatgtagatgaaggttctctgtgattctccaccatccacaagcttgagaggctcccgtcgcagaagattctgaaaatacccaccaaaaagttaaacaaaaaagttaagctgcagccatgagaagaactcaggtcattggactaagcctgtatacttacgttactaaagcacgctagaacccgtgggacaccctcgctaggaccatcaatgccagggatgaaatccatcctaggtccaatccagttgaatggtcttacaatggtgaactcgagtccattctcagcaccctcagctgcaaccagaaaaaagtgacgtgagaaacttttttgtgtctagaaacaaaaaatttctttcgtgtaagaaaactacataccgtaaacaagtctctcaataagttgctttgcacaagcatatgaccacctctgcttctcaattgaaccaaagatgcaaggggatatatcttctttgagtacataaaattcaggatcctgtagtaaacaagacgagcatcattggtgagtagtgaaataataacaaaacacagagacaaaagtagtaataagaaccacgtgacacgaacgaatatctacttgacataagaaagtaaggcaaaaagtaaaacaaaagactctcatgcagtagttagggctcaaagccatactcaggtaattgcaggaaaacaaactacattttctcgatattacaaacactattaaagtggatagtgataggcttattataacaagtttacgttactctttagatcagtaaacaagacttcatataacaacaataactgcattagtatataaatttccgtatcaatcttaagtgagtgtgccaatgtacataattaacatagtttcctgatcctcttgataacgacaatcagcaaaaagtgatgcataagacaaatgaaatgatcagagtgaaaaagggagaaaaatactgacctgacgcagaggatgatcctttggaagaaagcttcctatagtttttccatacacttcacaagtggaaaagtgaatcagacgcttgttgttctctgagcagtatttaacctacataccaaaaccaatgaccactcaatgtcacaactaaaatccgtatcacataaaaatattcctcaaacttacaaaattgctccactaaaccaaacaaactgcaaaagcataaaatacataccactgggagagcatcaatgaaattgctgtagatagtgtcaagaggacgcgtattgtaatctgctggagtacagatcgcagctagatttatcgtctgcaaaatccaaaacaacaacaacagattaattaaacaagacatccacaattcgaaattcgatttcacataacgaatcagatctgagtcttcacattcaacattttcacattaacgatttactaagaagaaacgaagaacaaataccagatctgccatcttgatcagtccttcaagtctagaatcatgcttaatgttgatacgatgaaactggatccgaccagcccattgaacggtatcaggctcaagcaagtgcttgatcttatcattgtaaacatcaagcgcaagaaccttgtgaggagtctccgtcataagcttctcacagagatgagagccaatgaaacctccggcaccgatcatgcatatcgtcatcggcttaatcggtttaccgtccagatccaatctatcggctccgttcgccatattttgattgtgtcggtgaacacgcgtgatctctctcacgcttctacagagataacaatgggtggaagagagatttgtgagaatgggagaaaagaaagaaagaaatgagagatggatatttaaaggcgtataataatgttccctacactctcacagccttgcacattactcccaccacgtgaaattaatgttttcgttacgtgtcatattctctcttaagtcaattattatgaatctgctgattgttcacgtgaaatctattttaaaactagtagattacaactacagtatatagtttcaatttttttttgggtatgtttgttgctttacaccgacatgtaaaattgtgctaattcgtcggtggccttagtggtagataggaggttgattaaacagagaaacgagagaagtggtgggtgggtaagtaagaattaattagtgtgattaaattacaataatataagcttacaaagtccaaccataattggtggagtgaatgctaaaagctactacaagaaacgagcaaaaaggtggacaaggaagactactagttgtaacaagtaataacttctattaaaactctccgaaccgctttctctccattgtcctgtgtttataacgtctttgcttcgtcctcctcttgatgctgaaacattcacctccagagaacctggaatggaatttcattatctgcatttgtattccaatttcgttattgctctgtggtaaaatagataacacactcacagtcgtattctgcccatccaatacgttggcgaactagatcgtagaccaccactttgtctttaagaaccaaatctgcaaagcaatcactcattgagaaaaatagctgcactgttacagtttcacttgattgagttaacaaacaagagtagttaccaccaagaattgttatacgacgatgagacattctctggaaaccaatgcaccatattgaacttcctgactgaaatagcaaaagaaaaattatcatatcaaatttttcaaactgtaaaccttaagagaaatccacacccaaaacaatctgttgagacatccttataaacccaacgtcccagccctcactaacggctcgcttacaaacccctaacacctctaatctgctagatacagtcttaggctagatatagtagacgtatagctaagagttgagcagctaaactttttcaaagcttatcattgacacactaaaagacaatttatgaagtagtgtaagtgtatgaatatgcttacactagaaaaaatctgaagatatgcacggggtcctaagaccattgatgcaccaccagcaaagctcaaactaacttggggaaagacatcaacgtcactgcaacatggagatctttttagcacttaagcataggagataatagcttcttatatatacatacacatgagaagaactttacccagctgtgatttcaaagcattggtaactctcataggtaatgggacgcccgtactgcgaaacagcatttgcaacctgcaggttgaacgttttataaatcttcttttttgtaaggtctaataacatatatcgtctacatcgaattgtaatttcattccaaaaatgtaacatttgaggacagatactttcaacaatggcaaaaactactgaatatggtatacacggtttggtgactgaaaaagctgaaggtgaactgaggaagaaaaaaacactcacagcttggatgaatggactataagcttcgtcgggaagataagcaagagtcgttcccgtatcaattatcgttccatcaccagtggctattgtgaaaacagatggatcaatcggtaatatctgaccgttcacagcaatgctctgcaggttcacattataatgtggcctgaaatatttttttgcagcatattatctgaatcaagacgtgggtttatatattttgattttcctaacccaagatatacgaactgcatattatttccatagagtcagctacaaaatgtctatttctggatcatatgattcctacaagcagaatgatatagcagatattgtaacaactctcgcatttatatctgtgtaaatgactttcataatcatcagttaaaccctggatctacctccttgtcttatacaaaaataaatctaggaatcctaccctaacattgaagtctgattcatcatgatgttaagtaccccaaaatctacctgtgcttctctttacgtaatatgataagagtttaaatgtataatagaaagattgagaactcactgtgatggaacaagaggagtatagacggtatctggcctcttgatttgacctagaaccattatacctccaccgcttttatctcccttcagacaatgcgagaatactcgtggcgcgagtccttgcacagcaagctgagaaattactgataaactcccttgtcctaacccaaagatgccatctactgctcttctaggcctctgtaaatctccagattgtaaattgctacacctgttagcaatattgaagacaagcatcacatattttgaaagttgaaacagtacagaaaagatgatttggaagttagatcatattgtacttcctggtagatgttaattacttaaacataaaactaatgagtgtatttgataggcagaaatattgtttctcatttggccaacattttctcccccccgaagatgcagtcattagttaaatttagagaaggcaatgcaccatactaaagaaatcatcattatcgaaaggggattccaaatgcaagataaaacctatgggatatgtacatatatataaaccccacgtaaatacacaattctttgctgttagcttacccaaaaacaaagggagcagaggaatttatagccaaggtactggtaataacagtatcaaaggacatgaaatctgagatgtagtaaccagaagtgccacttccatcaccgtacttaaacgaataggaacagagattgttgggagaacagcctgattctgtctggaaatttgagtaacatctcctgtctgaacatgaaactaatgaagctgaggatgacactccaggatcaaagaaacttagttgaatctgaaaatccaaaaaaaaaaaacacaaaatacagggaaaacaagtgatcatttagacaaatcataaagctaaaaccaagaccatgaggaaaatgttttaaaagctaatatgctatagaggaaagttagcaagaaacatacttggagttcgctagtcttggggcagccattgcaggaagtgcagctaacccacaaaacatcacttccagtgtcaatttgaacattaaattctcttggtggtgtcccaagtttaacctttgtgtagtaaagcctgtaaataacagcaagattctataaataggaatgggaacaagagtcaaatatctctaaattcgtaattgaacacatgatgagacaacagtctagaaggttcatttatttataatccaaaatgttccctgatgaaaaactgcgtcgaatattgaagacaaaatcgaatcgcattactcagcctaaccagaaacaaattggttaacgacttaattcaattcaattttgttgggcgaaaaagttttcaaatccaagtccagagacaattccatggttcgaaaaaagtgaatattctattttgtactttggaaaccaaaaaatagaaagaaaaattcgaaaatcggaatcgaaaaaatgcataaggaaatggataacaacagtagtagtacccgacgagaaacggatcggaggctccatcaaccgggaaattaacaacaccgccgacaggagactgcaataaccttccatggcgagctgaatcaaaagccctgagctcagtcagaccaagttcatggttcggcggaatcaatctctccagcttgagaaccgcgtcggagccgcaggccaaggttgtcgcagcaagtaaaagcacggcggcgatgataataactccagcgggagaatccaccgccatttctggagttcgaactttctcttcctggggaaagagagagaaagccgccaattgaaacgttctgataatatattctgatgacagtactaaagttttgcacattttcgtgattagtttaattaaatgtggaattaagatttgcataaactatccttttttgtgttagtcattatggcgtgtttaaatttggcattttggtaattatgattttcacaagttcatttttatttatttaaatgttcggtgttgagtactagatagactgatgtaatgtgtctgaaagtactgatgtaattcatatgacgtgtccgaaagtactgatgtgattcattgatttccgttgaccaatttacccaaaattcaccagaactcagaagtctacgacaccaacggctttatttggaacctaaactaaacggacatccacgaggtagatatttggccttgttttgtttccacttttaactcaaattgtatcagaaaaagatttaggtcatatcattctcggatgagtacaactacacctatccaaacaagtgaagagtgagtatgacccctttccgttgaacaccaaatacaaaattggacgaaaaggattctctatcgcttaagtgcagataatccaatcaaactgcaaaacggaaagataagagatactttattattgtcttcgacaacatcctccgtaagagccaaggaggagcacttgtgttttgagacggtctccagttcagggagcgatctggatatgtaatggaaccaaaaagacactcagatgttatattttcatacgctaaactatatcaagaaggtgcttcaaagaaacttttgtaactcttagctatgaaacattcaaggcaaagttgaaatattttctacacagaacgtttttctggccatgctgtagaatttttctgataattgcaggcctaagaagaattgggagtcttgtgatttaaatggtttaagagagagagaagtttggttacctctcattgatcttccaagagaagtgaggtgcaagagagaagttgagatacttcctctggagttgctgttccaaaaccttgccatcttattctcccggatttgtcaagtaagagaatatacctgaaacgtgaacacgtatgtgcaatagagagatcagaaaggttaagggaatctcttatgctctcttaacctgatgaagagtagacttttctgtacccggtgagaaggttcagaactttaatttctttacggaagtagtaatggtctccaaatgcgtaacccacctgcctctggaggacactattctcgttattgtttggtttttgcaagacccggagaagtagttttcttatgggggccaagcccagcagccatttgtctataaatgaaacctataattacaagaaaataagtttttgaataaaatgggagaaaaacagctgctaaaaaagcactcgtgcaggttctaaaatctgatataagtgcgaatagcacaaacgattcagaatcagtacctcaaacaactgaagatctttcctgttgccaaatgattcaagaaatggtttgctccacgagctgatcatttcctgtcagataaagcaaccacatcacatcaacaattatacaaactagatatataacttatcaacaaaatgattccccactaaagagttaagaccactgtgtcaggcaaccattgtttagtaaccttaagaagcaacacttccggtaatctttaataaactcaaacattctcgaaatcagagtatagcaaagacgaggtagaattttctgtacctgagagcttgctcggaaagacagacacaccaatgatactttaggaacaaccaaactctctgtgtcaacctcattgctgttgggagcaataggcaactttaggctttttccattagagaaagtcactgctaataccggaaatttgatggctgaagcggcaggaattatagtcttatttgcagctgcgatctacaaaaacatcaattgacagttaagaaacttcataaagcaaatacaagatccctacaggctacggtatctaaatcatgcataactaagtacaagcgaacccagatgatataagccatagctaatgaaaacaatccaccctttaagattggcgttgcaaagaagacaaaatctgggatctgtgatagtggatcctaccaataagagagagagagtggaagaagttgcatgattataccttaccaccatgttccttgaattctttcatatcagcaaagtaaccccgattcatctcatcattactgccctaaatcacatcaaattccactaatcaacttctcattgagacgatctatgtcgaaacagatagcaaatcaatgctgaatctgaataggagcaaaacccaaaaagaattgaatctagataaaggcaagcttacagtctagcacgctcatcttcaattgctttcttattcccgaactgtgcaaagccacaacaacaacgacagatctataaacaacgtttctccgataagcgaaattgataatttctcagaatttcctaccttataaaaatcgaggaaagaacgggtggttgatcgaagagctggcatttgagaagggagagagtcatgattctcgtatcgagtgagggagaagagtccttgatgatgcttgttgagagcagagactgatctatgcttcaggattcgattcaacgtcgtcgccattttagtagagcttaaaccctatttgtttggttatgtctctctgccggcgaaccaaacacgcttgaaattgaaaacgagtctaaaatcctgaaccagatttttgtgtgggtaaccaatcaaaccgattttttaaatccggtttaattatagcccccaacttttgggcttccgtttctaggaattgttttgcgttgggtttcaaatgctcatattccaggcctgtactgtgatttatcaattttctagatatttatttcatctgtatttatttcattcaaaattaattaatttaaattatgtaaaaatattgttatcaaaatttgaatattattttccaaatttataatcataaacatttttctaagaaaaaaaaaggcttattcttaaatatagaaataacaatctcactttgctttgcatgttcttttatacatccgcaaacaacttatacgtattggcatctattataatctgtctaaccgccgctaccatagcaatcacccctaaacacgaaaaaaccacggcgatcacagtgttgatccaaaaaatgaaactttttttagacggcttgaaagtaaagttgaagaaaactacaggaagaacgaagtctagaggtataaaaccgaaagcgcctaacaaggagtttacatctccaaaaaatggaagcattgccgcaacgattgtagccatcacgacgaagagggaacgcacaactagtcgagggatgacattgcggatagagaattctttctttgttggatcgctgatcacactttccaaaatatcgtttataggttgtaggtatacctgcataactcaaaattagtaacaatgtatatatgtgacgaaaataaaataaaataataacaatgtatatatgtgaaagaaaaacgttaaaaaaaaattgtatttaccacagcaacggccgaaagttgaaggacagtgaagagattgacgagaaaaataaaccaagtagggacaaagtaatggtttgtctcggcatttaagaaattggtgaagataagtccattggcttttttaccgaatgcccaatatcctgtgatggctactgtgaaaaatgtcattattactacaaggtaacacatacacaaccctttcatcatttttcctttcactggtgccgatattgttgcctgcgttgcaagaagatagtattcatatatcaaatactctatatatataactgagtcgatcatgtgactgcccttttgtttttgatgaataaatattaaagtggtgttctaaacaaagaatggaaacaaaatgaaacctgaatttcaggtataatgccattgccgtatgtagtagcaataatagccatagcattaaagattccaaacactctagtttctggatcaccaactatagtatagtccttctctggtgcatttggttcttttcctgatatttaacagaaaactcaccttttaaatgtaacaatataaaaggtttaagaattaagagtaaagtggtttagtaaagaagagtaccaatgtagatggatgcagcagcggcagaagcactgtagaggaggcagaggaggagagacagtgagttgatgtatcgtagagagtgaaaggatgggaattgtgccaaaaccaaaagtaagcatccaaaaataatcacaaactcaaagagtttcatttccccatttggctgcactaccaagtacattgcctttaggcattgccctcccaagagcgcattggcaataaccacaccatagcacaccgccatttgtattggtccaacgtagtaccttccccatttcggaccttatcaaacacaccccaataattgttaagaggaaaaccaaactgatcttaactaatcaaacattcggaacctgtattatactttaccttatcctaattaaagttgtatacagtcccgaaaaagtgggctaaatcgaattcctataaatccttcagattagcggtgtactctaatgaaaactaaaatccaaatcgatgattcgatgcataatggatttagtttcatattagctactaaaacagaattatccagtaagataaaaaatttcaatcaattttttctcatcattttgtagtttttgcatagataaatacgttaaattttgtcttaaaagttttgttgacatgtggatttccttggtagtcgacagtcaaagcgtaactatcctaatttggatcgaatcctatgtaggatctgaaatttagaatattctacttttgaaagcagatcgaacctatccaactttacttatataagattaaattttggtcggcaccaacgttttatgaatactcttctgacacgcacatatttttaaaaattgaaattagttttgaaagacaaatttctgcatcaaaaatgaaacaagacacggaaagagacagctatctaacgcatgaaaaagttgaaacttaacagtggtatgagtggaaatgtggaatggtcaacacttcgatccggatcccaacaaaattgaaccgaagcaagccatatcaaaaaattcactataatatgaattccatatgattagttttttttcttcttataattcgaaacaagaccaaacagtatagaaaagtatttttttaaaaatcataggtttacacaatacatatattgtgatattaaccaaccacgaacaaaagttgagctcataccaatgtttacttggtttcttataaaattccgttgttcgtaatagcaaacgtgattataagtattccatctcgcgttttcacacaaaaattaacttttttttttgttcaaacaaattattacgtaggacatgtaccttcctttattgcgtggatgaaattattggagtggtaccggccgtgtgtcaattattacgtatagaagttcatatagacacgtatgtctacgtacaactatacatctcaatcttgaatgaaattctcttaaggtaaatttgtcgcagctttgattataggaaagagcaaatgtaaaaagaaaaagaattactgaggatgtgatgagccatgtcacggaagcggaggtaacggttgccgagagaagcgtggtgttcgagagtaagagaaagaagagtgtacgagtagaaagtaacggctgctcctccgaccagacaagatatcccggcagcccatcctaagaacttgaaggcgtacggtagactcagtagcgcaggcgccactatagacgtcgtcaagtggaatccgcagtgccaccatgtccctagtttccatcatcatcatcatcatatcttcttcaaatgggttataatagtatacgttaagtttcatagatttcataattaataaaacgtacctttggatttaaggacgaagagagaaccagcatcaactacttcttcccctcttttttctccatctcctgatctctcttctccacccatctctttatcgctctctttgtttctctttctctctctctccccccactaggtgctactcacttttataagtccaaaaaacacacttgctatcatatcatcttttacctaaaagcatttcgtaataatattaaacattgcagatttatagtttatcgattctcttctgtgtcaaacgatttatgaagttataaaatgtgtatatcttgattattttctttaaaaaatatatgatagaatatgaaaataaatggagaattcaaaatattttggaaacaaatctcttaaatcttattttttatatataatttcaaaataatcgattttggagacaatcttaaattttcaatacatccaacaaacagtaatagaaaaagcaaattggataatagtaataacatatcaatataacatgttaatatgtatattaaatccttattacagttttacattttcattataactgacagaatttttaaaattgaaagaaatttctttcggttaataataataatactagattttcacccgcgatataccgtagggacaatttatattttaaaattagtatatataaaagtttgtaatttgtaacaatctatgtaactatctataaaatatttttattttatagtttagaattgttattaagtaacgtcctgccaaactcgtcctgccaaactcgtcctgccaaactcgtcctgccaaactcgtcccgccaacccatcccgtaaaaaaagctcatttattttattaatgttgatcttctttatcatatgtttatgaatcattgtctaaatattttgtaattttgtagtaattaaatgttatcaaatatctctgcggtttgatgattataattgaattgtaatagtcatgaagaaaaacaatatcaataatgataattttgtagtaattaaatgatattaaatattttgaaagttttattttagtaaccaatcgtgtagttaatgtaaagagattttaaaaaaatttattaaatgtcaaatatttaattcgaagattttttttctaattatcaaaaacaaatattaaaatccagtggcaatcattgtaaataattctcaactacaagatttatttcacaaaatagttgcaaaaatgtatatatagactagattttaacccgcggtacaccgcggagataattttttttatttaaactagtatatataaaattttgcaaattatctctatctataaaatatttttattttatagtttacaattgttattaagtaacgtccttccaaacccgttctgccaaacccgtcctgtaaaaaaaaaccgcggtaccccgctagttgaaatttataattaaaataaatattttatggattgcgattgtgttttagtttgtcaaacaaaattttgttttaaatagttgtcgaaatctagttcaaattttggagaaataagatttagtgaattgataagaaatgtatttagttgcgtttgctcattttaagggattgcaattgtcttttgggttgtcaaacattttttgttttaaatagttgctgaaatctagttcaaattttggaaaaatctgcgtgatatatgggattgaaatatatttggaatgtttttcgtttgttaatcaatttattgctgaaaaaactaataattaaaagccagtgacagccattgtaaataagtttcaactccaggatttatttcacaaaatggatgcaaaaatatatatatagattatatctatatatatgtattttaaaatctttctcactttaacctcaacatccaaagtttatatgtatatatagtttatttgctcgatatgcaaaagcgtctgtagtccaacggttaggataattgccttccaagcaatagacccgggttcgactcccggcagacgcatttatattttttaacaatcttttctgaaaatttgaaaagacaacattttgcatacaccaaacatatgtacatatgttgtgttcttgttggactcgatggtttatcaaccccaggtccaataggacaacacgaaattatcatacaaaccacaatgattgattgtccccaaacccttatttctgttaccaactccaccatattgtcacaacttttcccctgttatcaaaacttccaaatcaatgttctatgaattttagtttaaatttttaccaattgtttattgatttatacgaattcaatcaaatgtaaaacaccaaacagaatggatcagtaaatataaaactttgttatcttctccaaaatttacattttcatgtgtgtatagactatagtatggttacgatgaagttgatgatgttggtgaccaaggagtcatatccatgggataactcccaagcacccgcaagaacgatgtaaactcctgaacctcggcaagcgcgttctgagcacgcgcctccgccatcgaggcctcgaagtcaacataaaacatgtactcaaaatgcttcgccgtcccgacattggcatcatccacgaccctgatcggacggttgtgattcggcctcgattcgatcttcgtcaagctaatgtctctgaaggcgaaagcagagagcaccttgaaaagcacgctggttcctttctcgtgcgcaaagacaatgctagtcttgaacggtctatctgttctaggtatgattggctcacgcgccagcatcacgaagcgcgtcacgttactcacgtcgtcctgaatcccatcttccaaaatctccaacccgtatatctcggcggcgcgtgcactcgcgatagcggctgtgtcgcggaggttgttagaggcgatgaactcagcggctcctgcggtgtcatcaactgcctcacgtgcgacattaagtccgagctttgtgagcgtgtgctcacactgagcgagaccttgagggtgtgagatcacacgtgtgagaaactctttacgaacgccgggaagagccagtaaacagtgatgaacagggagttgaacttcgccgactatatgaagacggtgacggaggaggagatcgtaattacggtggatagaaccgccgagagagttctccaccggtaaaacagcacgatctgcgatccaaagctccaccgcttgaaacgcaacctcaaattgatcgcaaggtatagcttgacaattaggataagctttaccagcggctgcttcagagtaagcaccgggaacaccttgataagcgacgcgtagattagatccgtgcatcggagccggcgagagatccgtcatgctaaggggtttcagtggattatgacgatgctgtggaaccaacggattgctatcagatttctcaatcggaacaagattcattcctggaactcgtgcggcggcgctgttatggccgttgagatgatcaactccgccggaaactggaggcacaggtaaggattcagattcttcttgagaaataaccttgcttgttagaatagcgcaggagctctgccattcagaacgaccagatcgcgcgataagcgcagtcgccgtcgccggctggctagcacctaatattggagaagaagatgatagagctttcatgttttagcaatggcgtcttaaaattggttattcaagctcaatgaaatagcaaagtcgagaatgtagaaaaacatgttttcctggggtagttcgtttgtgtggtcacttctccacctaccacaaccaccttacaagtcacagtcgtatggaccataccggcatttaactgaaaattaattcgacccgatccggtttaagttatttggtttcataaaccgattttctccataccccaattgagatatgagagtgtttaagactttaccggaggtgattcgagttcaaggagacagtctacacttgtgacttgtgagtcggagcttgagaacacctacagctacaagaaggaagtttgttttcgcctcgagctagaaatcctaatttgtcatcatcgtctcgaatggaaaggctgtgttcgaaatccaaaatgcaaatgcgataaagatgggcttttagataggcccaattagagtccaaaaatgaggggcttatcagtgatttggttgccaataccaaaagcgcgggaaaatgataaaagatttttttttcctctctactctttcactcactttctccggcatccacgaagccctaccagtaaaagcccttttgttgaccctaaattctccttcaaagcttctccaggaataaagctcctctctatataggaatctctctctgtcccgcgtaatttataatcgccgcaaaatgagcggagataatcgaagacgggatcgaaaggatacgcggtggtcgaagaagcctaaggtagtgaacactgcggaagatgaactcgaatctaaactcggatttgggcttttctctgaaggtgaaacccgacttgggtggttactcacattctcatcggtaagttctccgacactctaatctggactcaaccttgttaattgagagtatttgagtaggtttcggattcgattatatgtgaatttctgtaaattaaatataagcattggcgactgaaccatacaatgaaactccattagtgcgagaatttaggattctaggtaatgtcaaagtactagtatttactgattggataatctactacgttttgcagtcatcttgggaagatcgcgatactgggaaagtctatagttgtgtggacctttactttgttactcaggtgagctgctataattatggtcattactcattactatgtcagcttcgtataagttgatgaacgattatatttttgttgttgcatttttctaaatagttaactgagttgaggatttttttcaggacggcttttctttcaagacaaagtacaagttccgtccttacttttatgcagccacgaaagtatgatagtttctctctggacattatcggaattctccttgaatcattcatgtattttcattttatatgtcaataaactgcaatgccaaattacaggacaaaatggaattggaactcgaagcctacttgagacgccgatatgaaagacaagttgctgatattgagattgttgaaaaagaagatcttgatcttgtaagtcagtaaagcatactatgattattattagtttaagtctgacttcctcattgtgtgatgtagttgactagtgtcttccaccagttgattaatgttgtttctctactcatatcagaaatatttgctacaacctttagttgttatcctcttcttgtaacccaaaactgaacatttgtagtaaatagtccaaaagtagtcttgaatccattaggtgaaatcaataggcgtttgctagtatgtaacatgggctgtagatgttaaagttagttttctttaagtgtttattgattgtcctttagtgcaattgtatgcaagatatgaaggtttcagtactttttagttatcaattcgcttaggatgtctttgtagcttttttctgtgatacacaattttgagttcctttattttatgttcatgagcagaaaaatcatctatctggcctgcaaaaaaaatacctaaaaatatcatttgatactgtgcaacaattgatggaagtcaagcgggatttgttacatattgtcgaacgaaaccaggcaaaatttgatgcacttgaagcatacgaatccatattggctggaaaacggtaagacatgtaattttgttcttttaaatcacttaagagttttgttgattttcaatttttacctcttaacctaagttgtttcttagttatttttcaagtttatttttaagggtttcagatgtcctgatcatttttatctttattcttggaacgcagagaacaacgtcctcaagattgcttagactctatcgtggacctccgcgagtacgatgtaccttatcatgttcgatttgcaattgataatggtatcttgtttagtcaaaccagaatttctgtttagtcctcaaaattgtcaaaatcatgatgttttcttggtgtccagatgtgcggagtgggcaatggtacaatgtcagtatttccagcaccgatgtcatattggagaagaggacagatcttcttcaacgcgcagaagtccgtgtttgtgccttcgatatagagacaacaaagcttccgttgaagtttcctgatgctgaatatgatcaaattatgatgatatcctacatggtcgatgggcaaggttttctaattattaacagagaggtaactgctgtatacatttgtctgtattggatctgatattgtaatgatgattttttacatggtggatggggattgttaattcattaatttagagaacctactatatggccttgctttgccatttttgtagaaatgatccatataagattatcccgcttgtttaattgatttcgtatgatgtaactttaagactgtttttggactagcataacattttgctataatttaaaacataaattctgatatgttaaccgttttttgttgcatatatcatctctgtttgatatctcagctctatgctttccttatatattttgtactactgcaatcttgtttgattattaatgtagcatctttgcacttaattcagtgtgttggcgaagatgtagaagatctggaatatacaccaaaaccagaatttgaagggtatttcaaagttactaatgttaaaaatgaggtaaaatacttaagctcctgatttgaatataaaatcagaaacattgatgtgcaggtgagttatttcttggttatttcttgtaggttgaactcctccaaagatggttttaccatatgcaagagttgaaacccggtatttatgttacatacaacggtgacttttttgactggccatttatagaacggagagcatctcatcatgggataaaaatgaatgaggtatgctaaagttttattcgttgtggttttgaattaattttatctgtctgcatgactaaacggatataatatatctacttggaaagtgtatataaaagtttgtgacattattcgctgacattctatagtggccttgtgagtgtgcctctgcataaagtagaatagtgacgctgctcaagtacttcctagactgtgtactgaattatcttgcacgacgatgcttacttttacatattattgtttccttgtggaagataaattttcatccttcaaaatattcagtgacttgtgttttgcatttcaatactgaagtcttctgagagttggcaaggtgctgccactcattctcccggaacttggttctcttctcagttctgtttaaacctatctttcttgctttttcatttaaagcctagttcgttgcatcttactcgtcacttcctatcctatttctactatcttccactggagcataatggtcaactgtaattccataattggctggtgtgttttgtttctttcccttgtggttcaggaattgggattccgttgtgatcagaatcaaggtgaatgtcgagctaaattcgcttgtcatttggattgttttgcttgggttaaacgtgatagctatcttcctcagggaagccatggtctgaaggttcattctacttctatatctgagcgattatttatcttttgtggtcatataatattttgttaagaaagtcatattatgattttgatgcttgtttcttaattaaatgccaggctgttacaaaggcaaaactaggttatgatccactggaagtgaacccagaggacatggttcggtttgcgatggaaaagccccaggtattgacgagaagttaatcctgctatttctgtaaaacatgtttttttaaccattagagctggttgttagatactagaatgggctagagttacaaactgtcgatgataagtgatcaagtgattcaactatggctctttatgggttgcataaatgttcttctgttcatctttaattcattgtcttatcatcagtacacaaaatttagaagcggacatagaattcaggcaattaatggtgtcaactgtagatttttctagtctctctgtagtgcttgaaatatttgtatgggtgcttatatcttatttctattcaatgctgggaatcatctcgcagacaatggcctcctactctgtctctgatgctgttgcaacttattacctatacatgacatatgtcaatccattcattttttctctcgcaactatcatcccaatggtccctgatgaggttttacgtaaagggagtggcaccctttgtgaaatgcttctgatggttgaggtatcaacctatttaccacaaggtttttagcaatctttactgtgtgacacattctattaattggaagttttccattcagcacaggcttacaaggcaaatgttgtatgtcccaacaaaaatcaagctgaccctgagaaattctaccaaaatcaacttcttgaaagtgagacatatattggtggtcatgtagagtgccttgaaagtggtgttttcagatctgacattccaaccagttttaaactcgattcatcggcataccaggcaatttatctgctttatatttattcactataatgtttgttgatttgtttaattgattgctgagcattactttttctgatagagtttcaattcaattgtcactgatttgtctgtagtttcctctgaagtgctgcagtttatagtaaaatctatgtagtctgtaatgaatgtgtgaagcaaaatgcttcccattcttgtgtgcatgattgtatcatagctaattaatgcacctatctgatatttgacgctttgattgccagcaactgatcgataaccttggtcgtgatctggaatatgctatcactgtagaaggaaaaatgagaatggattcaatttccaattatgatgaagtgaaggacgaaatcaaggagaaggtaatgaatttctcttctgaataaaaatattgatttaatgtttgttcccttgtttcttgtcagcatgttgttactcttgtcgctttgtatggctgacactgcatacacattcatactgaaagatttttcttatacactcatacatgcttagctcgtatctatgagccttatctcatgtagagtaatcccattagggcttgtggaagaacattagttagtccttagactactgtttgagcctccggaggaaatctgtctgtcaagtatcctctatcatagttgttatcaactatcatctgcatgcttggatattttaaagcagaatttataacctgatcgtcttgtgaattatctccctttatctttgattcgggttgaagtcttagttctgtcgtggtttggcggttttattgattttgtagcttgagaagttacgagatgaccctatacgggaagaggggcctcttatttatcaccttgatgtcgcagccatgtatccaaatatcatcttaacaaacaggcttcaggtacatctaatctctgtttgcatgtttctaactgatttagggattatatgttgtagcatgcgattgtaaatcaatatctaccaaacatcagctaattggtgatgttccatatacaaaataatcacaaccgtgacttttacgattgtgaaccccctagatatattatgttaagcgaaagtttcctctaaattctcagccaccatcaatagttacggatgagatttgcacagcatgtgatttcaaccgcccgggaaagacctgtcttagaaaacttgaatgggtttggcgtggtgtgacattcatgggaaagaaaaggttcttaacatatatatcattcctaactttggatttaaaccttgttggtatagtcttaagttctcaactttgtttcaaatggtttgcagtgattattaccatttgaagaagcagattgagtctgaatttgttgatgctggtgcaaatataatgtcttcaaaatcgttccttgatctgccaaaggtggatcaacaatctaagctaaaagaacgactaaaaaaatattgtcaaaaggtactctctctccaccgtagtaatattttccccacaatgtcaatatataatggcaagttttctgctattggtaggcttataaacgagtacttgacaagccaattactgaagttcgtgaagctgggatatgcatgagagaaaaccctttctatgtggatactgttcggaggtgcgtttcttgattaagactctatttgtcgtttagtcttttgggaagcatctctcttgggtgaacatacaactgctgataatgaaacatttagacaagtactaattactttttcaaattgctttttatttggtggtctttgtatgttattaaagctttcgagataggaggtatgaatacaaaacacttaacaaggtctggaagggaaaattgtcagaggccaaggcaagtggtaattcaatcaagatccaggaagcacaggtaagttatcgtttatacttgctcatatatatgattttcagaatttcttttagatggttattgacattaaaatttggaacaggacatggtagtggtttacgattccttgcagctagctcataagtgtatacttaattccttctatggatatgtcatgcgaaagtgagtcctctcttacaaagagcctggaatttggtgttattatcattgtctgttccaattatgttgacccaaagctttacttaaaactaattccaggggtgcaagatggtattccatggaaatggctggtgtagttacctatactggagccaaaatcatacagaatgcccgtttgcttattgagcgaattgggaaaccacttgagttggatacagatggtatatggtgttgtctccctggatcttttcctgagaactttacttttaaaacaatgtaagattttgtaatctccatgatttacatcattacatgtatatgttaggaatttccttgttctgttttttttttttaatatatagcatttcactctaaggtatttccaagaggcgttttatttccttgtttaattaaggtggattacattttcttgtggttctagagatgttaataaaccatcaatggttttcattattgcagagacatgaagaaactcaccatctcgtatccttgtgttatgcttaatgttgatgtggcaaagaataatacaaatgatcaatatcaggtttgccggctattccttacttaaaagtagcttctgtgttcagtcttaaataagcagatgatataacaagcccttttgtggttctgaaagcattttgccttgtgttcagtttctgtttttactcttaattttggttttggaacagactcttgtagatcctgtacgcaagacatataaatcacatagtgaatgctcaattgaatttgaagtagatggaccgtacaaggtatgcttaaacgctttgaatttttgacatgtgctgctctttaattgctgcacaaaaaaatatttgtaaccctctccattcaggcaatgattattcctgcatcgaaagaagaaggaatcttaatcaagaagcgttatgctgttttcaatcatgatggaaccttagcagaactcaaggggtttgagatcaagcgtagaggggagctgaaactcattaaagttttccaggtacccttcccttttcttgtgttgtaatgattctgattcataaaaaaatgtttctttatttatttttaggctcaatgttattgagtgtatttcgccagatccacttatactagtaactctttctagcagcagttttaaggttctaattctgacgtttttgtcataataattctctgttagggaagattccaatggttctagattgcttgttcaggtggccatttagcaattattgagagctcatcttctagctccattgttcgtaaaagaaagaaatgataaataaaatttttggtatctgacaaaatgcatgtaacatttttttttaaaatctctgtcatatacattggattcttgtgtttatggactgtgtaatgtagtaagacgttcataatttgttagacacaagcatcccaagaaaataggcagacttttacttgatgaatatgtgtctctgttgaaaaattagaggtcagcttagtttatgaagctgtcaggcgctgaaagaaatcatattttctttttctttcctttccctacaggccgagctttttgacaaatttctccatggatcaactcttgaagagtgttattctgctgttgcagcggttgctgatcgatggcttgacctactcgatgtatgtgaaatatcttgtttcttgttctcttttagttgattatttcttttacttagcaggaagacttttcatacaggtgctgctaaattctcttatttgcagttgggtcatttatctcataggttttctttcacattttctccagaatcaaggaaaagatattgccgatagtgaactgctagattatatatcagaatcaagcacaatgagcaaatcgttagcagattatggtgagcaaaagtcatgtgcagtgaccacagcaaaacgcctggctgaatttcttggtgttacaatggtcaaagataaaggactacgttgccagtacattgttgcttgtgaaccaaaggtacatttcttttaaacttgaaatttctcgacacttttgtgttttttcctcctttgacatctgctcaaggagtactagaagttggttactttgaaaggtatctccaacccgaacatagcagggaaaaccaaagagttaggtctcatgtctgattcacatatcttctttcatccttactgatatatttattagtacaagtaacacataagtggatgttgtactaacaatctttactgttgaagttcttagttaggaacactgctgatatgtacatgttcccttagttaagaatgttgctcacatctaaaaagtagttactgtccgttaagcatctttctcagctagtctagtatagtgtctccatcacactgcttattagtaactttttactgttacgacttaacaacttttcatgattagggtacaccggtaagcgaacgtgctgttcctgttgccatatttacaacaaatccgggtaaacattctgttatttggtgtgatgtattgttgcattcttaacgctcatatgtgatgtaaatcttcaaaattaacagaagttatgaagtttcatttgcgaaaatggtgcaagacatcatcagatgtcggaattcgtctgattattgactggtcgtattacaagcagcgccttagttcagctatccaaaaagttattaccattcctgctgcaatgcagaaggttcattattactattcttatcctttttttaaaaagatttccttagtgtaatttttatatatatctaacgacttgtatgacctctataggtggcaaatcccgtgcctagggtgcttcatcctgactggctccataaaaaggtccgtgagaaagacgacaaatttcgccagagaaaactagttgatatgttcagctcagcaaataaagatgttgtgttggacacagatcttccggtgactaaagataatgtggaagatattgaggatttttgcaaagaaaataggccttccgtcaaagggccaaagccaattgcgcgttcctatgaagtcaataaaaaacagtctgaatgtgagcagcaagagagctgggatacagagttccatgatatctcatttcagaacattgacaagagcgtaaactaccaaggatggcttgaactgaaaaagagaaaatggaaagtaactctagagaagaagaaaaaacgaaggtaggttttcataatggtatttgttcacctgaagtttattatacagcaagacggttttgatttggaatgatatatagttccatataacatctattgtttttacaagtgtctgaacttgttgactgtatcccttcgttttgtaggttgggtgatctaagatcttcaaaccaggttgatactcacgagataaatcaaaaagtcggtcagggaagaggaggtgtgggttcatactttaggaggcctgaagaagctttgactagttcacattggcaggtgtgcacagtgacctatttgtatttatatatttggctatttttttgcaaccatataaagctgtctttccgaccttttcagataatacagctggtcccaagtccacagagcggacaattttttgcttgggtggttgtggaagggttgatgcttaagatcccattgtcgatcccaagggtgttttacattaattccaaagttcctatagatgaatatttccaaggaaagtgtgtcaacaagattcttcctcatggaaggccttgttatagtttgactgaggcatgtgttttaacctctatacatctttccccttgtattccttctagttagttacaattttctcgtttctttacaggtcaagattcaagaagatcaatttaaaaaagaaagtaaaaagcgtgcagctcttcttgcagaccctggagttgaggtgaggtttttataaagtagaaaaagaaattgccatcacatgccttgactatttaaaaacttttcttagtctagttaactattatttatgtgatttctggtaccattttgttttagtgagtagacaacttgtgtatggtgtctgggagtacatgatatctgcctatctgagtttgaatttgtctgttgtaaaacttacttcatcaagtaccctgtgtaaggaaaactaaatggagttcacaagtgaagggtagctaaattcatctcagttatgtgcgtctgtgatggctctccatgctgtcttgtttgttaattttattaaaatgtgaatgggatccaacgacttgtaagcttggtgggagttatgcttttgttctaatgcttactgagacactagccagataatcaccaggcgaacttgttggttatcatgcatgttgttaccttcatttttcataaagggaaataccatgttcatgcttggtagtctcatatttgaccatggcagggcatatatgaaactaaggtgcctctggagtttagtgctatatgtcagattggatgtgtatgcaaaattgataacaaagccaagcaccgtaacacccaagatggatgggaagttggtgaacttcacatgaaaactacaactgagtgtcactacttgaagcgttcaattccacttgtttacttgtataacaggtagagctctctaagtaacatgactatcccttttctgatagaaaccagttctacttcatggagtttaagttgaaggaaggttttgattgtaaacttataataggcatttcttagtcacaatgttagagtgtttacatttctacgtttctagtcatattattctaagaaccataatagggtttctgtcgcttttcaaattagtcccttttacattttgaactttttttcttcttctttgggatttatatggtttcaattatccaagccggaatatcttatctcatggtttacttgtatgcagcacctcaacagggcgtgctatatatgttttatattgtcatgtatcgaagcttatgtctgccgttgtagttgatccttttaacggcaatgaattattaccatctgccttagagagacagtttagagatagttgcctagaattatcacttgattcattgtcttgggatggtatccgtttccaggtaagctctaaattcatcgcatacaacccctgcagtaacagtcctgcattttttgagcttttgtgaatgctaataatcaggtgcactacgttgaccatcccgaagctgccaagaagataatacaaagagcaataagtgaatacaggtaactcatttttctgattatagaagtgtagccagtttaatgtttccttgacatgttgaatcccatagtgtttctattgctgatcagttgctcatgctttttcctgtttaattttttcctttgtgaactagttggttacttcctaattttttttttttgacattcagttggttacttcctaatgaaataaattctatacgttaattggcaaaaaaaagaaaaaaaaaagaagtgattgtctggtgtgatcatggcggattttggactttttttgagaggtcatgtcaggtcatgccactctggtttgacttgttccatttttaccttttcttgcagagaagaaaattgtggaccaactgttgctgtcattgaatgccctgactttaccttcatgaaggaaggtattaaggccctagatgatttcccatgtgtgaggattcccttcaacgacgatgacaatagttatcaggttccttgactaataaaccaattggctactttttctccttttgtcatgatagacgattatttgataagaaatatgtatgtgggtttggttgcaatgcgtagcctgtctcctggcaacgtccagctgcaaaaatagcaatgttccgttgtgctgcagcatttcagtggttggatcggaggattacccaatcaagatacgcccatgtaggttatgtttctttagtggatatatagttcctcatatcaatacttttttgcagttattgacatttcctgtacaactgactaggtgcctctggggaattttggacttgattggctaacattcacaatagatatcttcctatccagggcactccgtgaccagcaacaggttctttcttcgaattttcgtctactttctaatacttttaatagttccaatgttacgccatatgctttctttttctttctttttttcctcgctctctttttttctgtttgcctttttgcttttgctctgtgtgtgcatcttcactgattgtgattttttctttttttccttttcttttagaagtgcatattatgtatttagaaagagaagagcagcttttccatatcactgaattttcttttgtataacaggtcctttgggtgtcagataatggtgttccagaccttggaggtataaacaatgaagaggcattctttgccgatgaggtatgtataacaggtttttttttgccttttggtttctctggactttgtcatgatcttctcccatctccatgtttttttttttttgtgctactgtcgaggtgataaactgacatgcttctttgacacaggtgcaacagacaagtttagtattccctggagcgtatagaaaagtgtctgtggagttaaaggtcataaaaaaaaaattacctaatcatcagtgcttttttggatgttgttctaattaacatgcaatgtgcagatccataacttggctgttaatgcccttctgaaaagcaacctggtgaatgaaatggaaggaggcggttttatgggatttgaacaggatgtgaatcctagaggaattaattcaaacgataacaccagttttgatgagaccactggatgtgctcaagcatttcgtgtcctgaaacagttgattcatagttgcttgactgatgtgcgtaaatctaaaaatatatatgctgattccattttgcaacgtttgtcttggtggctctgcaggtatgattatgtcttgtaacatattcattttattcttgactcataaaataccaatctataatttcatattgtagcccttcctcgaagctccatgatccagctcttcatctcatgcttcacaaggtagatcatatttaatgctttttgctctttttttatcaggtctaaatgagtaagtgtggataaatcagcaaactttatattaattcctccttgcttttctgtctgaatctttcccaatcaattcatttatgggatctgtagcttacagattatatctccttgccggattatacctgtcataatatatataattcccaaggcaccttcagatcttgagatttgccagttacactcagtttttatttgccttaagaattctaaaccaatttgacttcctacatttttcgtctatttgcaggtcatgcaaaaggtgtttgcactgctattgactgatttgcggagattaggtgctataataatatatgcagacttctcaaaggtcattatcgacacagtgaaatttgatctatctgcagctaaggcttattgtgaaagcttgctatcaacggtgcggaataggttggtttcttccttgctcgatatacatgtctatgaccttaagtctcatggactgcactcattttcctgccatgatttttgtgcttcgcctctgacagtgatatctttgagtggatattgctcgagccggttcactactggcactcattacttttcatggaccaggttggaattcttttttcttatactttccttttgtatttttaatctctgattgttaaacctggcaaaacttgttgtaaattgtaaaattccaactcctcaacgagagagaaaatgaaaaagtgacaatgcatgctattccagtaaaaccagaatgggccaaggaattataactgatgagtagaaccctttcaccttgatggttaataaaattatagaaccaatttaccatcattagtttttgtttaatcaggtttcttgatcttgccttttctcatatttttccttcccattgaggtatctcttttcttctacattttagtataactacgctggtatccgagccgatgatgaaatttcacttgacgaagtgactattgaaccaaagtggagtgttgcacgacatttacctgagtatattgaggtttggagacagaaccctcactcaaaccaatgttcatttagtgaaaacaaaaaacatgtggcaacacatggaccatttttcttggacactgacgcatttcatctatcttggcagagggatttcattataatcattgccaagtttatatttgacccctggaaatttgcgatagaaaataaaaagggcagttcagagagtttagaggcacagatgatagaatatctaagagaacaggtagcatattaaagccaattcgcttgatctacttttcatcaatcaaaagattgtctcctcatttcttttttgttttcttttatgcagattggatcaaccttcataaatatgcttgtcaaaaaggttgatgatatcatgtcacacatgaaggagataaatgtttcagatgcatctcgggtttctggtcaagctcccaaaggagattactcgttggaatttatacaggttatctctgctgttctggctcttgaccaaaacgtccagcaagatgttctggtaattactcccattctttttcattttaacatatggcgtattcacaagtcttctgaatagattaatcttgaatatgaaaagtccactgaagcgttgtttatctttacagttaaaaaccctctttataactgatttcattcacaaatccaatcttatctctggaaatgtggttcttgaaaccatgtttaccaatagagctggatttttttttgaatgggttttaacgatagtcttctcaatttttgtcctctagacctacaatcttgctgatttaatctcttttctataggtaatgagaaagagtctgttgaagtacattaaagtaaaagagtgtgctgctgaagccgaatttcttgatcctgggccatccttcatcttacctaatgtagcttgcaggtattatttgaccaaaacaaatgctcgtgatttaaataagcattcttgtgattggctacgtctagtaatagagaaattgttttccgaaatcgagttgtcttttggccacaaacataaatccctgcgaatcccctcctttagagacatcctggttcacccttgtggtgatcatcacatcaaatctacacagcaatatcaaacttgcaacactaaagaaaagaaaacttagacccctaaatcctagacaataaatacttgacttttttgcagtagtaagcagtaagacagctggaaatgtatacactgagttttgattgtactgtttttcttgttgcagcaactgtgatgcctacagagacctagatatatgcagagacccagcactgttaacagagaaagaatggtcatgtgcggatacacaatgtgggaagatatatgacagagagcagatggagagtagccttctagagatggtgagacagagagaaagaatgtaccatatgcaggatgtagtgtgcattaggtgcaatcaggtgaaagcggctcatttgacagagcagtgtgagtgttctggttcctttagatgcaaggagagtgggtcagagttcagcaagaggatggagatattcatggatatagcaaagcgccagaagtttagactgttagaagaatacatctcttggatcatatatggccctagctattaacaaaacaatagagaaagacatcgtttataggttaattgatttgtgcataggtttacaacctttttcaagctctcaaatatttaccggtgaagaactgtggaaaattcacaggcaaaatcacagcttcctttaaagcttgtttggcactttcaagcccagcaacaactgtccacttaacgttaggcttttcccttataatagcagagtttaacccagctcgaagctttgattcttctccatctcctccgtctttgggcttagtcttaggcttcgtagcaaccgctgcgtcgccattcgatcctttccccgatccaacttcaactaataccgcacgaatttcctcagcacgacggagatactcgtagaacttgtcggtgatggcatctctgatcctagggttcttctcatatttgagatagattttgaagtattcaagcgcgttcatgtacaaaggaaaagctttgttgtagttaccagcattgtcctctttaccgcttgtctaacgtactcgatcgcttgttctttgaaattactgtacatattttttttagggtttatagaaataaattccttcaatcataaaattgaataatttatcgaaaaaaatcagatgattaaagaaaccctaggagaagcgtggttgatccatgatcagaaatttaagggaaagcagagagttttgaagtcggtgaggctaacagagagaaaggaaaattttgatttttttttgacgtttgaaaatagaaacaacagagtgtttgtgtgtagaacacaaagacgtccaggcgtctgagtttctaactgttttgatgaatgacaaggagaatactcgctggttttaataccggaccaaaaatgggtttaaaaggttcatttaatgggcttaaattttgtgtgtccaacgactccaatagggttaggcaaaagacgcagacatagaacctaattgacaagtctctctacgtacggctagagagagtaatacccgaaccagataatggtttcccaaaataacctctttgtatatgatttatgaacccactctttcttctttaatctttctttctatagcgcaattaagatcatggcttgcacctccagaaaaagaaagagagagagagaagtaaagaatgattagtttattgaattggatctttcgtctttcttcagatctcctccatttaaggacctccccatatctctctcactcaccaccttcctttaacttcatttgaaaactttctttccctaaccaagaaaccaacaatgtcaatgtcgtctccttctttttgacttcaattttacatttttttatgttttaacttccttgctaatttagaatcatgagttttctaaagctcctgtgaagattttgaatacagatttctcaaagttctctcctttaccattagacccgttaatggatccgacttcaaaatccgacccgcgccgtcaattattgggggtttaaaagcttccgactttctttctttctcatctatcacggcggcgtcgatgaaacgatccgttagacctctcttcagtgctcttctcttcgccttcttcgccgctacactcatctgcagagtggcgattcgtcggagcagcttctccttcgcttccgccatcgctgagcttggttcctccggtctcatgactgaagatattgtattcaacgagacattgctcgagttcgccgccattgatcccggagaacctaacttcaaacaggaagtcgatttgatttccgattacgaccacactcggagaagccaccgtcgacatttcagctccatgtcaataagaccaagcgagcaacaacgccgtgtgagtagagacattgcttcctcctccaagtttccggtaacgcttcgttcttctcaggcttatcgttactggtcagagttcaaaagaaatttacggctttgggctcgtagaagagcttatgaacctaatatcatgttagatttgatcagattagttaagaatccgattgatgttcacaatggtgttgtttcgatttcgagtgaaagatacttatcttgtgcagtggttgggaatagtggtacattgctaaatagtcaatacggagatctcattgataagcatgagattgtgattcggttgaacaatgcgaaaacagagaggtttgagaagaaggttggatcgaaaacaaatatatctttcataaatagtaacattttgcatcaatgtgggagaagggagagttgctattgtcatccttatggtgaaacagtgcctattgtgatgtacatttgccaaccgattcatgttttggattacactttgtgtaaaccatctcatcgagctcctctgcttatcacggatccgaggttcgatgtcatgtgtgctagaatcgtgaagtattactcggtgaagaagttcttggaagagaagaaagcgaaagggtttgtcgattggagtaaagatcatgaaggctcgttgtttcactattcgtcgggtatgcaggctgtgatgcttgcagtggggatttgtgagaaagttagtgtcttcgggtttgggaagttgaattcaaccaagcaccattaccatactaatcagaaagcagagctgaagcttcatgactatgaagcagagtatagattgtatcgagacctggaaaacagtcccagggccattccattcttaccaaaagaattcaagatccctttggtacaagtttaccattgaatatacatatataccatcaagagttttgtcatgtagttattgttgttcaagcgaagaagcttgttggcaagagtgtcgttttgtccaagtcccaaagattttgcttcagattgggcagtgaagatgcaacactttcccaatggtaagagtactctttacaatttttagatttgtgttgtcacacatattgaaatatatatatggtatatttggacgatattctcacatcaatataaaccaaaatcattcagattgacgtgtcgatcgaaaaagttaatcccacacgcaagtttaatacgtttgagtagtacgtttattcatgcaaaacacaaaagcgtgaatccttgtaacaacaagaagatcgaaagctattatatgtaatgaaaagagagacaatataataggaagagtctttaattgaggattatcgtacaataatgaagtgaagcacaccaattttctcttctaatacaaatacatgagagaaacagaaaattcacgtgcttcacaaaattttaaagagagaaaccatctttattaagaagaaaaccctaattaagattgaaatcatacttactactaatcactaagataaataggggtttactcgagccacaaaatgctctccgacaaatacatccctcggacaaagagaagtttttgttagtgagcataattaaacctcctttttttcttaaggttacttatttagtagcaaaaatcccctaccaaaccaagaaccctaatatcacatgcatattacgtaacacacaaatactcaaatctatgtctcaaactaaagcaaaataaaataaaaacagacagatgacaccgggtttcatgtagacttaatcgtaaccgtatccaaaggaaaaagatctaaattttaaaatgttgcttcattttatgtggtaactttatatattttgatttcgagtctaacaaagaatttctaccttttcaagatagaaattctttggtagacttgagatgttttgtggcgcacagtttgaagcaacattagaaaattaggatcttaccttccacagtctccccggtgtatctaacaacattctcactctgtggtgacgcattctgtatcctcctcaaaaccgtcaaacaaaagagacgggtgaggagaatgtccactgccaaaggacctaatgtggtccttgagagacctcttatgcttgaaatctgatccacatgtacaataccaaagctttccgcagtttttctcatgggtcctccagtcgcctttcacagccaaggctttgccacattttccgcaagaaaagggcttggagccatgcttacgtttgtaatgtgtctgaagtgtacggaaatctttcaggggcttggaccgcggatggttgatgttgttcttgcatccctcggcacagcaatagcatggcagccgcaggatggctgccggttggattgtgcctttcaacgagtcagccccttttctgaactcagatccatgtccccacatatgcatctgtgttttgcatatataaattcattagaccataagaactctattttattttgaatattatcaatttaacatattgatattgtatggtacctaatagacaattatatatgatctgtaggacagaaatttcttgtcccattatgtttctaaatagtactcgaatgcttgttctagtcaagactcaggagtgcatttgcatttaggagacttatcaataatacacaaatgtataaaattgtgcatatatttatcactgtaggaatagggaatggaatggatataaaaggacttgacgaaactcttgaccacgtatatggtaatcacaatttcaataagaaaccatatatgatgtaagaaaaatgtgttttctacttaattaacaagtggtattgggataatgattttaatttcgaactaaagttgggacgaaagaaaatttatagtaaatggtaaaggagagaatcctatgtaaaatatataaacttagaaaccaatgatacttaattagaaggctttttaattactaagatcttcattaggttaagtaatcgattgcatatattcagtaaaagtagtatgatcattgctttttaaattttctccccctttttgggtttttgctgaattatactttaccaaatcccactccgtgattattcttttgctttttggcttttcaaccaaaaggcaaggcaaacaatgaaaaaaagtcaaaaagtttttcgaagatttctcaactaatccagaagttatatacccattcatccttctcttaatttatctattgcgaatgatacaccaaccgcaattaattatcgtaataactaagtcatcaatgttcaacatctttaaatgacaaaaactaatttccttccaacattatgcatgtatgtatatatacgataatatattttgtagaatgtaagatcatcatatacatatgcagcaaaattctcacaaaaagaagtgtatgatcaatagaaggaattaatttacatggtaatgtatgatcatacaattatataaacaattatttaactgtttttaaacatttatacacaaagtacaatacattacggaatacataataataatatacttctttttgtttaaaatatgttgttaattattttgttattaatgtgttgttgaataattaagatatatataaagttttgtttgctgcgatatgataagtttccctttgaggggaaaatgttattcttcaaaaacaaaatgaatttatcgaccgttttttgttttttgctagcttatatgggaaaataagtaaataaccataaatgaattaataccctatgataatggcaaaggtaaagttgatatagtgctaatgtttctttttcttggtaaataatacattgacatatagtaagaatggttaacacataatgcaagatttgtagctgatatgtagattatctaacaaatcatataggaaaaagatgatatttagagagaagacgtacctgcatgttattgtacctattgaatgttttgctgcaaatagagcaagcaaattgcattggaccgacatgaatctgagccggacttggtatccaaaacctcttcccacatacttccacatcagaatcaattatctcctcatcaaacttcatcttcctcctcttcttcatcatcaccacaccatcttctattatctctctcttgatgggtttcttctgatgatcgaaagttatatcagagccatcctccgagctaccacggtggtatttaggaaatccgatttggagggtaaccacatcatccttattctcttctttgatatccgaggcttgactattattttccatgagcttgtttagaagaggcaagcattgaatagacgtgttgagtggttcttgtggttggtacaagaatagagatcgttccaacatgttcatctgactctggtggtgatttgatcttgatatagcatctcttgtcttcccacgatataacacagatttagaagaagtagtagaagattgaggtttaagccattcaataaagcttggggattcgaaacttaagcctttcgtctcataagaattcatctctcgctttctctcctctctttcactctccctctctctctctctctctacctccacacgaagaagggtaagactagtagtatgaaaagtttatatattaatatcaacctacctggtgtgtatcgtagccgttcgtcaaaataggttctctctttatttttctccaatacaaaatcttcttctttaaagttttgttttcttttcctcctaccccccaaaacgtatagtgcagaaatgtcgcacgtgtctgtctacgcgtttacatcaagaggaaaagagtgaaattttcttcacaaaaatgtggtgggtcttacttcacatagtgaaaaggaaacgcacaagcgcaaggcttttcaatgaaagagaatcctaagaatcatagtctttttttttttcttctttaccctcatttcctttcccattattaaaattttgtaacatcttaaaccaacaaatacgatatcctttcatcatattatagtcatgattgtcatttaagtgcatatagaccggcgaagacaaaattcatcattacatatcaaaacaacaattccaacatcattttagccgtctttttagggacaaatgataaaaaaaggtaaattgttataaaatcacgcgttcacttttattgacgttggatgatccaagtagcagattacacgatattgatgatacatacactgtttttcatacgcaagacttttctagctagtactctaatccatgatttgcactttatttaaagatatatgaaaatatttattagctttggaaatgagttcactgatattctttgatgcatgattgggttcacgggtctatagttgatatggcagcccacacacgtatatgtttgcaaatggtactatagaaaactgaatccaaaaagtgtgaaactactttggttgtatttcattcccgttttaaatctgtcgaagctatattcattcagaagtaataaagcttaacattaatccaaaaagcagtcgcattagacattcccatcctcacggtagcgttagaaagactggaatggagcacaacaagcagatgagatgacctacacgaaggagtacgttgacccaaaaactgtaatgaatttacgttaatttttgtgttatagacgaggttttaggacgttgtaagattttgaatacaaagaggtagtggagttttgacccattaagcacaagatttttcttagaaaacaaaaaggttaccgcaagtaagtcaatacctgaagaataaaatacttgaaagaaaaacctaagaagagtgagtattcattttaagacgaaaatagaagctgattcaatgtatgtgtcatgttgtggtggaccctaaaacaatattaaccgcgcaaaatttccgaatggtagtatagctaaccgttgaaccgtatgctactatgctttcattcactaaagaattatggtttacgtcccatgcggttcaaacacggtatatacatatctggtcatattttgtgaaaccgggtttgaacaactcaccaatacaatagtactacaattcaaattaaatttttctttttgtaattaaacttcattttggtataattaaagaaaaaaaatgtttccttttgttgaccgatacaatgactgtatattcaaaaaattacttttagacatccaaattatattttcatctatcaattacaatattatgaaaattatatatttacagatgctaaatcaaaaacggtacgtttcaccttaaaccctaaccctccgaatgagctagagagacaccagcccttctattaaaagttaaaacccttccctctttacttctccgatagctttttattttcctcgtttttgcgccgaccaatgcaagggaatcgcgacggctcgtggtcactacgcgcctccgcgtacggtggaagcggcaatggaaacggagggtatcttcctcaaacgactcctgtatttcacaattacattgtcaaacaacaacaacccatcagatacaatttccagacgcagcagaatctcaatttccctcatccacaatttggcggcggcgctaatgtagaacttattcgaattgataaggccgtaaacaatacgcgtaaatcattaattgctgctggagacaacgtatcttcgactagagtttcgcaatcggttttagcacaacttcaggctgacacttggcgttccttggggatatggatgcaagatgttccttcgcttcgccaactcatggcccttgaaggcaaggtaaagcttaaaattttctatattgcaaatgaaacagagcctatctattgcaaagttgattccttttacttaaaacctttgaatcttgtagatcattgcatttattcactgcttcattggcgctagaggaatcgtgacattgcatgatttggaagtggcaatatgccaaaacgagtttgttggttgttttgatgatctgggattgggacctttgctgcagcatccacttgtcttgctctattttccatccgtctattgttctactgccccagttaagatcactagtgaggagataatatcattacttgatagctatctaaacacttacgatattgacgatgttaagctcgatgaattcctggattttgttgctgaggctaaagcagttacaagcaaggaaaagcttggtgtccgtattcagaacttgcggtatgatcagtttgatagtttttctgtgcgttgttaagatcttttgatttttttggatgttgaattgaagtttggttacaagtgaatgaatctggtttttaaggaatcactagattattgtattagttggttgtatatgttcgcattagctgattttatttgtttaatgcattttataggatgtatgtatctttcattcaagatgcgaagagacaagaaggcgaaatattgaagatcgtattgactgaactgcatcagaagtatcgcatcctctcatcaaagaaacaacggcaagataaggattattgtggcaagcatacaagatttaattcaccgagctcggaggaaaatgatagtgctgattatgaggttgaaaatgttaaaagatctgaccatttcagtagttgtccgtattcatctgctgaagaagaggttaagcagcttgggagctccagtaagaaaaggaaggctgaaagtcgtaatcatgaaaaatctgattctcccaagctgcttagaagaggcccctctaagttgcgtagaggacatgtgaaacaaaagatacctaaatcggcagatgattctgatgcgcagattttcagtgtcaatgacgctgatttcactctttctgaaggagctttgaaattgttcatctcaacttggaaggaaacatgtaaagagctaagcatctcagtggtaagtccatgttgggtatatcgagattggatgactgttttaatcatatatcagatatatctctttgctttaatctgacggtgaattatcataggcgatgagtggtgaggctgtatgttttaatcctctaatactcttttatttttgtagtttgtcaagaaattgttgtctttttacaacttggggggatccgaagtacacggtcagattaaaatagctacagctgtgtcctcatttccatttgttggattactacatgtcgctgtgagttagtggtcatattttcttatacgggatttcacctttgctattccgatttacacccaaaatcattttctactccactgttccagtttacttgcctttttatcgtttttctctcctttgttatttttttccaagttgaaaagatagtagatattttcactgtgtaacccaggccagactgttttttgtgatacctccttttcaaattttgagaaatttgctggattcagaagctagacgatttccacccatactttttcaacttcttggttttaagctattgctcttttttttctgttgcttcttgtgtttattttttttctgtgtggttcaagcctcattgctcttaatctgagacttagcacccagttgtcaagtcttggtattgagttcagaaaatgtaaaaagcttccctaattcagctttgctctttgattctgcatgtgcacatcaatatgtcactgaggcaggctgaaaaaggataaaagttgcgccccttgtcgcctccagtcccgaattcgtgtacatgttttcgtctaaaattaattgatggaaaccttccaatatcccaggttgcagattctgtcctttgaatttgaaacatctgtaaaggaatgtctgaaactgaaacctggtttcatttctgaaaatttcccccttgttatttccttttacatctgaatttgacatgtagtttgtctcaatatttttttacacctggtttggagccttctgcaaaaagcttctagctcactcttccagaagtgttgcattgtctttcttcaaatatcgttgttttagtgggaaatctgtttcaatctttcattgaatatttatctcgcttttataatctttcatcatttcgtttcctttgctgaaggataaagttgcatatgcccgtaatagaatagtaacttcgtttttttttcccttttaatcagaaggagcttgtaacagaggctcttgaagaacagataccgactgaaatcacaattacaaacttggttgctggatataatgattgtacaggcacaaggtcccgagcgaatatgccaaacccgacgaagagttgctcaacgccagtgactcttgctcataattccgtctcaactgacttcagcataagaaatcagcttcataccggcgcactttgggctgcacaggcgcaagagtccggtaaaaaaggtgaagaaatagcttacagatactttgttgcaaaatatggcaagaaggcactggttaaatgggttaatgagcatagtgaaaccggattaccttacgaccttatcatcgaaaacagaggaggtaacaaagagtacgtagaggtgaaagcaactgtatccacagggaaagactatttcaatttgtcagtgaaggaatgggagtttgccaatgagaaaggagagagttacgttatagctcatgttttattaggcaacagtaatgccatcctcacacaacaaaggaatcttgtcaaattacgccaagacggtcatctccggttattgattctcatgcctagccagcgaaacgaggtcaacgttgcattctaaaccccaattgagttttttttgtttccatttattttgaaaatactaaagagtaatttattaagtttaagactaattttttgttttaaccttaggtattactctttttttggtttcaacatccggaatttggataggtgataatattataaagaaaaagaccttttccaaattcaaaccggttacttgaacatgcatccaagagatttgattttgtaaattagatacaaccgtcaaggattgggatagggaatattcgaaaatcatccccaaaataagaacagactgtgaaaatgctgcttccaaggaattatcatgtgaagtttccgaattcatacgcatatgtacatataagctaacttgtaggcaggaggaacaagattgagattggtgagttggctgtggcgtctggagttttacaaagctgtaaactaagacagctaaaggatcaagtctgaagaatggtttagccaaaaagcatcagaagaggaatattttgctcgattctttattccttcaaattcaatacaccaacgacgaggctacttgcttttccttcgagtagccatcttcgttatcaatcatcgtcatcatctagtttatataaagatcaaacctttgaccatttataccgtttttgtgtcccagactcaaagcaattattttatcctttggtatgtcctggaattttattttattttggccaccacaaatcagttactatggctaaaatctgtgtcttcttgtagtgttactgaatcagggttgatgggggattctcctgctagttcaaatagagttaagcttcgggatgggagattcttagcttataaagaaagaggagttccaaaggaaaaggccaaatacaagatcattcttgttcatggctttggaagctccaaagatatgaacttctctgcctcaaaagtaaaaatgcttaatatcttgtctggatgtttgaaacgcctctgcttttatatttgttatccttaaaacaaacaaagaatgggaaaaccctcacttggatttagttttttcaggagcttatagaagaacttgaggtgtacttgctattctacgaccgttctggatatggagcatcagattcaaacacaaaacgttcgttggaaagcgaagttgaagacatagcagaacttgcagatcagctggagttaggacctaagttttatctaattggaatttccatgggatcttaccctacttggggttgcctaagacacatacctcacaggcaatttaaccattcctgaaacccttaaggataagttgtaaacagatgagaaactattccgttgtctttgcaggttatccggcgtggcttttgttgctccggtggttaattatcgatggccttcacttccgaagaagctaatcaaaaaagattataggacaggtattatcaaatggggtttgaggatatcaaaatatgcacctggactgttacattggtggatcattcaaaagctcttcgcttcaactagttcggtccttgaaagcaatccggtctacttcaacagccacgacatagaagtgctcaagcgaaaaactggttttcccatgcttactaaggtcactcctagttttcttcagtttgttgtgattgatcagctttggcatgattatatatctctaccttacaggaaaagctacgggaaagaaatgttttcgatactctaagggacgattttatggtttgtttcgggcaatgggacttcgaacccgcggatctaagcatcagtacaaagagctatattcacatctggcatggtaaggaagacaaagttgttccatttcaacttcaaagatgcattctgcagaaacaacctttgatcaactaccacgaaatcccccaaggcggacatctgatcgtacactacgatggcatttgcgatacgattctacgtgcactattgctcaaggaagaacaacaaaagctgtataaaataaattgatttgtaacagattctgtgtttgattgattgattcagttctacaaaacaaagtatgttcaaagtgtacattgtacaatgacaatatatatgtgtataatataaagtgtttgaatcaatgaatgtattagtgaaacaaagtaacatttgagatatttgtgcaatcagctgcttctgctatttggattttcattgaacaaataatcaaaacgtgaatcgccgccgccattaccggagacaacgagcttcaacagatcaaccgctttcttccttcctttcagactaccattctcagctacatacacgatcccttccatggctccttcatcagcaccagacgcaaccgccgccgcaacttcagacctcgctgcagctcctccacatctcgccagattcaaaagcgcaccaacggagttctctttgatccgtaggctcgaaccagtgcaaggatctaacagatccgctagaacgttagctcctgaaactctcctcatcccgtcctcgctatcttcgcatccagcgacttgcgccataaccgccgtcgcatcttcaacgatcccgcaccgcgaatctttcacgatcagcgaaaacagagccggaatcgcgccgagagagatcatcgtcgatcggttcatcggatacagagcgatcgcgaagagtgccttgagcgagtctttgatcgatcgaggatgcgaatctggatatctaatgatgtgaatgagggagaagatgatatcgcgcttagatccgatgataggtcggtaagactcttcggctatcaaaaggctataaatcgtagcggcggaggattgaaccgcggcgggggaagtggtggtgtcgtgatgacgaagcgcgtgagaaagcgcgtcgagtaagccgcgtgaagacattaggggttcgcgagaggtgattgagaggttgaggagagtcgcggcggcgttttcctgagaagagtgtgacgacgagtaaagagtctcggcgaggtacggaatagctccggcgtcggcgatgattagacggctatcaggatcttgtttggagatgagtctaagctcagctaaagcagcggctctggtttgctcagagacagagctaagcctggagacgattgttgacatggttctacgctttgctgtttccattgagaagattttgatgaaatagagaacaattctctgttttttatctttatcttcaaaccctaattatcgtttattggatgatggagttacgactttttgttgaacaagccacttgtattaattgtattaaagagtaaacaagaatgaaagagtcattgataattcatctaagtgggaattaaaggtcttaacttttttctttcgtcaacaaaaaggtacaactttgtctttttataccagaattgtacttctttatccaggattcaggaacatgtgtcagatctttattccataagaaaaacttgatcgtacgaaaaaaattcatgctcttgttcttgtacttgtagagatatttacgtttctgtttaaaattgaaaataattgaaattaaatttcagtcatcctctccaaagcattcgtgaaattaaatttcagtcatcctcttgtactgtcgaagagattcaacattcatttttttcgtggtacgttaatttcatagtagcataaaactataattaaaagaagaatgtcgaaggaagatcctatcttttctctagtacaactttaaaggaaataggtgaaattacgacagacaatgaaacttggccttttagttatacaaagtttcattccattcagaaattggagaagtggttccgagatgactgaacaatctgcaaatccgtcgtcgtttgacaagaggtttcatcactcatcagtgtcctattcacattgataattcccgatatcaaattcatattttagcattattatacgtctatgaaatgtatatatgcataaaaatgtgtcttactctcgtgggcgtgacaaccaaagggagctaagagctctgagccgtccatagtactctccgatgactaggaaacaccgtgcagcttgtcggacggtcaagatccgcctcagctggtgaacggtctgctgcctcaagttatcagccttcatttagattaataatagaaagaaaaagattacagttagtaatcacatcttttgacattttaagattatttcaatatttcttttggtaatattattaaaaactaataattataattgcatacctacttactaccttggtgggctaatgggtattacaaaagtcaatacatatcaataacaatcaatttgatcataatgtttgaaaacaagaaatttttttaaaatatttttgttgagttcaaaacaaaacattgaaagagatggagaatacttttaacatattctctttgtctttttttcagctatattatatataaaaggtaaaaacaagttggtgaaagaaatttggctcttggaataattaaatcaaagaccaaaacaacatataattattatagaacatcaaatgttgctttcacgtattgtctgtttctggattatttgtttttttttcaattagataatttagccagcacatacgtttgttcatatatgtacgcaaaatatatgcacgtatttccgcatttttaaacatttgtacatctagtatatatataaaacgttaaaatttacccaatatatttctaaaaaatatattcgaattcctctctaactataaaccaaaatacgttgcaaattttgtttagtcaaaaactatctacagttatatagtaggtcaaattttgtgtatatttcacacggtgtttttttctctcgtttgcattcgtttgtaattattgttcgagcaaatgaagtaaaaaaaaaaaaaagataggtgagaaaatggaacctggcggataaagccttcgagattagagatctttccgagagcgacagccatttgttgcattccgtcaatgactggagatgcggcgagagtatcgatgagagattgctgaagttgttcgaggccttgcgagagagcctcctctgcttgttgcgacgagtgttgtaggctatatattcccatcagttgttgctccgtcaatagatccatttgcgacaccaatatctaagatcacatccctttctttagttaatcatgattccacaacttttttatcacacgcaaataattaaaccgaagaatactcatttctgtttacattttgcagcaatgtttcagatttgttgatgtaatttactaacgtgaatatcattttgtttttcaaacgcaaaacctaaaacttacgtttgtaatcatggggtaaagtaaggaagaacaagtcgaaccttgattaggtcggatggacggaaaccagccatccaaataaaacaacgttcggctggggacatccatgtcccaatgatgaggtgaaaaacatcggctttcgctgccacggcttttaatcggaatatctcatcaaaatgagcaatgtaaccgtcaacgatcaaccttaaatcattgtcagataaatgagcctgaagaccggttcgaatctccgacatatgccggttatcatcctctagccatctcccatattccatgtcaaatattgcagctcctacgtacattcgattttcaacattttgttaataatagtttaaccattattgtacttattttaatacaataatacattgcaattggtgttttaggtttcaagtaccggaagtgatgttaggtcctggtggtccacaaccacccatgaacagcccctaccatcgacataaacaatatattaatttcaacaaacagacattattaataaccaatgaacaattgagaaacttagcaaatgacaggttttgacaaatttaaaaaaagatttagcagaatatataggattataggaatataaatgattcaatttcaacctgagaacgagctcgctgaagttcttgctccaattgggaaagctttatcctacttgattctagctgttgcacatacgcctgctcaaaccatatgtatatgcatttgttattttcatactagtatcattacatatagaataacaagaaatgcggaacttatacgttcataaatgaattatagaagactggtaaatggtagataaagaaataaatgctcatgtaacagcggtttccaagaagaataaaagacaccactgcgtatgttttactagtagcaatagcattattgtaattctatgcaacaaattatcatttggaaaaagtagcaaagaatatataaataggtcaaaaaaacaaaaacaaatgataataatttgaggtgaaaagtcaggcaattatatggtcatacctttttcctaagacggcttttgcgagcagcttctctattttgggccaaacgtctcaacgtctgcataatccagatttaagaacatttaaacaagaagttaacgaattaattcaggtaaaaaaggttactaaaaagtaagtacatatataggaatggatatgtctcctcgggggagtcaaataaaatgtataggaaatgatgatgatgaaagttaaagtaccttagcatcaagctgtttgcctgaagttgtagccttcctctgcaatgtcagagaacagagatgaaaatagaaattcattcagtggaaagaaagtaaacataaattaaattgtgtgagtgaagtcgactcatgtgataaatatttaaataccatttacacacaattaaaaaaacagcattattaaatacttttttttaatgtaatattaaatctaagcaatatgaactcatttagggaatatatgtgttgttaaagtaaacatagaaatgaggatatgtaatcatgtagtaaaaagtaaattataaaaacaataataacacctaggaagattcttctgctttattccgctttttggggatttcatttaataatttgtattttaaatttgtctgttttcattattttatcaacgattcgagaggtcaaaattctgaattttctctgatccgtttcctttttgggatctgtgtatgtttttgttttattggaaagatttgttaggacatagacatatatgaaaaagcatgtgcatgcatatctatcaaatgacaaggagagagagagataggctaatgatatacataccatgtacatgcaccaaattaagcatgcatgtttcatgatgactccaagtacgtaccatgcatatatctctttctaaaattaaattttaaaaagtgatgatgatgatgatgatgatgatgatgatgatgagtaccttatcttccgaaggtttaggaggagctaaagttcgagaagtggaaggaagtccagatgttgaacttgagtttgccatgttattatgatgaggttgaagcatgagatgatgtttgctactcataggagactccggttgttgactttcagctttgccggagaaattagccgatcctgaatcgctgctctctcctcctgacttggaactctcctgcaatacatattcaacataatcatactcatcatcattaacgtataagataattaataaaaagtcagaaaagggataatcaatgtaactaaggaggaattgaccttagcgtatataatttgacaaacggggtactataagtttatgtaatataaaataaagtcaagagaaaggaatggagtaattaactactctaaaatcgctatcagcttttgagttgaaagaagcaaaaataagagatagtaagaggaacaagaaagctgaaacatgtatataaaagtgagggtaaaatgaaaatataagttttaagtttaaataggaatgccgaaaaaggagaaaaaaacaagaggaaagggtcaaagaagaagaaagggtacagtaggaagagtttggtgagttctgattggccacgaagggaacatctccagagtcgtagctcctcctcctcctcctaataaagctgcaattttacccatcattacatttatcagatatgtaatgttcatatgtaatcatgtagtatgctagctacttattaaatgtgtgcatgcatgtatatgtgtttttgatgtaatttaagtagtactacaatatattctacttagaactaactacatcatttatcacgtggaatctatatataacatgacacattttactaatagtataattatgaatattttgatatagaggaagttagggagttggtaaaagatattttcttcttttcttattttctaaataaagagaagagaaatagaaaaacaagtcacgccatccaaggctctcttttgcctccgtatcatcacctaaacctatctaaagacttgttcagactactctcagctttttattttgttttttccagtttcagttttttgctcagaattttaaaaactttattggagtttgttaaggaaagctcacgtcatgaagatttgagagagagaggggggcttacgtggcttggcttcctcgttcctatacttgacaccttgcagaacaattgcttcttctagctctccaaaatcgaaactggacgatccatcttggttactgtttcatttattaatagtattgtttaattagtacaaagagaatattcatcatgtgttactacaactatacaatcagaaaccaagaaaaattggagaccaaaaggaacaacaattaaattaaaatataaatacttgattagagggtcgcattttgagttagaagattaataaagacggtcgcatataatgaaagtttacacaaaagctaaagcacatataaaacctatttcggatgatccataacacattttttagtttctgttttacctatagatttccgttgaccatttcatatctcataaatgaaaccgtataacatatcataatactactaagaaaatgacaaattgagaataaacaaagaaaacccatataaaattcaattagagctcaatattaagatatgtaatatgaataaagttgagctttatgtatatgtaaagaagaaaagacgaaggaagatttgttaattacatgaaaccagaagatggatgattgttgttgagaccatgaataagtgaataaggaagatgatgattgtggttatggtttgtagcttcgctcattctatggttcgccatctctactcaagaaaacagcttcaattgatgatatctcttcttgattagtctcttttctgcaaaacacattaaatcttgaaatgatgaaaaagatgataatcactattgagagaagctcgagttaagaaacacaagagagaactagctagggagagggagagggagagagattgcaaagtcttataattaattcttgattagttgatcaaatgattggaatttgaaaagaaaaagctagttgatgatatgaacatgaaagtaagatatctatgtgtttaccttttgtgatgttttgcttttggtgtttgagaacaaagaggagagagagaaagtagaatggaagctttctcgtcaaaggcttttttatggctgaacagaaaaacaaaagagggtccaatcttttctctttccgagatacatatacaaaattatgtgggcgtgtatatatttgtagttggatagagaaatgataataaagtattagtaattgactaatgtatagtatcattactctttctctctttattactattctctctatacttgtatgtgaagaaacctttgtgattcatcatcactctctccttttcaccacctttctctatctatttccatagtaaacacaaattccacttgctaaatttcaaaattttattgaagaaaacaataaagaaatattgataatttttcatggtaaatcagacgaagatcttgtccttcctagactttgtctccaggctatatttatgtgttgcatttttttttgttttccaaataataatattgggttcaaaaaagttgtacagaaaattgaaaatttagttgactaactttatagctgtcaagggtgaagctagtacttggcaattgatcagatggagtggacgatctctattcatacacaaacctgaaatgtagaagttaaacagaaaatcaaaagtctaagagtgcttaattaaaagagctttatccttgttaagaaaaagaatggagctttatctttggtaaagaataaaagagccttatccaatatgtagaagataaataagatgattggatataagattaattggaccgatcacaagaaaatggaggtagattattaagaaaactatcgacttctctaggtagaaaaaaattgagcgagaagaaaattaaatgagagtttgtaatttagtccataaaataaaaatagaagaaagagagcagaaaaagaggaggaacccactagaatcactgactcctactccacaatctctctctctctctttgtaaccgcctgtttgtgcttattggctctttttcatcaaatctctttttgggcttattcacgtacacattttttcaataatctatcatcttttctgtagtattattcatcgtattcacgtacatgcctatatcaaaatacgtatctgtatatgtgaaagtaaagtggtgaaatttgcataaaagaattgggtttcactctatcatcttagcagcatggatcatgcatgaagttattttttctaagtagtctgtgtgttaatctaaaaccaaaagaaaactaacaggaaaattctagaattatatcaagaatctttgaatgggcatgatatatacagcatatactttatatttttgccaaaaaaaaaatgatatatatatctttagtctagtaaacaaatatatactataactaaatgatcgaatacaactccccagctatagtttaagctaaattatatatattatttggatgatctaatgagtttgttattggaatagtactagagatagtgatgaaataatgttaatacacataatcataaattcataatcaaagacaatgcattaatgtgggataaggaatgtttgttgatttgtgtatgtatattaaaatagcagaatcgagtgagtttctatttctaaactacaactctttttgttaaatgacctttgagacagagagagggataagaatagtatgaatataatacgtctacttatatgtaacacactatacataattacagatttttttttagtttcatcttcagtctataaccttttgaaagccgagagtgataatatgtgaaacagtttctgaaagttttttcttcttctcaaaaattaacagcttttaggctttaagtttcaaatttggatataatagaactagagcaactttctctagtcggttaacctaacatacttaagtattgaataattaactattttgcctctaccagttcaaccaaaaaagccttagaataatgacaattatgtagaccaataagataaaattaaacggccttcttgcattaatcgtaaataaatatagaaaatagcattaaaattatcaataattattgtaaacatctcaatcgagtgttatttaaattgattagtttggtattatcctataattttgttgatcggtcaacatccactccctgtcatcacctaaatcctaatgccacatttcagattcctttcctttattagaaattgttatatgcctcctttgattcgtatagctgttttagtcaatgcagctctcttgcaaatccacatttgtcatggctttattcctttagtttgtgtcataatgaccccctccgaattgagaatttatttttcacggctctttagatgctttttttgggttcggtagaagtatataactcacggttaagcttttatagaatctcaatattaatttgtccatcaaggcatcaaaataatgtttagattaccatctcagcccaataccggccataatcttatatggaggatgcatattattatgtagacatcaatgatcaatcactttgggacaactactcaagctcgttttctaacgaattgggatttttgaattacttactcaaaatagtgtagtcggttttggtctagcatgatctaaaaagtccaacaagccgagaggcccaaaaccctaatattcaaaacttcgtggcctaaatgtttcatcctgtgtaattttcttcaacaaccattatcttgggtgaaaattgtcaaatttgcatattttccattattgtcattgactttctgattcggtaacagtcatatgatgtaaaaatgggccacatccttatttggtttgcttcaggcccatattcgtttgggctgttagattgtagcaatggtacaaagatctgcaattgatgtaatttaaccttggttaatggtgtaattttattttattttgttggggtcaaactgaaagcctcaaaggataagagtttttttctgttttttttttttcacacttttttttgttttgttagaattcataaaagggtaatataaacttgttaaaaagaaatacagtagatacgtcatatatacagaaaaagtaagagagacagatgttatcaaataggggggagtaaaacccactctaatactacttgttatgcttaaatataaaaatgaataaaagacttggaaatcaaataaggaagtgagtgattcccacgtcgcaccttcctcctaacccttttcttcatcgccactcaatctttctctctgcaacatcctctcttgtaacgtgtaacttgccaaccttttcttttttattaacccaagttcgttgccggccattaccaattcctttatcccataatctcttctctgcttccttcttccatcacattccccaaaaagtctcaacacagagcgagaagaagactcaggttttgcgagaggagagatagagagacttagaaagctcggtaagtccgaactttggtggttcggcggctctacgtcgtctgtaggtcgagtcgtcctggagctcgcccgttgtttctcgacggcggaggtggaagacaacgaccgaccagccatggacattggcggtccaaccaatatccgccacgtggctcacgttaccttcgatcgcttcgatggcttcctcggccttccctctgagttcgagcctgatgtccccagaaaagctcccagtgcaaggtttatatatactttcttcttcttcttctttaaactcattgagaattggttttgagagatttagatttcatatcatcatcttgtttgtgtttggcagtgcaacggtgtttggggtatcgacagagtcaatgcagttatcatacgactcgagagggaactgtgttcctgtgatactgttgctattgcagagccggctttatgatcaaggaggcttgcaggcagaaggagtattcagaatcactggagagaacagcgaggaagagtttgttagggagcagcttaataaagggatcatacctgatgggattgatgtccattgtttagccggtcttattaaggttcttgttgtgattgtgaatcaccttacctttgtttttgaaaatggtaggcctgagtttgattatgtatgtgtgtgtgggttcaggcttggttcagagagctgccgagaggggtactggatcctctgccatcggagcaagtgatgcagtgtgagtcagatgaggattttgtcaaagttgtgagacttttacctcaaacagaagcttctcttctcaattgggccatcaatctcatggctgatgttattcagtttgagcatgttaataagatgaactctcgtaaccttgctttagtctttgcccccaacatgtctcaggtcagtctttttttattaccaacactaaaatgcacaagttacactctcattaagcatgtgtttgattaatggctgcaataaatcaccgtatagagagctaatatgacagttaaatagcagagcatgattctacaacttcggaggtttgaaatgtattggctctgttttggtttttgtgtgtagatggcagaccctttaactgcattgatgtatgcggtccaagtgatgaagttgctcaagagcctcacagagaagactgtgagagaaagggaagcttcctcttctgtggttgacagaagatgtagcaaagaagccgaagatggcgagaaagaaaaagacaatgaagaggaagaagaagatgaagaagaggaggaagaagaagaagatgaagatgaagatgaagaagaagaaggagatggtgtgtacataattaaggaggaagaagcatcagagataataaaagtggttgctgatgaacacaagtcaggaagcataaagagtgagtttgagggatctagtgctacggattcaaagggagataatggagttgtgcagccacccatttgcagctcgaacccgtaggaagcaagtgaagttgatgctttttttctttttagtttactgtgtgttttggattgctttatttgattgcataatgcatatgtaacttctaagtgatgtagtttgttgttgaatggtgatatgaaatgaagactaactctgtgggatgaacaacataatgtatctctgcttttcatatctagtaagatcatttccattccttaaaagaaacatgaaagagttaacaactaaaatcaaaaagatactaatacagagatgagtcgcatgatgaaaggaagaggaccctttagttcttgggagttattcaagcttgacagaacgatagatgtggcgaataaacatcaaagaagccaagaaacttatggttccaagaaccaagaagagggcgtaacataacaaagcagtgtatcctaagtaaaagctcagctgcagaaatccagtcatgtctgacctgagatagaacaatactccatacccatacatgaacaccgctgtgaatcctccgcacaatatcgatctgcaaagaattttaatagtatcgtctataattttagtatgtccctttggaaattaagtgattattctaaaagcacaatcatgtttcacatttttcctactatgaccgtttcaatctatatactcaaggtaaatatgtatcaggtgatggattctcatcatacatagtcaatcaaatccacatgtttggatagaaaagaacgcagtacagtataagaatacgtacctccaccaccattcatgatcttcaccggatagctgaatgtaggtcaagataataccgacactcgaactcaagaagataagcacaatgaatgtaaaaagcattattccaggcgaggtatatatcttaaatccccacaagctt

SEQ ID NO: 20 - DNA, 89493 bp, Arabidopsis thaliana
caagcttcgggatgggagattcttagcttataaagaaagaggagttccaaaggaaaaggccaaatacaagatcattcttgttcatggctttggaagctccaaagatatgaacttctctgcctcaaaagtaaaaatgcttaatatcttgtctggatgtttgaaacgcctctgcttttatatttgttatccttaaaacaaacaaagaatgggaaaaccctcacttggatttagttttttcaggagcttatagaagaacttgaggtgtacttgctattctacgaccgttctggatatggagcatcagattcaaacacaaaacgttcgttggaaagcgaagttgaagacatagcagaacttgcagatcagctggagttaggacctaagttttatctaattggaatttccatgggatcttaccctacttggggttgcctaagacacatacctcacaggcaatttaaccattcctgaaacccttaaggataagttgtaaacagatgagaaactattccgttgtctttgcaggttatccggcgtggcttttgttgctccggtggttaattatcgatggccttcacttccgaagaagctaatcaaaaaagattataggacaggtattatcaaatggggtttgaggatatcaaaatatgcacctggactgttacattggtggatcattcaaaagctcttcgcttcaactagttcggtccttgaaagcaatccggtctacttcaacagccacgacatagaagtgctcaagcgaaaaactggttttcccatgcttactaaggtcactcctagttttcttcagtttgttgtgattgatcagctttggcatgattatatatctctaccttacaggaaaagctacgggaaagaaatgttttcgatactctaagggacgattttatggtttgtttcgggcaatgggacttcgaacccgcggatctaagcatcagtacaaagagctatattcacatctggcatggtaaggaagacaaagttgttccatttcaacttcaaagatgcattctgcagaaacaacctttgatcaactaccacgaaatcccccaaggcggacatctgatcgtacactacgatggcatttgcgatacgattctacgtgcactattgctcaaggaagaacaacaaaagctgtataaaataaattgatttgtaacagattctgtgtttgattgattgattcagttctacaaaacaaagtatgttcaaagtgtacattgtacaatgacaatatatatgtgtataatataaagtgtttgaatcaatgaatgtattagtgaaacaaagtaacatttgagatatttgtgcaatcagctgcttctgctatttggattttcattgaacaaataatcaaaacgtgaatcgccgccgccattaccggagacaacgagcttcaacagatcaaccgctttcttccttcctttcagactaccattctcagctacatacacgatcccttccatggctccttcatcagcaccagacgcaaccgccgccgcaacttcagacctcgctgcagctcctccacatctcgccagattcaaaagcgcaccaacggagttctctttgatccgtaggctcgaaccagtgcaaggatctaacagatccgctagaacgttagctcctgaaactctcctcatcccgtcctcgctatcttcgcatccagcgacttgcgccataaccgccgtcgcatcttcaacgatcccgcaccgcgaatctttcacgatcagcgaaaacagagccggaatcgcgccgagagagatcatcgtcgatcggttcatcggatacagagcgatcgcgaagagtgccttgagcgagtctttgatcgatcgaggatgcgaatctggatatctaatgatgtgaatgagggagaagatgatatcgcgcttagatccgatgataggtcggtaagactcttcggctatcaaaaggctataaatcgtagcggcggaggattgaaccgcggcgggggaagtggtggtgtcgtgatgacgaagcgcgtgagaaagcgcgtcgagtaagccgcgtgaagacattaggggttcgcgagaggtgattgagaggttgaggagagtcgcggcggcgttttcctgagaagagtgtgacgacgagtaaagagtctcggcgaggtacggaatagctccggcgtcggcgatgattagacggctatcaggatcttgtttggagatgagtctaagctcagctaaagcagcggctctggtttgctcagagacagagctaagcctggagacgattgttgacatggttctacgctttgctgtttccattgagaagattttgatgaaatagagaacaattctctgttttttatctttatcttcaaaccctaattatcgtttattggatgatggagttacgactttttgttgaacaagccacttgtattaattgtattaaagagtaaacaagaatgaaagagtcattgataattcatctaagtgggaattaaaggtcttaacttttttctttcgtcaacaaaaaggtacaactttgtctttttataccagaattgtacttctttatccaggattcaggaacatgtgtcagatctttattccataagaaaaacttgatcgtacgaaaaaaattcatgctcttgttcttgtacttgtagagatatttacgtttctgtttaaaattgaaaataattgaaattaaatttcagtcatcctctccaaagcattcgtgaaattaaatttcagtcatcctcttgtactgtcgaagagattcaacattcatttttttcgtggtacgttaatttcatagtagcataaaactataattaaaagaagaatgtcgaaggaagatcctatcttttctctagtacaactttaaaggaaataggtgaaattacgacagacaatgaaacttggccttttagttatacaaagtttcattccattcagaaattggagaagtggttccgagatgactgaacaatctgcaaatccgtcgtcgtttgacaagaggtttcatcactcatcagtgtcctattcacattgataattcccgatatcaaattcatattttagcattattatacgtctatgaaatgtatatatgcataaaaatgtgtcttactctcgtgggcgtgacaaccaaagggagctaagagctctgagccgtccatagtactctccgatgactaggaaacaccgtgcagcttgtcggacggtcaagatccgcctcagctggtgaacggtctgctgcctcaagttatcagccttcatttagattaataatagaaagaaaaagattacagttagtaatcacatcttttgacattttaagattatttcaatatttcttttggtaatattattaaaaactaataattataattgcatacctacttactaccttggtgggctaatgggtattacaaaagtcaatacatatcaataacaatcaatttgatcataatgtttgaaaacaagaaatttttttaaaatatttttgttgagttcaaaacaaaacattgaaagagatggagaatacttttaacatattctctttgtctttttttcagctatattatatataaaaggtaaaaacaagttggtgaaagaaatttggctcttggaataattaaatcaaagaccaaaacaacatataattattatagaacatcaaatgttgctttcacgtattgtctgtttctggattatttgtttttttttcaattagataatttagccagcacatacgtttgttcatatatgtacgcaaaatatatgcacgtatttccgcatttttaaacatttgtacatctagtatatatataaaacgttaaaatttacccaatatatttctaaaaaatatattcgaattcctctctaactataaaccaaaatacgttgcaaattttgtttagtcaaaaactatctacagttatatagtaggtcaaattttgtgtatatttcacacggtgtttttttctctcgtttgcattcgtttgtaattattgttcgagcaaatgaagtaaaaaaaaaaaaaagataggtgagaaaatggaacctggcggataaagccttcgagattagagatctttccgagagcgacagccatttgttgcattccgtcaatgactggagatgcggcgagagtatcgatgagagattgctgaagttgttcgaggccttgcgagagagcctcctctgcttgttgcgacgagtgttgtaggctatatattcccatcagttgttgctccgtcaatagatccatttgcgacaccaatatctaagatcacatccctttctttagttaatcatgattccacaacttttttatcacacgcaaataattaaaccgaagaatactcatttctgtttacattttgcagcaatgtttcagatttgttgatgtaatttactaacgtgaatatcattttgtttttcaaacgcaaaacctaaaacttacgtttgtaatcatggggtaaagtaaggaagaacaagtcgaaccttgattaggtcggatggacggaaaccagccatccaaataaaacaacgttcggctggggacatccatgtcccaatgatgaggtgaaaaacatcggctttcgctgccacggcttttaatcggaatatctcatcaaaatgagcaatgtaaccgtcaacgatcaaccttaaatcattgtcagataaatgagcctgaagaccggttcgaatctccgacatatgccggttatcatcctctagccatctcccatattccatgtcaaatattgcagctcctacgtacattcgattttcaacattttgttaataatagtttaaccattattgtacttattttaatacaataatacattgcaattggtgttttaggtttcaagtaccggaagtgatgttaggtcctggtggtccacaaccacccatgaacagcccctaccatcgacataaacaatatattaatttcaacaaacagacattattaataaccaatgaacaattgagaaacttagcaaatgacaggttttgacaaatttaaaaaaagatttagcagaatatataggattataggaatataaatgattcaatttcaacctgagaacgagctcgctgaagttcttgctccaattgggaaagctttatcctacttgattctagctgttgcacatacgcctgctcaaaccatatgtatatgcatttgttattttcatactagtatcattacatatagaataacaagaaatgcggaacttatacgttcataaatgaattatagaagactggtaaatggtagataaagaaataaatgctcatgtaacagcggtttccaagaagaataaaagacaccactgcgtatgttttactagtagcaatagcattattgtaattctatgcaacaaattatcatttggaaaaagtagcaaagaatatataaataggtcaaaaaaacaaaaacaaatgataataatttgaggtgaaaagtcaggcaattatatggtcatacctttttcctaagacggcttttgcgagcagcttctctattttgggccaaacgtctcaacgtctgcataatccagatttaagaacatttaaacaagaagttaacgaattaattcaggtaaaaaaggttactaaaaagtaagtacatatataggaatggatatgtctcctcgggggagtcaaataaaatgtataggaaatgatgatgatgaaagttaaagtaccttagcatcaagctgtttgcctgaagttgtagccttcctctgcaatgtcagagaacagagatgaaaatagaaattcattcagtggaaagaaagtaaacataaattaaattgtgtgagtgaagtcgactcatgtgataaatatttaaataccatttacacacaattaaaaaaacagcattattaaatacttttttttaatgtaatattaaatctaagcaatatgaactcatttagggaatatatgtgttgttaaagtaaacatagaaatgaggatatgtaatcatgtagtaaaaagtaaattataaaaacaataataacacctaggaagattcttctgctttattccgctttttggggatttcatttaataatttgtattttaaatttgtctgttttcattattttatcaacgattcgagaggtcaaaattctgaattttctctgatccgtttcctttttgggatctgtgtatgtttttgttttattggaaagatttgttaggacatagacatatatgaaaaagcatgtgcatgcatatctatcaaatgacaaggagagagagagataggctaatgatatacataccatgtacatgcaccaaattaaagcatgcatgtttcatgatgactccaagtacgtaccatgcatatatctctttctaaaattaaattttaaaaagtgatgatgatgatgatgatgatgatgatgatgatgagtaccttatcttccgaaggtttaggaggagctaaagttcgagaagtggaaggaagtccagatgttgaacttgagtttgccatgttattatgatgaggttgaagcatgagatgatgtttgctactcataggagactccggttgttgactttcagctttgccggagaaattagccgatcctgaatcgctgctctctcctcctgacttggaactctcctgcaatacatattcaacataatcatactcatcatcattaacgtataagataattaataaaaagtcagaaaagggataatcaatgtaactaaggaggaattgaccttagcgtatataatttgacaaacggggtactataagtttatgtaatataaaataaagtcaagagaaaggaatggagtaattaactactctaaaatcgctatcagcttttgagttgaaagaagcaaaaataagagatagtaagaggaacaagaaagctgaaacatgtatataaaagtgagggtaaaatgaaaatataagttttaagtttaaataggaaatgccgaaaaaggagaaaaaaacaagaggaaagggtcaaagaagaagaaagggtacagtaggaagagtttggtgagttctgattggccacgaagggaacatctccagagtcgtagctcctcctcctcctcctaataaagctgcaattttacccatcattacatttatcagatatgtaatgttcatatgtaatcatgtagtatgctagctacttattaaatgtgtgcatgcatgtataatgtgtttttgatgtaatttaagtagtactacaatatattctacttagaactaactacatcatttatcacgtggaatctatatataacatgacacattttactaatagtataattatgaatattttgatatagaggaagttagggagttggtaaaagatattttcttcttttcttattttctaaataaagagaagagaaatagaaaaacaagtcacgccatccaaggctctcttttgcctccgtatcatcacctaaacctatctaaagacttgttcagactactctcagcttttatattttgttttttccagtttcagttttttgctcaaattttaaaaactttattggagtttgttaaggaaacctcacgtcatgaagatttgagagagagaggggggcttacgtggcttggcttcctcgttcctatacttgacaccttgcagaacaattgcttcttctagctctccaaaatcgaaactggacgatccatcttggttactgtttcatttattaatagtattgtttaattagtacaaagagaatattcatcatgtgttactacaactatacaatcagaaaccaagaaaaattggagaccaaaaggaacaacaattaaattaaaatataaatacttgattagagggtcgcattttgagttagaagattaataaagacggtcgcatataatgaaagtttacacaaaagctaaagcacatataaaacctatttcggatgatccataacacattttttagtttctgttttacctatagatttccgttgaccatttcatatctcataaatgaaaccgtataacatatcataatactactaagaaaatgacaaattgagaataaacaaagaaaacccatataaaattcaattagagctcaatattaagatatgtaatatgaataaagttgagctttatgtatatgtaaagaagaaaagacgaaggaagatttgttaattacatgaaaccagaagatggatgattgttgttgagaccatgaataagtgaataaggaagatgatgattgtggttatggtttgtagcttcgctcattctatggttcgccatctctactcaagaaaacagcttcaattgatgatatctcttcttgatttagtctcttttctggcaaaacacattaaatcttgaaatgatgaaaaagatgataatcactattgagagaagctcgagttaagaaacacaagagagaactagctagggagagggagagggagagagattgcaaagtcttataattaattcttgattagttgatcaaatggattggaattttgaaaagaaaaagctagttgatgatatgaacatgaaagtaagatatctatgtgtttaccttttgtgaatgttttgcttttggtgtttgagaacaaagaggagagagagaaagtagaatggaagctttctcgtcaaaggcttttttatggctgaacagaaaaacaaaagagggtccaatcttttctctttccgagatacatatacaaaattatgtgggcgtgtatatatttgtagttggatagagaaatgataataaagtattagtaattgactaatgtataagatcattactctttctctctttattactattctctctatacttgtatgtggaagaaacctttgtgattcatcatcactctctccttttcaccacctttctctatctatttccatagtaaacacaaattccacttgctaaatttcaaaattttattgaagaaaacaataaagaaatattgataatttttcatggtaaatcagacgaagatcttgtccttcctagactttgtctccaggctatatttatgtgttgcatttttttttgttttccaaataataatattgggttcaaaaaagttgtacagaaaattgaaaatttagttgactaactttatagctgtcaagggtgaagctagtacttggcaattgatcagatggagtggacgatctctattcatacacaaacctgaaatgtagaagttaaacagaaaatcaaaagtctaagagtgcttaattaaaagagctttatccttgttaagaaaaagaatggagctttatctttggtaaagaataaaagagccttatccaatatgtagaagataaaataagatgattggatataagattaattggaccgatcacaagaaaatggaggtagattattaagaaaactatcgacttctctagggtagaaaaaaattgagcgagaagaaaattaaatgagagtttgtaatttagtccataaaataaaaatagaagaaagagagcagaaaaagaggaggaacccactagaatcactgactcctactccacaatctctctctctctctttgtaaccgcctgtttgtgcttattggctctttttcatcaaatctctttttgggcttattcacgtacacattttttcaataatctatcatcttttctgtagtattattcatcgtattcacgtacatgcctatatcaaaatacgtatctgtatatgtgaaagtaaagtggtgaaatttgcataaaaagaattgggtttcactctatcatcttagcagcatggatcatgcatgaagttattttttctaagtagtctgtgtgttaatctaaaaccaaaagaaaactaacaggaaaattctagaattatatcaagaatctttgaatgggcatgatatatacagcatatactttatatttttgccaaaaaaaaaatgatatatatatctttagtctagtaaacaaatatatactataactaaatgatcgaatacaactccccagctatagtttaagctaaattatatatattatttggatgatctaatgagtttgttattggaatagtactagagatagtgatgaaataatgttaatacacataatcataaattcataatcaaagacaatgcattaatgtgggataaggaatgtttgttgatttgtgtatgtatattaaaatagcagaatcgagtgagtttctatttctaaactacaactctttttgttaaatgacctttgagacagagagagggataagaatagtatgaatataatacgtctacttatatgtaacacactatacaataattacagatttttttttagtttcatcttcagtctataaccttttgaaagccgagagtgataatatgtgaaacagtttctgaaagttttttcttcttctcaaaaattaacagcttttaggctttaagtttcaaatttggatataatagaactagagcaactttctctagtcggttaacctaacatacttaagtattgaataattaactattttgcctctaccagttcaaccaaaaaagccttagaataatgacaattatgtagaccaataagataaaattaaacggccttcttgcattaatcgtaaataaatatagaaaatagcattaaaattatcaataattattgtaaacatctcaatcgagtgttatttaaattgattagtttggtattatcctataattttgttgatcggtcaacatccactccctgtcatcacctaaatcctaatgccacatttcagattcctttcctttattagaaattgttatatgcctcctttgattcgtatagctgttttagtcaatgcagctctcttgcaaatccacatttgtcatggctttattcctttagtttgtgtcataatgaccccctccgaattgagaatttatttttcacggctctttagatgctttttttgggttcggtagaagtatataactcacggttaagcttttatagaatctcaatattaatttgtccatcaaggcatcaaaataatgtttagattaccatctcagcccaataccggccataatcttatatggaggatgcatattattatgtagacatcaatgatcaatcactttgggacaactactcaagctcgttttctaacgaattgggatttttgaattacttactcaaaatagtgtagtcggttttggtctagcatgatctaaaaagtccaacaagccgagaggcccaaaaccctaatattcaaaacttcgtggcctaaatgtttcatcctgtgtaattttcttcaacaaccattatcttgggtgaaaattgtcaaatttgcatattttccattattgtcattgactttctgattcggtaacagtcatatgatgtaaaaatgggccacatccttatttggtttgcttcaggcccatattcgtttgggctgttagattgtagcaatggtacaaagatctgcaattgatgtaatttaaccttggttaatggtgtaattttattttattttgttggggtcaaactgaaagcctcaaaggataagagtttttttctgttttttttttttcacacttttttttgttttgttagaattcataaaagggtaatataaacttgttaaaaagaaatacagtagatacgtcatatatacagaaaaagtaagagagacagatgttatcaaataggggggagtaaaacccactctaatactacttgttatgcttaaatataaaaatgaataaaagacttggaaatcaaataaggaagtgagtgattcccacgtcgcaccttcctcctaacccttttcttcatcgccactcaatctttctctctgcaacatcctctcttgtaacgtgtaacttgccaaccttttcttttttattaacccaagttcgttgccggccattaccaattcctttatcccataatctcttctctgcttccttcttccatcacattccccaaaaagtctcaacacagagcgagaagaagactcaggttttgcgagaggagagatagagagacttagaaagctcggtaagtccgaactttggtggttcggcggctctacgtcgtctgtaggtcgagtcgtcctggagctcgcccgttgtttctcgacggcggaggtggaagacaacgaccgaccagccatggacattggcggtccaaccaatatccgccacgtggctcacgttaccttcgatcgcttcgatggcttcctcggccttccctctgagttcgagcctgatgtccccagaaaagctcccagtgcaaggtttatatatactttcttcttcttcttctttaaactcattgagaattggttttgagagatttagatttcatatcatcatcttgtttgtgtttggcagtgcaacggtgtttggggtatcgacagagtcaatgcagttatcatacgactcgagagggaactgtgttcctgtgatactgttgctattgcagagccggctttatgatcaaggaggcttgcaggcagaaggagtattcagaatcactggagagaacagcgaggaagagtttgttagggagcagcttaataaagggatcatacctgatgggattgatgtccattgtttagccggtcttattaaggttcttgttgtgattgtgaatcaccttacctttgtttttgaaaatggtaggcctgagtttgattatgtatgtgtgtgtgggttcaggcttggttcagagagctgccgagaggggtactggatcctctgccatcggagcaagtgatgcagtgtgagtcagatgaggattttgtcaaagttgtgagacttttacctcaaacagaagcttctcttctcaattgggccatcaatctcatggctgatgttattcagtttgagcatgttaataagatgaactctcgtaaccttgctttagtctttgcccccaacatgtctcaggtcagtctttttttattaccaacactaaaatgcacaagttacactctcattaagcatgtgtttgattaatggctgcaataaatcaccgtatagagagctaatatgacagttaaatagcagagcatgattctacaacttcggaggtttgaaatgtattggctctgttttggtttttgtgtgtagatggcagaccctttaactgcattgatgtatgcggtccaagtgatgaagttgctcaagagcctcacagagaagactgtgagagaaagggaagcttcctcttctgtggttgacagaagatgtagcaaagaagccgaagatggcgagaaagaaaaagacaatgaagaggaagaagaagatgaagaagaggaggaagaagaagaagatgaagatgaagatgaagaagaagaaggagatggtgtgtacataattaaggaggaagaagcatcagagataataaaagtggttgctgatgaacacaagtcaggaagcataaagagtgagtttgagggatctagtgctacggattcaaagggagataatggagttgtgcagccacccatttgcagctcgaacccgtaggaagcaagtgaagttgatgctttttttctttttagtttactgtgtgttttggattgctttatttgattgcataatgcatatgtaacttctaagtgatgtagtttgttgttgaatggtgatatgaaatgaagactaactctgtgggatgaacaacataatgtatctctgcttttcatatctagtaagatcatttccattccttaaaagaaacatgaaagagttaacaactaaaatcaaaaagatactaatacagagatgagtcgcatgatgaaaggaagaggaccctttagttcttgggagttattcaagcttgacagaacgatagatgtggcgaataaacatcaaagaagccaagaaacttatggttccaagaaccaagaagagggcgtaacataacaaagcagtgtatcctaagtaaaagctcagctgcagaaatccagtcatgtctgacctgagatagaacaatactccatacccatacatgaacaccgctgtgaatcctccgcacaatatcgatctgcaaagaattttaatagtatcgtctataattttagtatgtccctttggaaattaagtgattattctaaaagcacaatcatgtttcacatttttcctactatgaccgtttcaatctatatactcaaggtaaatatgtatcaggtgatggattctcatcatacatagtcaatcaaatccacatgtttggatagaaaagaacgcagtacagtataagaatacgtacctccaccaccattcatgatcttcaccggatagctgaatgtaggtcaagataataccgacactcgaactcaagaagataagcacaatgaatgtaaaaagcattattccaggcgaggtatatatcttaaatccccacaagcttgcatagagttggtgccattcgagaacaactgcactgaaaggtacaaagcctccaagaaacacctgatacagctttctacggtaccaattctgtggtggaatttctcgggggtttcttttaacagcggatgggggttgaaactctaataatccaaatcggttacctaacactcctcccaacatgagaaatgggatattcaaaagagtgaaaatgagtatgatgatgactattgtgccaaaggggagtgcagctgttgccccataagtaattgccacagtgttgagaaccgaaagtattatgaagaaaggaaccggatagaggatcccagcaagacgaacactccttttctgaaaaaggcaataatgatttaacaaataaggttatacgaacaatgaatctttcgaggtcagaaaaagtagaaagcactagaaaagtcaatcacctgtttatttccctcgaattggctatggaaagaagtagatgtgtaaccagccactattgatgttagagtgtacatgatgacgagagaagtcaacagcattccacgattgtatgggtagagaaaaccggtgaaggccaatgcaaatagagcaataatcctgaagacgaaaaacaagttagaaacaacaataataagaagccaaatgttttttttttggtaagtagaagccaaatgtttatagataatagaagcttacaacagtaataatggaattatagataatagaagcttacaagattagcaactgagtaccagttcctaagattgcacaaagccagctgatgttccgaggacatcgaaatacatcactatgtacgagtttccaacctgcttcctttctctcttcttcatctccgatagagtaactgaaatgcataaaggagaagttaaactcaaaaatgtaaattttatcaccacatccgttaaactacgcaaaacaagaatagtctcctaagaaaaaattgtcaccttcttagttcattcttgagatggcgcatgaagagaaaagatataagtccaattaacaaaacaacaacagttatcgagttgagaaatgagaagaagtgaatcttctggctgataggatgaaacgacgcccgggagtacttattcattcttgtctcagagcgttctgaagtcagattccaagaaaccgagtatgtaaattgaacatcaatctcagtgttctcggatatatcaaccatataactcggatcactaaaactgttgatctcaataactttgtctgcattgtacagaacattgaactttaagtgactgaatatataatacttagtatgcttctccccttgaccaaaataatctccctctacttttccaacaaatccccacaaagggagatcatcgtagtacatttgaaagtagtaatcttgagcaataatatctctgaacctggcaatatcactcgatgttaatctcttccggcacaatacaaaatgagttttgtcctccctaaatttcagcttatataaagagctcattaaacgatcaccattaagaacttccccaagagtttcctgtttctcaatcacaggccctacaaaatataaaacaatcctaaatcaaaagaccgaaactagggacagatacaaatcctaatgtaaaactaaaaggacatcattgagaaacctaacctcgacggcagaacggcaaatcatagtattgataggtctcactgcaaacaaaacaaaacaccaaactttaaaatggggtttaagaaaatgtgccatctttgagttccatggtcaaactaaagctagaacaaaaacatatcttacacattctctaacttgatctcctcctcttagattactcacccgtcatcataagccaataaaaagcaaaatgcataagaattaccaaaagatttgaatttgagaacaacctcggattgtggagaggacccactttgttgacgaacaaagggacatgatcgccggcattataatggttcgacgagcctgatccgattccgatccagaaggtcaatgcaagtaggacttgtagtacagtaagcagaaattgcgccatgaattggcactcttcttctgctgggttccaaaagaaacgaatcaatatgtgcaacaagaagagctccagaagcagtcatcttctaaaatcttaatctaacaacagctcaagaagaaaaaaattccatagctagagagaacacaaagtcacaagacgacgtcgtagaggcacaaagtcaaacctgaatggcttaagccgaactgagtggttttgactagaccatcatcagaaaagtctccaagacggtagtcggatgttagatcgctcaagtaatttttggttttgttggtctcacgttttcagctgcccatttgatttcagtttgggcttttccttatctctaaaggcccaatttcatttaggtttagtttatttgatcattatccttactataaaggcttcgcctttcgagaaatttagggtttcttctgtctgtctcgtcactcaggtttgtgcctcaacgactgcttcacttctagcttgattcttcttcttcgtttatatgtatactgtacattagattattcttgtttctcgagcttctgctatagattttgattcttttttttgttgtctttgtttcgtttccaggatcagatcttagctaaattgagacaagctcaaaatgaggtacttgacgcatctcttacattcactgtttaattagagaacaatacgtctctgaatcgtgattcagagacgtattgttcttctgtcatatgcaataagtttaattagagaacaatacgtctctgaatcgtgattgttttttggatgtgcgttattgatagctttatgatgttaatagtctaggattgacacgaagttgttctgcagttttgcataaatgctctttactaaggcctctaaatttggatgacaaatctaaatcttgcctcataaaaatttaggtgtattaagataagattattttgtatggtagtgtctataatgtgggttgttcatgttgaggttgtcaatgttgtgtatttttgtttgtttagttaatttgcttaactctgttctttgtgggttaatacagtaagcttcagagtgaggccgttcgtgaagccatcactactatcacagggaaatccgaggcaaagaaacgtaactttgtcgagactattgagctccagatcggtctgaagaactatgaccctcaaaaggacaagcgtttcagtggatctgtcaagttaccacatatcccccgtcctaaaatgaagatctgcatgctcggagatgcccagcatgttgaagaggtgatatatcttttcatggaaattgatcattttgtgctctgtttcttgtataatggttttgtgctcatttcatttggtggctctattagtttcatttgatgttgtatatgtcttctgaatgtagatgcatgatgttttcggaatttggtcattgtttatttaggcttcatttcttgcataattaaatatttgcttatttcatcttgtatcttttcgtaggctgagaagatggggttggaaaacatggatgttgagtctctaaaaaagcttaacaagaacaagaaactcgtcaagaagcttgcaaagaaataccatgctttcttggcctctgagtctgtcattaagcagattcctcgtcttcttggtcctggtcttaacaaggcaggcaagttctggctacagctaatattccattgttcttctttacatccgttttgattttggataggttttagtagtctatttcttttgtcaatgtctttttgatacaatgccaatcctttatcctgtgagattatgcttctttgatgattcttaagtaacattcctttgctttactttacacaggaaaattcccaactcttgtgagccaccaggaatccttggagtcaaaggtgaatgaaacaaaggcaacagtgaagttccagctgaagaaggttctgtgcatgggagttgcagttggtaacctttcaatggaagagaagcagatctttcagaatgtgcagatgagcgtcaacttcctcgtctcgctattgaagaagaactggcaaaatgtcaggtgtttgtacctcaagagcacaatgggaccaccacaaagaatcttctgagctttcacctacttaaaattggtggctataagacacttcttcttaccctttcgtttttgtttcagacatatctgttaaacagtgtaagagttgtgctgctactctcctctttagcttttggtttggataatttgaaataactgcagtgattttggttaatggattttgtagcttatattatctttgaattagatgtgcttatttcaaagacgaatcaatccacagatgtgaataaaaacagaaattttcgttttcaatttgaaaattgtcctcgtggactgttccataaccaaattctattgactatgcagtaattgatctttgaattaaaaggatcaacccactgattatactccaattgaataaatattcttctttaatgttgtttataatctcttaagcaagctctaatgatgtatttttgaagcaaactctaatgcttttatggtcagtatatttattctcttaagttttataactaaattaccatttttttttgccaaagcagacaacaaaatagcgaagtgcgttccaaaagttagcgttttcgtctccgtccccaaatctctcagctaccttaaatcagaattctagggttcttccgattagggtaaaatcgaatccagatttcccaaaattctgatctttgatttataaaagatgtctcaaaacgggaagataatcccaaatctggaccaaaacagtacgaggctcctcaatctcacagttctccagcggatcgatccatacatcgaggaaatcctcatcacagccgctcatgtcactttctatgaattcaacattgagctcagccaatgggttagtctcaatcaatcttcgattacataatttgatgtttgcttccctacctaatgattgatctgtcttttgtcattcagagtcgtaaggacgttgaaggatctttgtttgttgtcaaaaggttactactttcgatctttaactatgtgtatcttatctttaatcgtcttctcaaatctgattggatccttttttttgtttctttcagaagtacacaacctcgatttcagtttattgtgatgaatcgtcgtaatacaggtcaggatttattcaaataaagttggtgtgtgtcatgtgtctagaaaaggtttagatttagtaatatattgcaagttcttatttaaggattcagtattagtaatcatcagtgtgttgctgtatttgtctggatagataatctggtggagaatctcctgggagattttgagtatgaagtacaaggtccatatttactttaccgtaatgcatctcaagaagtaaatggcatttggttctacaataaacgtgaatgcgaggaggtagcaactcttttcaacaggtatgtatatataagtcactgcatatcaggtagaaactgttggtttcaattgttggatcatgaataatatcaatatcgtcttttatttgcctattatcagacagttacttgttggcaaatataatgttcttgtatatttgtatgaacttgaaattactcttactcgttgtatctctgcctaatggttccttggcatgacagaatactcagtgcatattccaaggttaaccagaagccaaaggcctcatcttcaaagaggtaatattttcatgattagatttagttagtacaccattagttgtttcttggatgtgttttctttgaggtggaaacttgataatctaaatcatttttcccgctgttatatctcttacttgttaaattaagttagattttctatgtactgcagtgagtttgaggaattggaagctaagcctacaatggcagttatggatggtcctcttgaaccatcatcaactgctagggatgcccctgatgatcctgcttttgtcaacttctttagcgtaagtttctaaagcttctgttacacactcacactatcatcttcaccatgacagcatcttatacgactaatggcaggagggctttctattagttctagccttctaggttcttgaattatcttcagcgtagtatatggtccaacttagactcctcaaattgtaacactgaatttatctaaattgttgacagtcaacgatgaatcttgggaacactgcgagtgggtcagcaagtggaccttaccaatcatcagcgattcctcaccaacctcaccagcctcaccaacccaccattgctcctcctgtagcggcagcagcacctccacagatacaatcaccaccgcctctacaatcctcctctcctctgatgactctctttgacaacaaccctgaagttatcagcagcaactccaacattcacacagatttggtgacgccgtctttctttggccccccacgaatgatggcacagccacacctcattcctggtgtatctatgcccactgctcctcctctcaatcctaataatgcgagtcaccagcagcggtcatatggtactccggtgctccagcctttcccacccccaactccaccaccatcactcgctcctgcacccactggtccggttatcagcagagacaaagtgaaggaagcccttttatccctgttgcaggttcgtcctttaccacatcactttatttgagctgctgtgcaaacctaacgagttgcttttgacaggaggatgaattcattgacaagattacccgaactttacaaaatgcacttcaacaatgaagctgcgctggtcagcatctacgtgtgggatagtggctgtttgatctagaatgtgtagttaaaatgtagttttgttccctctgaaagtgttgttggaaccttataagatactgcactgccccctttgtttaactcttggaattactttttcattttatctactttcaagtttttacctttcctcatcaatttttgtttcgtagtcgaaagacatgttaaagactttagattcacaaatcttcatgcatgtttagagtttattggaacatatacacatcaagattaatacaaaaaacatgaaagagtaagaagaaagagagataatttttctattttttaaaagattcgagattgcaagacaaaaactgtttgtatggttcaagtcaaagacgtattgtgatgtttcgttttgaagtattatcccaatcttttgtgagctttccctcgagaaacgcttttaacatttaatactttagttagactgacagacattcttaaaatcaagatcatataagaaagacttgtcgagatatagaatgaaacatcaaatagcaaagaaagctttgttttgattgataatattacacataaccaagagagagcatatagtacaaacgaaaacaagaatagttatccttagaagtaatcttcagtcctgcccttgaatccgatttgtccgaaagtgaggcagaggaagaggcctaagtgccacgtaaccaaccacaaccagaactgtgaagtgagagctggaggagtcgggaagtgagcgagctcagttccgatgctatcgaagaagagacccgtcaggctcttcccatttatcgctggaatgctcgacggagctagccatccgatcagcccaaatcctaccacgttcaaatctctcctcaaccagttcctctcaaagctttaattcatttttgacacaaacaaataaatttattagaaaataccctaaaaagcacctcaaaattaaaacaagctttattaagttcctaagatcagttaggactcattcctatatcttaagtaacataactagtgatacttctggagttttaagcattttcataaaatgtgatatctttgttattactatgagaagaaaataaagagtaacctaccaagtgactcttcctcccgatgcaccggcgagtctcaaagggttcttggcgcttaatgttggttttaaaaaggctaaaaaacatacgagaaatcacaaatcaagattatcatatgcatatatatgtttgattgaaattattcgaaaagagaaagagagaaaaagagtacatgaagagaagggtttggtggtgatggatgatcctccgaggcctatcaccgtcgatggtgttgcaaatgttgctgccatttttcttctttgctgctttctcccaaactgatctcctttatttttttaagtaaatacaacacaaacacaagaaatagatttttattctgtggacaaagagagagatttcgaggatgtgttatcaatcaatagctttgtgacacctcattattttctttgatattgtgggtctatttcttggataagattgattccagatttattttttgtctcaaaatttgtttattttttttgtttgtattttataaagatttttacatcttttagtttgcatgttaatgattttaattagtcaaaaagccaaaacaccatgaattccattttttttttttcaaacacaatattccctctcccaatatctgccaaaaatcaaaatcaaattactgtaccgataccatttgttcggttcggtttaatccggtaatcgatgaggtaaaggcatttgtgaaattgatcagccgagtcggatcggcgggtaaaatggactacagcttagcggcggtgaagatgctttgttctcagctccgggacgctaaaccgacgccttctcagaacgccgcctccctaggcggtgtactttttcaacgtgcttggttacaggttcccaatctatcatcctctcattgtctatagctaaattgttaattcctgtttcgatgacttcaagtcttgcgttgcagggcgttttggtccccttctccggtggaggcggcgataattgtctggtacttgatgacggaaccggtcttttggagctcggtctcaccaacgattttgccctccgtcaatggaaatcaggaatgtacgtgatggttgttggtgtctaccaagtccgtactgggcagatacctctacttaaggttaatttgaaaactttaggtctttgatatgcacattggatcactccaatgtgattttagtttcgctagagttgcagactagtcaaattggtttattatgccaattggcacattaaagagttaagtgagaatgttagatgttatgatcactagatcaggctgacacaagcttaggtgactaaggagcttaagttccataagaggttttgagtttgaatgtgttagtaaaaatcttgtgatgatatatctaggtgtggcatgaagatgcttgtaatcactagtgattaagattcatcttctcttgtgatgttcgagtcaaagtatcatctgcatttacatgcaatgctttgattactgaaacttgtcattgttgttttaaactgaaaccaggttcataagatggttgacctgtcggtgagcccagatcgtgaagccatgtggtatttagaagtcatggacgcatacagactcttctatgagcccttgatccaagagttctcttgattcttcacttcacttaacttatctattcttcttttagtttcaccagaccagattaatcctttttttgtttattgaagatgatctttagagtcatgggtatgtacttctacggaatcaaaagcaaggttgtatcatttttaacacaccattgctagttttcaatttatccaatttctgctgcacttctcatcttcttgatcatggactcaaatactgatacaattttacaaaaaggcattcattactagtaagacctacaaaattgttccacaagttgaggagacaagttagaaataccaaacaactttagacaagtatttccacttcgacttagagctcctctcaatcgtgccttttcttcctcatgcatcctcaacagcctaagaatctctcgcacacgagggaaaaatgcaccaggacgaacacaataaggtttaagcacagtaagaagtgcctctgcgtcaacttcaaacctatcaaacttttgtctccgtaaaacaggttctcctgagaaaaatttacgagaaacataatggtcaagcccttccgcgagatttctccacaagtccaagaagtctttcgggttcatgtttagatgaagaacacacagatgccttcttaaattgtccaatgcttctgcgacaccctgagacactgttaaattgctggagctggtaatgacgtcttcgtcccatgaaactgcattgttgtggaagtggtcgctgcaaagattgtcaaattggtggagaaaaactgttataatctccataagccaattggtttccaactcaacaaggcttttcagttcttccccaaaaaagcagccttggcaggaaacttcaggttttctatcaactttgacactggtttcggcagcccacatctctacaaaaaccaaatcatcactccattctcgtagttttgattcaagataccgagcagcattaaccggtccacatgcttgtatcagtgtatcttcagacaaaccataatgagagagatcagtctttttgaactccaataacagaattttgaatatacaccagagaaatctggtggcagtagctcttataaattggatccttggtagaatggccggtagagatagaccatggtctatcaacctccaagtcctattaagaaaagagtctgctactaatggcgctttataatcttctcttgtagatagaacatactttgcagactgtgagttggattcattaccaagtctagttctttcactatcaattacccaagctttctcattcttaatatcctctttactttttctataagcatcctttagctcaatcttcccccaggttttgagccactcaggtttcttacaaaacagtcccattactgatataccttgagaaaacgctgtcgaagagccttcataagatagacaagtatctgtattcacaaaagactgcattcgcttatcaaatgtaaccatctgatcgacaagatggaaccacgatgaaataccttcagatttcatgtgcttctccttgtacatatctataagcccaggaaaaacttttttctctaagaaaccagatagcatttggaccatcgctgaaacccaagcttctttagcactacagcttactaacatagccctatcaatcaaaggctgtaagaaatcgtcaaccccatcagcaaagtctcttgtaactttatagacaagttcaaaaataaactcaggttgctcagcccattttagaaaatgatactccatccgagatgcaaccggtttaactagttcatcggtcgcccaaagtccatcattatcagtttctttggtcatattaagcttctttcgtttttccttctgcgtattatgttgctgtaaaccacagaggagtagaaagctttgggaataagactcttttttatctccttgcatcaagagtagaggattagggatactatcaacctctccatgctcgactttggatgttgcaagttttggtggccagccaagagatgagagaaaagctcggtgatctgcgataatctgtggacgaagaacagacagacttttatctactctactatcaacagaatctacaaggcgacgccaccgtgagtgatgccttgtaacatcaccaagtatttcttcaatctcattcatggtcttaatagcatgactgaatctctcttgcttcaatgcaagatcctgcacgtacaaataaaaagttttaatctttcatatttaccaatcacaactccatatagtacttaacttgtggattgaaaaagctttacttgaagcgtacttcctttgcgtttacttatcggatgaaacacagaatcttcaagatcgccaacaagactttccaactttaaggcagtcactgaaaaattgaatctttcttagctagctcttgatgataatgttcaagaatcaaaaatcgagtcaaactcaccgaaatatttacgccgattctgtatacgacacaattcctctacgacttgctgtaactcccaattcgtttgctttccgacagaatccgtagctacaatgaaaaattggagacaataagaaaactcaatatctttacgtcaccaaaaataaaacacgagggtttggtaacttacggagacagaggaggctctccaggttcaatctcaaatcttcgagtgaaactttagcggaaagtgaggttgagatccaggaaacggcgtgcttcgtgagatccgtccggagatggagaagacggtcgtttagatcagaacagtcgtggtttaaattggacgtcagagtcgaagcgcggaggagcagatcttggaggtctacgaaattaccgtcaataaagcctagtgcgagaccgggaagggtggccgggtttggcaagacgaacgacagtggaagtggatgttccatcggaagcatttgccgggaaaaaggttgttccttttgttttctaaagccttcgtgtcctctgagtctaatgatgggttatgttatgatttttaatttcccttaagtttaactaaaaattagtatttactttgaagaaaataaaaagtaaaaaaaatcgctttgataaaaaaatttagcttctccgtgcagcgagtgtagtcggcggctgacgttttctttaccctaacacttttgaagcaacataacaaacgcgccgcgaatccatttttaagggtttagagacttttagggtttacttgagaacagagagatggggaagagcgaaaagacgtcgttggggcgatcactcgtgaagcaccacaaccatatgatacaagaatccaaagacaaaggcaagtactacaagaatctacagaagaaagttctcgaatctgtgactgaggtcagtgacatcgacgccatcattgagcaagctgaggaggcagagcgtctttacaccattaatcacagctcctccacacctttgtctatcaatctgtatgcttctcttcttctaaattcctcttttttattgtcctttgattgattaggtatttgtggttctgtttgtataaatttaatatggtaatgagattaaagaacaattacatgtcctcttgatgttcttatggtgtgctgtttctctaatgtttttggtgaaacagagacacaaattctagctcaagtgttatagcagctgaagaatggagagagcaacagaagatagaggaggctttacacgccagtagtcttcaagtacctcgaaggtatgtggtttttattctctttagctttattcttcctttctatcatagctctaagacaacgtttttttttgtctatcttcatctccagacctccgtggacacctgaaatgtcagtggaagaacttgatgctaatgaaaaacaagcttttctaaattggcgccggatgcttgtgaggttagctttttttgttctaccccatcttaattttacttcttcggtgtgttataaacaaatcaatatctgtcaccaaattgtttgttggtgatgataaaatttaggcagcttctgtcacatagttttgttcaaatggtaaaagctgatgctgtagttgataaaatgcatgtattttgagcaaatattctacctttgtatcgtactgagaaggtcgaaatgggataagctgagaagatctcattcttgtatccatttcccagttttgttgtggaaactgaaaatctcagttttgttgttattggtataatgtgctgtgtataagtttatctcatgtaggatagtgtttgctaaagccggaacttttatagaatcgagttgtgttcaagatatctttcgtatataaaccaaactagagtttatagatgtttgaccctaatcaatcttttggattgggaagtttataggtgttacgcatgcttacatgttctcctgtattttggtttagccttgaggaaaatgaaaagctagtgttgactccattcgaaaagaaccttgacatctggagacagctttggagagtgcttgaacgcagtgatttggtaagtctttgtcaataatgtattaaccttctcaataagttcaatttctgcgttttagttaattgcaaaacagttttgattacttatacttgtccttttttcagattgttatggtagttgatgctagagatccactgttttaccgctgccctgatcttgaggtaatgcattttctcccagcttgaaactccacttggcaccgtattcctgattcatatttacttgaagattcatcgtgacacaggcatatgctcaagaaattgatgagcataaaaaaataatgcttctagtgaacaaggcggatcttttacctactgatgtcaggttagccaatcctcttgtgccttaatactttgcctccaaccttttttgtattctaaccgattggtttaacttttgacttgtagggagaaatgggcagaatatttccgccttaacaacattctgtttgttttctggtcagccatagctgctacagctaccctagaaggtaaagtcttgaaagagcaatggagacaacccgataacttgcagaagacagatgatccagacattatgatatatggcagagacgagctgttgagtcgtttgcaatttgaggctcaagagattgtcaaagtaaggaattctagagcagcatccgtatcatcacagtcatggactggtgaatatcaacgtgatcaagccgtggttggatttgttgggtacccaaatgttggaaagagttctacaatcaatgcattggtgggtcagaagcgaacaggtgtcacctctaccccaggaaaaacaaagcatttccagactttgatcatctctgatgagcttatgctatgcgattgccctggtttagtcttcccttcgttctcaagctcaagatatgaaatgattgcttctggtgtacttccgattgaccggatgacggagcaccgtgaagctattcaggtggtggctgacaaggtccctcgccgtgtaattgagagtgtgtacaacatttctcttcctaaacccaaaacctatgagcgtcagtcccgcccgcctcatgctgcagagctcttaaaaagttactgtgcttctcgtggctatgttgcctcgagtggactaccggatgaaacgaaagctgcaaggctgattctgaaagattacattggaggtaagctgccacattatgcaatgccacctggaatgccccaagctgatgaaccggacatagaagacactcaagaactggaggatattctcgaaggttcagagtccgatgactctgcagtaggagatgagacagaaaacgagcaagttcctggtattgatgatgtgctagatgatctgagctcgtttgatcttgccaatgggcttaagtcttcaaagaaagtgacagcaaagaagcaaaccgcgtcacataaacagcacaaaaagccacagaggaaaaaggatcggacttggagggttcaaaacacagaagatggagatggaatgccttctgttaaagttttccagaaaccagctaacacaggtcctcttacgatgcggtgattatcaaattgtagtccatccaagcaaagatggcaaccgaagctacttaaagtttttttttttttttcaaaaaatgtaacagcagttgaacctgtcgcagtagttctcgagtgtcttgatgtttttgtttttatgattaaagtcttattttggggaaaagtagaaaaaagtgacaactcaaatctggtggaaaatggagaattgtttttgccagttggagatacctatcgctttgttttgagaatataatagccataaatagagttttcatgtaactttaaacttttttcttatttggggtttggactcttttgaacaataaatagtgataatgaaactttaaagtttaaacatttcaataaccaattcttgttgctaaatatgtcattaccaaatcgatataaaaccaaagtaaatagaaatgttatagtgatttcggttcgtacgtttggcaatgagttggttcgtgtctctcgttccattggcgtccttgagggttaagactgattaggctttgttgtacttatggagagaggagagagaaacttgagataaacaaaaaaaaaaaattggtttttcctaaatgtgtgaatgtctgcttgctgcatcgttttattaatttccctggaaaataactgtttctgtttgttgtaaacaagcctcgaggatctgaccggtgaatgaaagaaaactagggtttcgattttaccggaatattctccgagagagcggcaagtttaacatcagatatgttgttgatcacagattcgcttttctgcgaattttagctggatcggtctttctttagttagttttttttttttgttttcccacttttgaagctttttgataatggatgaagattcgtctatggtggctgacaacgatcaggatcgtgagtttcagagccttgatggaggccaatctccttcgcctatggaaagagaaacgcctcagcagatgaacgaccaatcacctcctcctgaaggcggatcggtgcctacgccgccgccttcggatcctaatccggcaacttctcagcagcaagcggctgcggttgttggacaagagcagcagccggcgctagttgttggtccgaggtgtgcacctacgtattcggtggtggatgctatgatggataaaaaagaggatgggcctggccctaggtgtggtcacaccttgacggctgtgcctgctgttggtgatgaaggaacgcctggttatattggtcctcgtcttgtattgtttggtggtgcgacggctcttgagggaaattctggtggcaccggaactcctacttcagctggaagtgccggcattcgtacgttttccttctctgcttgttaaatagttttaagtatcaccgctctacattttccttctcctttgcctaactattgtgaagttgtagtttgccttccttgctttgaaggttctctcctgaacgattgaaaaagttaactcttttcttatggcttaattattctgatagagggcccttgccaagccttgaacttttaaagatttacctatttcaaagatatacgctggttatttgcttgcaatcttgtgagatcgtctaagtttggaaactttagttctgaaagcttcacatctgttaaatttaactggcaatctgaggtggcagtgtttcctcaacatttattgcatcctatttcatttggaatcggtagagcaaagagcttgatgtagtaccagggcacagtattggctgtggaatgttagatcactaattccgtttatttgctgatagattctatgttctagttcttgttatttcttaaggttcctagatttatctggttgtattaattaatttgggtgttcttttctctgcagggctagctggggcaactgctgatgttcattgttatgatgtactttctaataagtggactaggtgagcattaaatgtgaatgtctttgggttttcacgctaattatgaaaaatgcatgagatcctaccccgtttaaaagtgtggataccagttaattaaatgaattgaggctacaggcttacaccttttggagaaccaccaaccccgagggccgcacatgttgcaactgcagtcgggaccatggtagttattcaggtaggggagaaatgatgtttttatattatgtgtatgatttaagtttatcaatgtaagatgagcatttccagtcagctatgaaagtgcttataaattctttctgttgtacagggtggaattggtcctgctggtttatcggctgaagaccttcatgttcttgatctcactcaacaacggccacgatggcacaggtttgaaaatatgcctgccactatctcggttgaaaattcattttactagttcgtgtcttgatattgattatgtctctatccagggttgttgttcagggtcctggaccaggacctcgttatggacatgtcatggcactcgtggggcaaaggtatctcatggcaattggtggaaatgatggtaagcagttttccatattggcttattctcagtgttttatgtaagggtatcatattctcattaaagcttcacccttctgaactccattcgaactactaggaaaacgtccacttgctgatgtatgggccttggatactgccgccaagccttatgaatggcgtaagttggaaccagaaggggaaggtccacctccctgcatgtaagtttgattagactcctttatgattgtgagctttctggagtaattgtttatatctgtttgtacgttgtaactaggtatgcaactgcaagtgcgcgctccgatggtcttcttctcctctgtggtggaagggatgcaaacagtgtggtaagtgaagagatttattacagtcatacccaattatctctttgaaacaaacactgagccacttatagaggcatgattctattttggcttttgcttttagtgtgagataaaaatgggaccgtgagatttagtcaattaatttatagaggttgagttttgtcactgagcaaattgaaaagtattttatttccccagctacaaatttattaatggtccaatgaacgatcttcattctatgttccagagcagatggagatgtaactcttctctgctaggtaaattaatcaagagtttgtgtgtgtttcaacacagactctgaagaagtaacaaacataaattgtgtgcaagacctcgtgaagcttctacgagaaaaggaactataatttcttttgtcaacaaggaatgagcttattatcaattatgtgtttatacatgatcatgagaagttgtcaattctgcgtaaagtgaaatatgaaacttaatggactgctttaatcttgaatggttgattgaggagcttaatttttttctacgtttgaattgatagcctctggccagtgcatatggacttgcgaagcacagagatggacgttgggaatgggccatagcccctggtgtctcaccatcttccagatatcagcatgcagcagtatggatgcttcttcctctttggttctcttttctgtcctcatcagaattattaaattctttggttaattatttaggtctttgtaaatgcaagacttcatgtgtccggtggggcacttggtggtggacgcatggttgaagactcatccagtgttgcaggttagcaaatgaaaagaggcagtctgatgtttgtgctgttggattatcattgaggaaatacttgagtttccatataatttctgcaccacttttagtcttctgttggccattgttgaaatgtgtctcatgtatagacgatagttgtatattttggttttgtactaaaatgtgcattgagttcatctacaattctctgattatttcatctattgtctttgtacagtattggatactgcagcaggtgtatggtgtgatacaaaatcagttgttactagtcctagaactggtaggtatagtgccgatgcagctggtggcgatgcttcggttgagctgactaggcggtgtaggcatgctgctgctgcagtcggtgatttgatatttatctacggtggtttacgtggaggtaaagagctggcagaactttgctaatgtacctttgatgctttgttacagaccaacattgtttagatatcacaattcttttgcatgcttcttaatgaggataaaccaatatatacggttggattgttctttaaatgtggcataatgtacattgtgtagccagtgtgtgctactgtagaattacgccttctttactaggtattgcttttcgtcagaatctgagagaccataacagaaatagcgaatatataaaattcctgcattctttagaaattatggtttcactacttaattatatattgttgatactttaggggtgttactcgatgacttattggttgctgaagatcttgctgctgcggaaacaacatatgctgcttctcatgctgctgcagctgcggcaacaaattctccaccaggtcgattacctggaaggtatggtttttcagatgaaaggaacagggagttatctgaatcagctgctgatggcgctgtggtgctgggaagccctgttgcaccccctgtaaatggtgatatgcatactgatattagccctgaaaatgcattacttccaggaactcggttagctaacttccctaaagaatgatttatcttgtgccgtattgttaaaacagtgatgaatttagtgacaatgatccatcaccactttgtaggagaacgaataagggtgtggagtatcttgttgaagcatcagcagcggaagctgaggcgatcagtgcgacgttggctgctgccaaggcaagacaagtcaatggtgaagttgaactccctgatagggattgtggtgcagaggctacacccagtgggaaacctacattttcgctaatcaagccagattctatgggctcaatgagtgttacacctgcagggattcgtcttcatcatagagctgtgagtgtcacacttattgtattgaatatatcaagtcttgcattatactgctttgaacaccatgttcttcatttactagtatttcttaccccaaattctcaccactaaagcatttctggtttataatgtttctggcactttgttatttaggtggtggttgctgctgaaactggtggcgccttaggtggaatggttagacagttatccattgatcaatttgaaaatgagggacggcgtgtcagttatgggacaccagaaagtgcaacagcagcaaggaaactattagatcgacaaatgtcaatcaacagtgttccaaagaaggtaaagattttgattatcgacataattttctgtattattgggatcctacatgtggatttaaaaacacagtaatacatctggtaaagtgtgatgaaattatgaaaagggtacaatcttgaactattatataatactttcgttctgtggcattggttaattgtgatagaaatcgaataagctattgtataggtatactatctcctggtttccattactggtaactcatagttgaagattcgtttgcatcctcttattgttcaattaagcatcgggtgcctaaagactcgcttagtgattctggagttttaacaatatgtgacctaactatgtcttaataggttatagctcatcttttgaagcctcgtggttggaagcctcctgttcgacggcagtttttcctagattgcaatgaaatagctgatctttgtgatagtgcagaacgtatcttcgcaagtgaaccgactgtattacagcttaaagctcctatcaaaatatttggtgatctgcatgggcagtttggggatcttatgcgcctttttgatgaatatggttcaccatctacagctggagacatatcgtaagtgcatcactaaaacttgtgacatcagtggccctacttcttgctactttttgctggacattgctcattttgttgtttaattgtcagatatatcgactacctcttcttaggggactatgttgatcggggtcaacacagtctagaaacaatctcccttctacttgcactaaaggtagtcctaagtgtattatgtcagttttgccttgatgcaggtgttctagttgcttttgaccatagaaggtttgacgttctatttttggtactgcaggttgagtaccagcataatgtacacttaattcggggaaaccatgaagctgcagatatcaatgccctttttggcttccggatagagtgtattgagcgaatggtaatgtaatctgcttctgaatctcttgtttccatgtttatttgtctcatgttgtggttgctttgtagggtgaacgtgatggaatctgggtgtggcaccgaataaatcgtttattcaattggctacctcttgctgcatcgattgagaagaaaattatctgtatgcatgggggtattggtcgttctataaatcatgtggagcagatagaaaatattcaacgtccaattacaatggaagctggctccattgttcttatggatttattatggttagtccttagcttctatatgttggtctgcttaatgttttggtcgagtcttactaatttgttaatttggatttgttaggtcggatccaactgaaaatgacagtgtcgaaggtttaaggcccaatgctagaggccctggattggttacttttggggtaagtaattttcttgtgttttaattttatgttgtctgaatttcgtttttcctcccttcagaaaaccaataatctctttcttttctcacaatatttattctgtgcaatgaggtgctgctattgttagaccaagaatatatgatatttttttcttgaaaccaaggaatatagtctagtttgctcccaataatttaccatatgaagaagtgttaattgcttttgcttttcatttttacctgttctgttactcaccaaaacttggcaattgtagcctgaccgtgtcatggagttctgcaacaacaacgatcttcagttgattgtacgagcacacgaatgcgtaatggatggatttgagcgttttgctcaggggcatttgataacgctcttttctgctacaaactattgtggtatgtacatggactcactaagtgccataaccggattttgatattttgatggggttatttctgttttcttaatagtttttatactaaatctcaggtactgcaaacaatgctggggctatcttggtactagggagagatcttgtagtggtacctaagctcattcatccgttacctccagcactttcatcgcctgaaacttcaccagaaagacatatagaagacacatggatgcaggttcatattgcttcatttcattactgaatcttagtccatagttattgacctgaaacattggtacttagcgtagtatgcacttttcgcaggagctgaacgcaaataggccagcgacgccaacccgaggacgcccacaaaattcaaatgaccgaggaggttctctggcttggatgtgaggcagataaagaggcactcgtgcacatacataccgctccaaaaaacacttgtaacatctgcctcctggtgttcctcatgtgtacagaaaaagatgagccatagacgagaaacgatgaggcttgaagatatcagggggtgtgtaaattaagatgttaaaaggttagagaagtcagttttggtggtggtttagtagtgatttgtagagtttatttgtccgggctttagtcctctcgttcatttttattcagtctgctgtttcttctttttttttatcatgtcatatctttcttttttcctcttcaattgtctccgttgttttcgtttgtggtatagttttttggcgagtgggtatgaattcttagaatggtaatggttgattaggtggaggatggtctgatgtcgtggggggggggggcttttgtgtattttaattttattgtcagttcatactttgtaacatttgtgttgattatatgatacgaaaaattttcctggctccttttggttgtctaagctagaccaaaaaagaagagaaaagaaagaacttatgcccttgaaagcgactttgagttggttcatggatcctcgggtgatggactcagtcactcgatttgcttgagattcataaatttatacatgtgctttgtggccttcaaatgaaacactggtgatgtcgatatgatgtgatttggcatcgatgctgtcattggctccaaaaaatcatgttttagcggtgagaacaaaaaaaacaaaatttttggaggatcagatggttgaagttaaaactcgagggtattagatggttaaattttaatattgttttggatataggatggtgattaaaaaaaaaaagttttgattagtgttggtgcaggaattagcatctccgataataccaatttaaaccaaggaataacgtgaataaaatcgagaattcgattgaaccggggtatcccggctagtctgttaatgggcctaagtcatgagctcgccagaagatttaggtcgacagtcaagatcgccataggcggcttctcaggtcgtgtaaagggaaaacttccatttaagagaagaggatctcatgaagaatagaagtaatgaagatttagacctaagataattagaagtttatcatattttggtatgttggacccattgtataaatagggggggggggtcaagccctctaagaggatcatgaccaacctaagacaagagactactattacagagcaaactctagctttttattcaagcaactttgttcttctcctttgattattcgtgagctaagagagaagtgaatttgtctaaatcccttagtacaaattaattgtttgattagagaatcaacaattagttttgaacctgatgatgtattggtcaaacttgtaatcatcgcatctgagtttgaggtcattttttccaactgttgttatacatataaaatatccaaagaataaaagccttgtacgatcggggtattggggtccgtaccaacttgttgacattttttatgtttttggtgtgtggcagactagattgaaacaataatgactaagcaactcagtaagagtcctttttttggactcagtaaaagagtccaagttttctttgaacaacaaaattttgttgaggtgtgtatgcacttggttgggaacaaacaagtagatggcaaagatcattcgaacattggagcccaagtgttgagggcactaatcttgtcgattacagaaacgaaattatttggggaagctgcaagaaaaagtttagttaaatcttttatattccttaatcaaaatgtatcatgcatacactatatacaattcactaaagtatgatagttaaatacctaattaatatcatgatcaactcctaccggttcatctaactaatccagctcagcataaaaaccctcacgcgtcgctccaattaaggggagggcttaactagtgcccaacttactgggctaggttcgactccgtttttttattacattttccttttccatttctttaagactttaaccctgaaatctcgaagtgcaacgcaccactaattttttataaatattaacataacatttcatgagtcctaaacaagagtctctcttggtctttataaatacatcgatccatgtacataaaaacaacaagtcatcttttctttctatctgaaagtaatcagagaatcagaaaacacttgagagagctgagtgaccatcaaaaggtgttatggagaaagtgagagagatagtgagagaagggattagagtagggaatgaagacccgagaagaattattcatgctttcaaagtgggacttgctcttgttttggtctcttccttctattattaccaacctttcggtcctttcaccgattacttcggtatcaatgcaatgtgggctgtcatgaccgtcgttgttgtctttgaattctccgtaggttcgtcatctagtttctatcatttgaatatgtctagtagatatatctagggagaatgcaagaatttttgttgtaaacttttggccataatattaaataactttggtttgatgtgtacttaggggctacacttgggaaaggactaaatagaggagtggcaacattagtagcaggaggactaggaattggagctcatcaactagcaagattgtcgggtgcaacagtggaacctattcttttggtcatgttggtctttgtgcaaggtaaacccttataacactctttacattttcagattaccatgcgtttccaagcgtttggtcaatcattgtttggctaaagactagatcaaagaagattgggcaatgagtaattagtattgtgatatatgtgcagctgcgttgtcgacgttcgtaaggtttttcccatgggtaaagacaaagttcgattatgggatattgatattcatattgacgttcgcgctgatatcgttgtcggggtttagagacgaagagataatggatttggcagaaagcagactatcgacagtggtgattggaggagtcagttgcatccttatctctatctttgtctgtcctgtttgggctggacaagatctacattctctccttgcctctaactttgacactctctcccacttccttcaaggttttttatttctttctctttttcttttcctcattatgtctctacaagaacataaatatatacatatacgagatagtgaatgtgaaattggcagattttggggacgaatattttgaagcgagagagaagggggactacaaagtagtggagaagaggaaaaagaatcttgagagatataaaagtgttcttgactccaaaagcgatgaagaagctttggtgggctactctctctctttctttccctacttgcttcacaattatgaaatcatttggattgattttgttttgatattttgcgtttaggctaattacgcagaatgggaaccgcctcatggacaatttaggtttaggcatccatggaaacaatatgttgccgttggtgcattactccggcagtgtgcctacaggattgatgccttgaattcatacatcaactcagattttcaggtaatcgctaactttttgttaggtgtttgcatatttaattaaaacaaaatttgaaaatacataaaagaagaaaaactaatatgctattatgctataactatttttgatctaatacaatatatatatctatatatatatatatatatatatttacatgtcgcaaatgcaaacacaaaaataacatcaggttgaaattcttagtctgttaatttgtttatatagtttttttttttagtgtaaacatgtatagtagtatatgtttctggttaacgtgtttctaaccctttgtttatttcttattttttctattagatcccagtggacataaaaaagaaattagaaacaccattaagaagaatgagctcggaatcgggaaactcaatgaaagaaatgtccatttcactaaaacaaatgataaaatcatcttcttctgatatccatgtctcaaactcacaagctgcatgcaaatctctttctactttacttaaatcaggcatcttgaacgatgttgagcctcttcaaatgatctcattgatgacgactgtctccatgctcatagatattgttaacttaaccgaaaagatctcggaatctgtacacgagcttgcatccgctgcaagatttaagaacaagatgaggccgaccgtgctatacgagaagtcggattccggaagcattggtcgtgccatgccaatagattctcatgaagatcatcatgttgtcacagttttacatgacgttgataatgatagatcaaacaatgttgatgattcacgtggagggagttcacaggactcatgtcatcatgttgccataaagattgttgatgataactcaaaccatgaaaaacatgaagatggtgaaatacatgtacatacattaagtaatgggcatcttcagtaagtaattcaactcattatttgaggagcagtcttttgtacccgcaagattatagagacgagaccatcggtatataacatattcgggtatttcattcagatttgaagtttgttacaaatactattgtcgcctttgatcatttttgaactattggtcacacatttaataaagtcttggtcttcgttttcctttgcgttactcttttaaagatttttatatccaactgatcaaaaaatttaaaaatagcatggttttatttttggattatggtgttttagagagctaacctcagtaaataaaagaacatagaccggcgccagataaagacaagtccggcaaaaactctagattgttattttctatgaatataattaattttattccaaacatatatcgtatgaaaaaaaaaatcatttatcattggaggaggcggtgatcaggcgcagtgagaggaggagtcggttaacaaaagtggtcttggccagtgccaaagcgtcattgtaatcgctttcaattctcaaaaccaatacggtaatatgcacaactaatagaatgtttcaggtgacaaattttctcactaaagtcaaactttcatacttgccgatgaagtaacaaacatacagtacgttcaatacattaaggatatatataagaaacaaaagctggaaattgtgtgaatttagctaggttagattatagtataataaagttgccttgtacgattggggtaatggctaatggattccgtacgttgatgccaacttggtattggcaaggctgagtgtgactcggtgcaaaaagcaccagctgctatctaattccgcgttctaaccaatactacattttcatttattattactttttacaatccataaatctctctgctgtggagggttgatataagatccgaaacttctttgttgataaaaaaaaatctaacaatcttccaagttcaaatctcactcaggaaatatgaatgactgaatatttaattagatattatcgaaattgtgattcttgttgacaaaaaaaaacaaatctcataagaagtggtgatgtcagttttcgttgagagaaagagaatttaagtggatatgttcaatatacaaaaaaaaaaaaaaaaaaaaaattggacaatttggtcgaatattaataaggtaggtctaaatattagtgaaagtaacatatgtgaatgcccaaaacggacggatattttactagctttgaaacaaagaaacgatgggacaaaatgacaaattgaatgtctatttatttggagtttgtcatgattattcatgtcaaaaacgcaaactattattaatagactgtttattttattattttcttacactcgccgaaaatgttcagaatcggaaataattagatgtaacgttcctgtaaaaaatgcattgagttttaattttattttattttcttaaagataaaaaatttctgttaaatgaaaaatgaaagagttgtgaattacgtttttttttttaatattgattataaatgtacagctagcaactttaaaaatggttagaaaacaaatgttggatagcactattttatttttacataaagaaaatcttttggacgtggaattttaatagaaatttcggaaataaattaagagaacaatactaaagtatgctactaatagccgcttttaaatatcggataaatcagcaccaaagtagaacttggttacgtaagtactagtctctgcctctaattaaaaatactctgtctccagttaattatatttctcattttcaatttctttaaccctcaacgtacgatatgaagtacaacgcaccactgatttttttcttaaaataataaaataacatttcacgagtcccgaacaggactctctagtctcataatgctcattataaataacgacgatccatccgctcaaaacaacaagtcatctttctacttcttcctctctttctgaaacttatcagaaagttgagtgataatcaaagggtgtaatggagaaagtgagagagattgtgagagaagggaggagagtaggtaaagaagatccgagaagagtagtgcatgctttcaaagtgggacttgctcttgctttggtctcttccttctattattatcaacctctctacgacaacttcggtgtcaatgcaatgtgggctgtcatgaccgtcgttgttgtttttgaattctctgtaggtcagtattcgtcatgtgatcagaatcagccactttctaccatttgaatatgtctaatattcagcgataaacattttgtagatttttctgtataaatttggctacaaaaggttgtttaacttttgtttggtgtgtaattaggggccacacttgggaaaggactaaatagagcagtggcaacattggtagcaggaggactagggattggagctcatcacctagcaagtttgtcgggtccaacagtagaacccattcttcttgccatctttgtctttgtcctaggtaaccctcataacactcatatttttttattttttttatatgaaattttgatgatttggtccatataaccttttcggacgggggctagagcgaagagtctagaaaacatgcatatatgcatacatttgtctcgaattaaagagcgaagactaacaatatatatatatatgcagctgcattgtcgacgttcgtgaggttcttcccgcgggtgaaggcaagatatgattatggggtattgatattcatattgacgttcgcactgatatcagtttcggggtttagagaggacgagatattggatttggcgcataagagactatcgacagtgataatgggaggagttagttgcgtgcttatctctatctttgtctgccctgtttgggcaggacaagaccttcattctctccttgcctccaactttgacactctctcccacttccttcaaggtttgtcttttcctttgggttgattatatacaatccttacctaaaaatacctctacaaattaaaacaaacttttcgccccacaaaatactacaatgtataaacttcttgaaaactttattttgggaaaaagatttacggtatttttttagatttctcctaccttatattcaattatgaattaaaaagtggtaatttggcagaatttggggacgaatattttgaagcgacagaggatggggacatcaaagaagtggagaagaggagaaggaatcttgagagatataaaagtgttctcaactcaaaaagcaatgaagaagctttggtgggtactctctctagctatttccctacttctccattcacttttataattataccctttttgaaataacttggactggatcttgtattgatataatttgttcatttgtgtttaggctaattttgcaaaatgggaaccgcgtcatggccaatttagatttcggcatccatggagacaatatcttgccgtgggtgcattactccggcaatctgcttaccgaattgatgccttgaattcaaacatcaactcagatatgcaggtattacttttgctataaatttgataataataatttttatttaaaataatagatgaaaacaaaaattaaaatactaaaatcacaaatgctaacacataatgaaattcttagtctctgtttttttatatggataatatatgttccttctaaccgttggtttatctcttgtttttctatttagatcccaatggacattaaaaagaaaatagaggaaccattaagaagaatgagctcggagtcggggaagtcaatgaaagaagtgtccatttcattaaagaacatgacaatatcatcttcttttgatatccatgtagtaaactcacaatctgcatgcaagactctttccactttacttaaatcaggcatcttaaacgatgttgagcctctacaaatgatctcattaatgacgacagtttctctgctcattgacattgtaaacttaaccgaaaagatctcagaatccgtacatgagcttgcatccgcagcaaaatttaagaacaagaagaagccgtctaagtcgaattcgggaagcattggtcaagccatgccaaataaatctcatgatgatgatgatcatgttgttacaattttaggtgacgttgacacatcaaacaatgttgatcaatcgcaatcgcatggagagatctcagtggactcatgtcatcatgtcaccataaagattaacgatgatgattcgatccatgacaaaaatgaagatggtgatatacatgtacatacaaatcgtgtatcatgtgatcacactaatgctagtgatcttttagatagtggcgttaaaaagaattagtaataagttataactaactatttattatagggtttagaggtggtggggaggggactaatcatgtatattaaataaagttccctcgaacaggaattgttattagatccaacctaattcgaccacggttattttctctgtttttccgatattttttgtttccaacaaagttatgcagtttctattaacttgaatgttgaaaagttttaacaatatattttctccgtggtgcaatatattttccgcaaacaatgatagtaatttaacaaagccaatttgtaaatcattaaaaaaattaatatagatcaaaacaatataaaccaaaaaaaaaataaaatcatatcacatctcagtatttttaagaagtatgatgatgcacacatgtgtaaaatattttctaacccaaaacaataaaggataaatacgtttattcattattcgcttttgaaaagacaacaaagggttacaaatacatatctaattttttttttccagggtgatatataactaagaataattgcagataaatcaatgagcacttagcccttaggtggcagatacgaatatccattgagaaaattgaaaatcattcatatatccctaactatagactatgatatacatgcgtttttcgaaaatttaattaatcaaagagaattttttgtgtacgagaaattgattgataagtgttattgcgagatgtcattattaaccctaggaaaatgttaatgaaggtgccccatgttctcctaagctcacgggctcgtgctcgtttgtctatttccccttttacgtccaattgctttttcaaaattcttgaacacaatggggtgcaaattaaagtggagggtaagtaatataggtatttgtctccattattaaaccttacttttgatttaaaccctgatttgtatgaatatccgttaacgttattccatcgtttgaatatataagtctctaatttttttgttttttaacattacttggcccatttctctaaatgcttttttaaaattactatatttttatggtttaaaatagattttcgagagagcgagacatgtagtctatcaacaattttcataaaccattttcagagagattaaaaagaaatcttgattgacgtctaaataataaaaattgaaatagtattaaacgatcaacaattttaattaagagaaaaatatgattgagttagaatccgaaacgggtcaagctccatccatctagtccatggatcacttaatcgacataatagaaatcaacacatgataatcaataattatgatgatcttgaaacctgtaggaagtctttagatcactaattgtttacttaattaaattgattgatttgcctagttactgagtctgacaccacccagctctttgatcgtcttagttaaagactacttcaactcatgtttcctctgtcagttcgatatattaccactaacatacatatatatgtatatttgcatgattattttagtgtttctacattgaaaggactacaattagcctccatcaacattcaggtaacacaaaacaccgttaaaatcacatacaacattcaactgcaataagactttttttttacatataaataaataatgcagtcattggattccaatagtgtgtcacattataaaaagcacagtaaattaaactttataaatagacaacttcgcttatcatgagtgctccacttacgtatcaaaagctcttcacatgcaccgtgcaccatcacctctctcggctttccgcaattaattagtaattaccattagttatatcaattgaatactaatgtagttccgtagctaattaagtaaatatttatcttatgttattataaggacgttccagattaaacgaaccactaaaggacaaataacaaaaatgtctagtgattacgactttaatgcgtatcgagtaaattgtgcgaattttctatttcctaaagtcgccactgatgtgattatcagccgtacatttaaagtgggaaaaggtacacacaagtcacaacatttgtgcccaacataaaacgcatttaaaattctttcgtttttctttcttttgactttcgtttacgttttcacacaaaatgtatcactcttataatcttatatttttttagtttttatcattacggatgcaaataggtggctttctaacattagttaaaaaaaaatattagctaggtggagtagtatttgacgatttatctgttgtcattttgtcaacactcaacaatatgcttttagctaatattcacattagttcctccaaatgaacatggttaccatcagtccacaccacactttctagctaaagatttctattttttgtattttcactaagaaacgccaacctctcagttcaactcagctatcttcttcaggatatagagaaattttctgtggtgaaacaattaaaattaccaccactatcaaacttcacaaatcactgcatggtagtttgtcgttcttgccaattttagaatttttgtattggaagggaaaaataacaagtcaagttttcatgccaaaatacattataagaatatgaatacaaaaggttacaaattatgaaattacaaacacacattcaaagcaaaatatagataatttcccccaatgctttgccaaatgcccaccactctgcgcctcatagctcgtcctacacgaaattcagaatcataacaaacttacatttttagaacagttaagatgattcagtactaaactgcataaaccattctttttaaagtggttgagatagaaggaacacttacatggtaatcatccatataatcacgtggattcggctgcaaaacaaaacaaaacaaaacaaaacaaaccatttccaacaatattcactcacttggtttccagataaaacagagttgagaaggttataattcatttggactcaaataagtacttacccgtttgtaacgcctcctcctgtctccataccggtggtccctttctttccgcctgcgttcaccttcttcccgtgctatccgagcttcctgtaaacgttgatttgtatggccatgctcgttaactaggatatacagagaagacttgaaaagagaacaagaacttttttgtgaactacaaacctcatcttctctagcttttctttctttctctgcttccgcaaataactccttctcagactggtgcatatggccaagtatatagcatatcaaattcactaataagacattttcgtatataatagcatgcagaaaatccatttgcaattactacacacttgcaagatcaaaaaacttctttgattttatccaaaaagaagcaaaaagatatacaaagacttggaaatctacctccctgtgttgggcaaaatagtcatccacgatgcttcttgcatatgccgggtcatcgcagatcaatatattgtcaaagattgagccagccttcacctgcagtgttaagatcatttttttttcattcagatgcactagataagtttgatccctcgtctaaaatgaagactttttatcagatcttttctgtttcttttggttttgttttcaaccctaaaaatttggatgacctatatgtacaagcagcatatatatgttaaaagaactaattggcagtgaatattatataaatattcatccatatctggtgatgatgtagtgattataaaagttaatatttgatggaattcaagaaagctctagaacttacctgccatacttcaatgcctgcatatttgatagacttcagaacgtaaagatctggatcatcttcaaattctgtgcaaaaccgagaagctcaagcttagtatttataacaagaagaaatccagctcaaaatgaacatacacattaaataggtagaaacatgcctggattatctatccatgggttcttccattttcccttgtagttcgggttcttgattctctgtaggaaaataatgttttgagaaatgtcaaatggagaagaagaaaaaacagtaatctatataaccattgatgactgtcatataataacctttgctttccaaggacctttgtacgcagaatttgggatctttggaggttcccagagaccattttcttcctcgtcccagtcctcgggctaaacaagtagagagagagatacaagacacaaagcttcagactataacacagtaatgagttccaaaaaagaatgagtgccataatgtcagaatttgcagtgatatagaatgaagaaagaatgatggatctctgagactaaaaaataacgaccaatcatttaaagaatctaatataacagtacatacctctttagctttacgatctggaatttcacgtggaatagaatcaaaaccctggttacaaaaggaagaacgagccagttgcctgaattaaactaagaattaagagaatgggaactgaatagcttcctttcaatacaaattgtattttctatattgctaagtttactaaaaagttacctcgggtttgacatcgttggggtcatcgatgtactctctatcatcccagtcctctggctgcaaaatacagactgttaagaatctatcaaggtgaaagctaaaagaaatgtagtgttactggcttactgcatatcttgctcttctatgaaaatttagtataacctcagatcaaaaccataatccattttcctcgtcatacatcataaattataatagctaaaagctaagtgtaactatctcagaaaaaggttatccaaccttgcaaatgtttggttcagaaattcacattgcatttaagaaagagtctatgaaaccttataagcacccagacagttaccttctttgcattcttgaccttgatcttccttggaggaaggatgtcccagtctgtgtacatactgccaaattctctctctttattatccaccagaacgctgtaagaagcgtcaggacgcagaataaatgtgtagaaatgatttaatttgtctgtttcacattgcaaatcctttttgattggataattctgtccctgatatgaaactataacatgaagcttcttcgtctgtgttccgcatatatctggtccaaacattagactgcatagaaaaactaatgagaatccccaaacacaacaacaccatgtgacgactttgttgtaaaaaacatggacatgtaatcatttatcaaagttcactggattaactaaatcaacgcaacttgacttagattgcaatataacattctatcaactgatgttcattgaaaaagcattaatgtatgattacctgtatggagtatcaccaccaaactgcttctggttaacatagccagacaggagcttaatgtaagcaccaccacattcaatgtcttgttcaatcttgactgagtactggacaacaagagtccggtttttgttgctaaactcaggaatctttgcagaaatcgcataatgcttggcatcattataagtctgaatacctaaacacatcaagaaaatcaaaaaagaaagaaaaagatactaagttaaaccaaataaagattctatattcctcaagttaactttcgagatcgaaagctagtacacttgacgatccataattgtatcacagaacaaaagagctcaagatctacacacaaacctgctgctgaaacaaacatatctaagaactaaaatagaaatcctaattataaccaattaaagatttaattttcttcaagataacttcaaatatcgaaaggcagtagacttgcgaactccatgtcttagtccacataacaaaagagctgaagatctacacacaagtggcagctaacaagaacatatcaaagaactaaaacactgcaacataacaaagatcacagggagaatggtgatatagattctcgtattctgaaaatcaagtgagacccttaacgccaaaaagacggagttctgcagtgtgcttaaaggtgggcgaaaggaagtacctttattgtcaggatcgccgggccatttaccggcagtgtgcttaaaggttccagctttgccttcgtttcttttccaatcagacaagacccacctacttttccatccacctgaacacaatcttactaagttaattccataaacctataaatagaaagccaaaatccagaaccatagaatcgttatattaaccagaataggaaaagcaaagcctataatagaagattctagtgaaggatggattcggattcactatcctaatcaaatcaaaatctaccaaggaaagttactacttactaatcatagcaatatattcaaaaaggaaacaaaaataacaaatcgttgttttgtttcccagaaaaggaaaaaaaagagagaagagtgtttatatatatacttcaccttcgaaatgctcctctaagaagatctcggagaaagccaatggggcaagagttagtacagagacgaggaagaagaagcagaaaaaactgagcttattttgaggtaatcccatttttcagaatttctcacttcatcatggttactgaaaaattgtgcttgggcctttatagcaaagcagaatgttgactcagtgtcgtttggtttagttacaatattgcccctaaggtttggatttttctttttttctctatgttgtttttctcaagtcgtcgtcgcagtgtggagtggactgaagaatattcaaagtcgtttatcatcgtaagaaatggggcaaaactggtctcaaataataattgctatgtttcttgctctaatctcttatattgccattatgatttataacaaatcttgttctaactaaatctagccgaatgttttgtacatgatacttgtagccaaatgttttttatacgaatatgaatcataaataaattcaattatattttctttattttatgagagcgaagaatatattttttttgtagtcaaaaaataaaggttctacaataattaaatgtgggataacgaaatccaaaaagctccaatctaaaacagtacaacatgtcattaacagcatgttcagtccaggcccaataagcacgaaatttctcttctccgaaattaacttaatccttgagtttatttggaaaagacatttataccccttgttatctcaatggttagagaacacgtgtgttgcgcgtgagcatcctccattattacaccaccgttggcctccgacgacggctcaagcctatcttcgtcgccggcttctccgatggttaccaatcgcgtagacgtcttctggcacgaaggaatgctccgacacgacgccgtagaaggcgtcttcgacactggatacgaccctggattcctcgacgtattggagaagcacccggagaacgccgatcgcgtcaggaacatgctttcgattctccgacgcggtcccatcgctcctcatgtcaattggtttaccggtcttccagcaatcgtttcggagcttctaatgtttcacacttcaggtacatcgctctaaggttcgcagaaaagaaggaacttttataaaaacctgtttctgaatttggtagttttgacaaatcttaaccttaaaaaattcgactttgatttgtgattattgctttctcatgtaatccattgtgatccttgtacagagtacattgagaagctagtggaggcagataaatcaggagaaaggtgtgaaattgccgcaggtactttcatgagcccaggctcgtgggaagctgctcttcttgcagctggaacaactctttcagcaatgcaacatattcttgattgccatgggaaaattgcatatgctctggtacgcccaccaggtcaccactcacagcctactcaggctgatgggtattgcttcctcaacaacgctgctcttgctgtcaagctggcattgaattcgggttcttgttcccgagttgcggttattgacatcgatgtacattatggaaatggcacagctgaagggttttatacatctgataaggttcttacggtgtcactccatatgaaccatggatcatggggatcgtcccacccgcagaaagggtcgattgatgaacttggtgaagacgtgggattgggttacaatctgaatgtccctttaccgaatggcacgggtgaccggggatatgaatatgccatgaatgagctggtggttcctgcagttagaaggtttggacccgatatggttgttctcgttgttggtcaagactctagcgctgtaagttctttctttgcccaaatacgtgtagactatctgactgagcacttactcagggttttgttcgcaattattgttttggttacaagtaaatcgcttatgtatgctgctccaatatggctctgctgtgataagtctgcataagtagttagaagagtgcagctgttgcattagtcatgtcatctctctaatattcagtcagcaaaagataaacgaatcagtataaatggaagatgaccaaaggaggaatgggttgtctagggatttgggtattggttttgcattggaagagtctagggtgctcgagaattcaccataagattatatctttggattctttgcttcagtttgcattcttattcagagaggaataaaggaagatatggtttttatggttcttattacgctacctagtggtccccttgtcgagcttagtgaatttatattcagcacagatgttactaacagagctgttcactttttggcccatggaagttaatgaattttctggttcacaggaaactctctcttaaagttctccggcttaaatccattagtttggtttcaaacatttgctagggatgctgattgtctagtttgtgaggggatttgaatgtcatggactgacggataaccactatttactgtcggatctgcagtttgatccaaacgggagacaaagcctgacaatgaatggatacagaaggattgggcagataatgaggggagttgcagaggagcacagccatggaaggttgcttatggtgcaagaaggcgggtatcatgtaacatatgcagcttactgcctccacgccatgctcgaaggggtgctgaagattccagaaccgcatctatctgatccgatcgcttattatcccgaagaagaagctaatgctgttgctgctgtggagtcaatcaaaacatatcacaccgaatttgttccatttctcagaggaacttgaaaatgggacgtatgaatgagtttatgttattcctcgttgtcttgtgaccttttggaacacagatccaaatcaatcaggtcaaaccgtatatatcaaaatacttgttgatcaaactatcttttgtatgaaaacttattcacacgatccgactttgttttttgagtttttttttaacaactagttaggtttagactagaagaacccaaattttttgtgacagaataataattttgcagaaagagattttataaatatattccagatacaatcaaatcaagcttggaaataagattggcattgtcgtgagtatcactgtagagagaatagctcgcgggtccgtaaaaaatgcatgtcaacctcgatcgtggaaatatgtcaggataagatctgtattctcgtctctatgatttgttcgaaagaaacttgtttatatgaatcattttgtaagaaatgtttgttgcattgattccaaatactttagatgtgttcaattagtttattcgctttattttttattttatttttggtaaaaggttaataaagacaaaataggaaattgcattgcaaatacaaatacaaatacaaaacaatgaaacatctatattatgaaataaattattaaaaattaaaccagtaataaatgtcgttttgttgatccacactcaatctaaaatgtacatctatgttcacttgcagaatgaatgggattttaatgaactttaaaaactcaatttcaagtaattacaccaatccaatgaacatgtttaagtttgcagaaaatgccaaaatgaattcatctttcgttttatactgttaatcacttattcacaaaatagaccatcattgtcacttgcaatatgttttatttgattctgaagaggattatgtatcgttttcaattgtccctgaattcacaaactgtatcgttttactaaatttactgttgctgctaacaaagtccatgtatcgttttcagatatgtgtttgaaaaaacaaaatttaatcgaactgttaatctcatttcttatctgctagacaaatacaatacacattctcatgatctagtactattcattgtaaaatgactgtaacaataagattatatattgagctactagcctactacttatcctataaaaatgtaattgaaattaacttatttggtgataggactatatatcttaactaaagatgaaaaaacaataaaaataacaaagggaaatcttcactttattatggagtaatagaactctctaattatctaaggaaaaaaaaatgcaagtaccgaaaaataaaaaagaggaacattgtagtatagtccccacttgtctctcttcgtctccaaataaaccacattagtcttttcagattttttgtacacttccttcatcccccacccatctctctctctctctctcatccttcctctttcttctttgcttgcccttttctttttattttattcttccaaaatcaaatagttccttctttgatctcattgggataactaaaagtttcaagaagagaaacatatcattgaagagagaacccacacaaaaaaaaatgtctgtagatttctcatctgagcgtgtttgctatgtccactgcagcttctgcaccacgattttagcggtaatctccctctcctctttatattgtaaatctttctcaaaagaaagagtgttaatttggtacttactctgagctagatccccttttctctaacttaaatcaaactgttatataagatatatattatttacctatcaaagatggttggtgatatatctatatgtgtattgcatgatgaattttgcatctagttcatagatcaacatatatcttttctgtgattaattattgatgaagatatatataccggaaagtttcttaaatttcagaaaccctaaatcttattccttttttttcttctataacgcgtgatgagatacctaaaagaagcaaaagaagttcggtagttgaaacataaattttagtgctcaaacaaagtaaactcaaaggaaacagctcctgatcagatttagggctctatgagtaggttttaagtctacaaagataacttcttctttccctatttttactatttaaagaatttttatttttattttcgttttaaggacattttttcttcttctctttacaagtaaatccttcattttttactcttgtatattcatattttctttggtgttagttccctaagtttcaacagccattaatattttctgtaaaaggaatttggtagatagcatccatgtgatgcagtctcaaaattaaactttcactagggtcttccacctttatagtctgacttcatactatctaatcttttgatatgtataactgtagtatgtgacacatgtattatacttatatcatatcaatcatagatctttcatctacaagcgtggtccatgtaaaaatgtttacatcacatcaccagctgattattttaaaatcattttttgggttctccaaaattctctttttatgtttctcacagtgtgctgaagctattttattacatgtatatgattttaaaatttacttaaaacttcactaattatctccagctttatctaacggttttatgtgacatttaataatatccacagttcttccgtacatttttgatatgtgtgtatcagtgatatacgtctatctatatgtgtgtgtatataaattattgatctatgatccatataattaagtaatcatgagaaactaactagctaggttatgtagcttaatggtttagcgtttagacaaattaaaaaaaaaaaagtttatcatgagaaactcttgtacactgatattattcataaacgttatactacatatacataaataatggagatgtcgcacgagtctgattaggaacaaaaagggccatatttaataaaaatgttagaggtcttcttgcacaaaatagggtgtgtattgtagtggaaagtacaaaagatttgttctacccagttccagcaacaatttcttgatctatacaaaagctgcaaactgttaaatcatggccgatcttgaccacttaggattggatcctttctctctctctctctctctcgctcacacacaaaaatataagacgattataataaaaagatggtaccatcacatatgaaggactttatgggctgttgttaaggtcacgtcgttttctaacatgactgtcttctccttacaagcttcatcaaccattcttcatctctttactatcttttatcatgttgccttgaggtcttgtgtgtcagacatagaattcatcagaacccaccaaacagaaaaatacatattcttttatatatgttaaatttgatcatttgtttgttcgaatattagttgtggtaatacttctataaggttactattttctatttcatgtgataaaaatctataggactatctttacataggaaataggaaatctacaattaaccaaaaacaaggtgtgctatagcctataatggagtagtacttaacattctctctcaagagctctcgttacattagagaccagccactcgaattataaaatagtgataaaacaagacaattaacgtgtcccttataatgatcaagacatgtatgaatgattaggtaagtgtaccatacgcaagtttgttcacacttgtgacggtgagatgtggccattgtaccaatttgctatccctcaacattggagtttcacttcatcaaacctcagctcctcccattcaccaagatcttcaggtatcatattatattcattagtccttcaacatttttattattcccatttagaaatctggcttatatagtttttgaaatcatgaagcctcatagacagcacacaacctctctggtgacaaggaaagattgtgcatcgtcttctaggagcaccaacaattttatcggaaaacattgatcgtgaggctcctagaatgcctcctattcgccgtatgtctctctatttacctcttgcattccgtacatagtatttaaagtttgtgtaatatatgcaatcaccaagctaagtgagtccataattttcttttattttcatgtggcagcaccggagaaaagacaacgtgttccttcggccctacaacagatttcatcaagtaagtgttaatcctttgatgaaatatactaattaactctttcgctacaactttaataaactaaattgttaattagggaggaaatccaaaggattaagggcttgcaatccagagattagccaccgtgaggcattttagcactgctgctaaaaaatgtaagcttccttctttaccattctttttcacaaggtagattgttgctaagatagctcaaaaaaaaaaaaaatccttatcgtagcttcatcgacgatgtcagaattatatagaattaggaagaagatgcaaaaaaaaatgaaaaaaaaaaataactaaagttataaagtcttttaatactgtatttttagattcaataactctgtaaaatgtatttcttaactatttaaaaaataaaataaattattatctttttaaataacctaacaagtaaataaataaaaaatgatatacgaacacatgattggatagtagttttttttgtttgcaataattagtaccaactaattgaaataactgtggtgggagaattctagggcttggtcactctctttgaaaatataagtgtgtatgtataccaataagatagtggttctactatttataattggtggaatgtttatatatcacagtattagatgttttttaaaaataaatttgcctttcaatttttgggtgtagtgggcacattttcctcacattcactttggattaaagctggatggcaacaagaaaggcaagcaattagaccagtcagttgcaggccaaaagtctaatggctattactaaagcctttatatatatacacacatatatacacttatacgtatatatatgtgtatagatatatatgcgtgtgtatgatttatgtttatctttgtacgtacgcattaatgaatgtgtaagcagagagctgatgatggaaagagatcaggcgaggaagaagaagatcatataacgttacatatatatacatgtatgtatatatgttcctttcttttttcttgcgtgtgcttcatctataacttcatttctagttttattctcctaataagtgaagtctataaatttgaacctaaaatgtttaggaagaatcttctttctgaagattgtaatataaatttcaactttactcattctgaaaaggtgtggtcacgactttatatatataatccctagttttatggtaattattgttgataatacctgaggttaaagggggatgtatgtggaaattgattgattctttatcaatttcatggatatatagagtttgtgtatacatagaagcacatgtatatacatagagtgagtagtaaaagatatataaattccatcttgggatataaaatggtaacttttatggtgctgagataattctgaaactcactcattccaaagaaacattctttgcaaaaagcaaaggcttccaatgaatagttcacttgggttgtttttaatactttttttttaatcaatgagaaatcaatgctcgtgtcttctcttgtcagccacaaaactcataatccggttgagtatcatgattaataatatgtcacacttttatgctgctgatcggctcactatttcaaagaaaatcataagcagcgtgaaacgggacggtctagttttggtcgataccgttttacatcaatgatgcgaatttgacaaaaatataattttttctcgacggtaggcacatttttatgggggaaaaatggtacataatgagctattatttgtctatgatatataactaccagttcggtcgtgtattaatttgcagtgatcgttatcaagattcgaatcgaaaccatgggttgttttaataacatgggcgatttgactttgtcaacgcatactcgttttgtgaaacttttgtagtatgtggtctacataaaccatgcattctcttaaaagataaaatattatcgtatatgaactcttttaagtgactactgaatattataagaaaaacgttgtctcttttgattaaatgtaatgcagaatagcaattataaaagtaatgctatagatattttgttgtatagctgtggtcaacttttgctaaaagaatgccactttggaaaaaatgactcaagcatttagaccaaatagcaatcactatagttttcacgtcaacatcaaatttctattcagtattacgtactaattataacttcattttctatttgtccaaaatggacactaactccgcagctggtggctatgtttaatgataagcatctcgtagagatcgtatatccaccactcccgacgaagggttagagaagtggggtcgtctccaatgtgtgacaacagtcttagagacacttacgtacaccttccatcgtccatgcacaaatattttaagaaaacaggaaagtagaaaagctttggatatatgattttgaattgagataggtataaatatagtagtaggagagggagaggaagagagggaagagatgacatttttaatgaagggtccaaaagaaaaacagaatctgaaacgtcaaatcatgttagttgaggtctttggctgtttgtgcctctgacgggtcttgtccacacactttaatgtttccttttctttctttcttttttcactgccttttttcttccttcattattatgtttttttgcttcaatcttcattattaccgttttcattatcctttgtttgtttaacggtaaatctgtttcggaacaatttagtctaatagccacaaataaaagtagtgtaaagaatgtattagttagttagatataattagttatatataaattgccaaatcaagtccataacaaattagaaacgtggatacacagctttatccttaattttgtttttgttttaattagcttacatgattgcatgtgacacataaatgacaaaaaacaaatttgacataaaccatactttaaaaataataaaattatgtattaatgatgttattggtttaactgatttttattttagaagtctacactttaaagtttaatccctacctccaacatctttaatcctaacaatcctatgaaattgtatatgcttaagcagttaaccctaacactgtgtacccttacgctaatttaaaagattctatgaaagtacttctaattttatattatttttagcaatagaatttcataacattaatttctatgctttataaacatgtttaattctagatatggtataactatatttcttaaattgttaccctaaagtcgtataaatgtgtgtaaaaaaaaaagtcgtataaatggtgaacaattaaattgcaaagatgaaagaacacaaattattcacgtggccagcccagcccagtaattgatagatttgttgtttaagcccagcaattagtatcgaatcgaaccaatattctgaaccgaatacatcatggttacacgaccgacacctataaggttgtcttctttgatgatcaaacctaaagtccgaaaaagaaaaaaaagaaaaaaaacccgaaaaactttagctcattgaaagactaattgactaaagacatggcaaaaaggatactgtatttagtaattgtttgtgtttgaattgattacgtcaaatatagtttgataacgagatgcatattgcaatcccatagccaaactagaaatatacaaatttgaatagaaaaagaaacgaactaaggcaagtcatatacggcaatgaaggacatcaatacacttcccatccaaagcttcccatctttctcctccacttcactcactgccttcaccactttccctttactatcttccaacacctttagcactttcccttcttcactgtacttcacagctacagcatgaggccaaccacctacctgcagcaagtactgaaacttcactgatatcggcagcttcagaaagaacttcctcaccctcgggtaatgcgccatcaagtgtgtgaatatgtttctgtggcagtgcaccgccacccagaaatctccatctttgtttgtgcggatgttgtctgggaacccatgtaatagagctaccacttctgacgttccagctttctcccctttcaaccagtatttccgtaatctgaacaacaacaacaaaaaatgacttagattctgttcacagtattggagtttgtttctagcagaatcattgaaacgatatggaaacaacatgctaatcgttccattttagcttcaatcagaaatgctgattgcagaagttatgccaagtatatatacagacaatgatgtggaagtcagagaggaattaagatgaaggactcaccttccaatagatccttcacaaaagatgaaaaaggagccgtctttgccgagggataatccgttaggaaactggagatttctcacgagagtggtagtctcctttgtttttggattgtatttcaacaccctcccactgtcttcccccgagacaatcaaaagcataaatttcctacaaatagcgcaatcaacatactcaaacaaaagtagtaactagacatcggaagctcattgcaacttcttgtagatcctcaaaagataaacagaattcaacatttaaggctctgaagttatagccgcagtcaaaattttcaatttatgtgcctatgacagatcatttcaatcaatataacatgagttccaaaaagcaacactttatgcaagccactgatcaggagagttagtaaagatcaaaactttaaaaccttacataccttcgttggaagaaagagctgctatcagtaaagtaaacattgccttcatcatcaatgtcaagatcattggtaaatctcaaaggcacaccatcagcctcgtttgtaacagaagttgctaaacctccttccggaccaactttcattatccccaaatacgcatctgcaatgtacaaatccccatttttcttgtcgaatcgaagacctaaaggccgaccacagatatcttcatcctttaagtaatccaaaagcgatggcttaggatcacatagctctgacctaataaaacatcaaagttgagaactttactggaaacgaaatggtcacaaagactcgattgcaatcacaagactcaccgattgttcgaagtatatgcgaaatctgtccaacgagtgccattccaaaagagaattcgaccgtcggcgactccggtataaggaccacgaccttgcggatcgaaagcaatgctctcgggaccttgaacctcgttaagaaacctgatctctgaattctgcaacagattctggcggtctctctcctttggaagtgacgataacggaggcatgtcaatcttgtaagttttgaaatccgggaacttggaaatggagctgtgactgaagggatcgatagcgcaatagatggcaaagacgagaaagatcttcgcgagtatgctcatggccattttctttgtacgagggatgatgatgatgatttgaagaagaaaatggttggggaagttttaaggtagagaagtagagaagaagtagttgcagtagagtacacttttctggttgaaaatttaaaacttttctcaattgctgctctttttcgatatattaagaaaagtcaaggagcaattgcaaatcggctaatctgatggcaacccggtattaaattaaaaaaagaaacatgaaaaccgggtgaaccggatcgaccttccattttttcggtagaccagttttatttattctgcaaataataatcgtcttcaatcagagaaaaagtttgcagtgagaaggagattgattaatcgatctgagaaagatgggagattcggagtcatttgttgggaaaaattggaatggattgaaggatttctggagtgataggttatcatttttcgaaaattacaccagattcaccaaacgcgacgcgcctcttccttcttggtcttcctccgacgtcgaggaattcattgcctccgatcccgttcatggacccaccgtaatttccttctatctttctctcgctctgtgttttggaatctatagatattgttggtccattatctatgactcggctggtactcgattttactctgctgtcatcggtttatttttttcttcttcatttgattttccattggaaagtttctgttactttttgatataataaagttccactaggctaggtttttctggctttagtccttggaagcacagatacaagaggactaagcccactgcatcgtcgtcggatggcataaaaaacctagcaaaaactgaactgttggtttggtatttggtattcttactgaagatcttacgtttggtactcattgtgtatttgtggtcatcctatccagctgaaaacggctagggaagctgtgacgtttggtgttaccggagctgcacttggagctgtctctactgctgcttttgcctggaaatactccaggagtccacatggtaatgacatttctctctctgtgaataactatttgctctttataaacctcacttgtttcttcaaacgaagacacaaagcttgcaattcagggataatgggattatttgggagtcaattagacctttatgtcctatattgataatacttggaaactggtttgaaagtttatgcagttctcatggcgcttacattgtttctcaatactaaattgctgtttatttttcttccaacttttgacacctctaaactactgctggtgcgacaggtgctgcattgtccttcttaggaggaggtgtttttggttggacctttgggcaagaggtcgccaaccacacactgcaactctacaagttggacacaatggcagcccaagttaagttcatggaatggtgggaacgtaagtctcaataaaggtcctgaatctaaaacgaagacgtgtgctgctttctcgtccagagtatcttcttgggaacaacatgaaatgctgattatccatccatttccagactttcgcctttgaaactttttctattctcactcttggaacatgtttgccttgtcttaataatacaacatgcctcatgaatgttttgaagatttgagaaaatgaattcaaagaaaccaaatggtctcaaaagaatcagggaatgacgactaccccaactgagcacatatcgaaacctttcctttgatgattcatattagtaacttttcttcatgttgagtttgttttttatgaaacttacaaattaacaacgaagcatttgctttcgtgtgtattcgtacaaatatgatcaagtagaggcctgaaattgttcatgactactgtcggtctattttttcatacaaattgctaactacaacacaaattgcccttcggacttgaagaaacaaaatccactcccattgatcatataaagcagatttaaataagtagcctctgaagcaatataccatacaaaccagccgagagatccagcaggaaggtgttccacttatttgaaagagttgaagaagctcacagtgtctgccagcgcaacgatgaaggcgtcaacgtcatcctttgtgttgtaaaagtagaggctggcgcgtgcacttgcattcactccaagataccggtggagtggctgtgcgcagtggtgtcctgaccttattgcaactccgtgctgcaacatacaatattcgttttcagttttcatcccactatggatattctgatgagagagtaaagtaggggtttgaggtggacggttaacattagaacgatcaagatgaatttgtttaatctagatcagttaaaacttcttacagctgaactcattactaatgtatgagaatcactcggatcaagtacttggacaggtatcatgtaacctagatgatctacgggttttgttttaacctagttatcaacagagtccaggctcgtgttcacacatgagatttcacctaaatcttggaataaagaagatcaacctcaattataggctgctaccacaagatatcctaaggtaggcatctgagattcgctttgaccactaagtggtaacattacccactaagaagagaaagaggtggtaggtagtgcccttatcctacttgaggtactacctcatattaaaagaatacgttcaagataagagaaaaccagtatgtgatgggacagatagctcccaattataacaaacctgctgatcaagaaaggttgccaaatcagttgggtgcaagccctccacattgaaggaacaaagagcacccctgtgaacactttcagaaggtctgggaccgtatatccgcacatcaggcagggaagacagtttctcgtacaaatacttaccaatctctacctggatgacacaagaaattaaaatctacagttagaaaacatgtgagaatctccgtgactgtatgtacgtcattgacgtctagttgtaggaaaataaaattaaacctcatattcatggattttcggcatgccaattcctgacaagtaatcaactgctgctccaagggcaattgcttctcctattgcaggtgttccagcttcaaatctgatacaaacttaaatatatttatttctaaactgcagcaattatgcagattagtaactaatatatgtagaatccctacctggatggaggttccgcataagttgaatggtcaagaaatacatctgagatcatttctccgccacctaaaagaggatcgaaatacaaggaaaaaaagaagtgggactcagtccagtcccatccttgattaaacagatatgataaactgttttcataaagaaatattagatagactgcttacctaagaatggaggcatggaatgtagaagatcactcttaccatataagaacccaatgcctgtaggtccacacatctgaagcatgattatcatattactataagcttgccacagggcttattatgcatttcatgaagaaaaataaacaattccaaccttgtgagaagacgcaactagaaaatcagcattaagcttctggacatcaaccaccatgtgaggaacactttgacaagcatccactagaactttcgctccaacatcgtgtgcccataccacaatctcttcaataggaagagaagatgctaaacaaaaagaaacataagttagatacttaccttctttcatggaaaaattaaacacatatacaagccaaacaaattgaatatgatgagaacatgaaaaagaatctaccaagaacattagaaacatgatgaacagcgacgagctttgtctttggagaaatcaattctctcaacttgtttatgtcagggacttcatcctcattcaaagtcacaaactttagaactgctccagttttttgagatacaatttgccaaggaacaatgcaactatgatgttcagcaactgtaagtataacctgaaaagcttgcatcattcacaatctcatttggaagaatctcaacaagatggattgataaaagtaaagccaaacctcgtctcctggtttaagattagaaagaccccatgaataagctacaagattgatggcttcagtggcattccttgtaaaaacaatctctctactatcagaagcattgatgaaacgagcaacttttttcctagctaactcaaattcatctgtagctttagcacttaaatagtgtattcctcgatgaacgttggaattatagaactcatagtaattctgcaaagcgtccaatacagctgctggcttctgagaagttgcagcactgtctaagtacacaagctttgacccattcacttcctgaaataaaaactcaatcaatggtaaaattgcttaattttcaaatccatacaattcaaagttaatcaggtttatggaaagtggacaaacctggtggagaattcggaaatcttttcgaacgcgatggccgagagagacggattcggaatcagtggagatggtggcggaggaagcggcggcggcggaacaaacggatagcgaagaggagcaacgaacgcgggagaagctccggtggccgatggagatggcgttagggaacgacgggagtttcatagccacaccttccatggtggagaagacgaatgaacaagagtgagtcttcaaagtcacaagttcgaccacaggcggcggtcaaaagattaatttcatctaaagatatgggccgaattaggccttttactccattaaatgggcccttggtttttaaggtccaatcaaaccggttaaataccggttcaaccgactttgaaacactacaaaacacgttatctaaaatatcctccatttagtagaaaaaggcagttgacagatatttatgaaagaagtaatgatacgtagggaagcgaagacagcaaaagtaaggtgtgagagtgagagatcacatggggaagagcaaagaggcgttgtcatttgattggaccgaccacttcgtatcgtctcatgttccttcgcatccccaagaattgtccacatgtcacactcacacatgtcttggttttatatgcagtcaatgacgagctcattattactttatgtacagtttcttatgcctttctttattacaaagaaagatcaatcaacgaatcacaatttataatcaagaaaaacggacaagagagtaagaagaattatgtcgccttcttgttcatcttgtgtcaatgtgttactcatcatgtgccttatgcttctgagtttatcagctgatgcgtacaagaactacactgtgggagagtccacgggatggttcgatattcaagagagaccctctgctaattatcagaaatgggccgattccaaatccttttctttgggtgatttcctcagtaagatttttttcttcaaccccattttcgttactacaataacttagcaaaatgttatatcgtttgttttgttttcaatatgtagtattcaacacagatagcaaccattcggtggttcagacatatgatttcaaaacatacaaagattgtgattacgacaacaatgaaaacaatgatacaacagagtggtcggctgcaaatccttcagcaacatctcctgttcccgtctcaataagtgttcctcttgttaaagaaggttccaattatttcttctcgggaaactatgatggcgaacaatgtaaattcggtcagcattttatgatcaatgtaacacatggtcagggcttaccagattcatcatcaccagatgatgctgctgcacctggacctagcgaatcctctcagtccggtgatgatgaagttgctcctgataccatcgtcccggccaatttcgatcatcctaaagatattgaaagtgctgatgatgataaagaggttcatagtaaaaaaagttcttcttccacaacaaaaactagtttgttttgttttgtctttatggggctctttgcatcattttaatcaaatattctttcatatttgtatgtatatgcattctgttttcttctttttcataactaggataataataatcaaagaaacaaaagagtattagtggaaattttaaagcagtgagggaataaagaaaaaaagagtaaagatcatgagttatcctttttttatcgaatatagtttgtattatgttcagttttttacttcggattttgatgtctcaaagttgagtatcacttgttctccgagatgcttcaacgtagaactgcaatttttgtttttatgatctaattgtatcaacaacaatatgcattatgacggatataaatctagtaggtgacacaataccgactccactacagattattaggttatacatactaatctgatttgatggactaattcattgtatctacaatatttgtagtcacaaatgacaaatctataaagttgattaattaatgttcatccgttatctaaattgttttttccaaccacttttattacaaaagtttttaaaaggtgtattgtatcaaagaacttaaataatttgacatattctagaatttccaatcacggggattttacttttacattaattatatacaaaaaatactgtcaacaacaattttaaccaatttaaaggtcgtcaaatcattatcacaagaaaggaaatgatgagaacatcgtcaacaacatggttaatcaaaatgatcattacatgagttgacatagaaactgtgctaaaaagcttaaggatgcattaacatgttaactcaagagattatggattccattcaggatgtgatgtctaattgtctatcatgtttgaccacattttcgctagtcaagaaactccaaaagaagggactatttatttgtggtcaagtcaagaatcattttataattcattatccatggagaatgacctagcaacttccaatattcatgcactatcttaactttatttatgttctcaaaaactgtctttatcatcatttgctttcatttcacgcaaatattttcttttaaataagtgtaatctcctctccaatgggatccaatggagccctttttctatcaagtagtattttcttttgctttcacttcatcgtctctttccggatttagttactcaatcttgcttttagattttactttccggattccaatatgcgatggctttattgtttggacaaaccgttttggttgttcgtgtttattaaatagcctttcaatcaaatttacaggtacaaggcatcacattcatacaaattcattacaaggatcgtccacgtgcttgtttagctggaaacaactacaaaactcaacaaagtacaataaatttaggataagagagagttgatgcctttgtcttccgctggcacatgggttacataacatcagaattcgtaatgatacacgacacccatttcccattaagcaaaaaaataaatagaaagattaaataaatataataaatctccatcgaataaaaaaagaagaagaaccaaaaaaagaaatatacaaagggttggtggccgaaacttttgtgaggaggaggacatgaaatggtggtggtggtggtggtggttgcaagcaagcaaggtggtagtagcagatatagttacaaggggattcaaatgagccattgttgttgtgttttctttttcttacggtgcagttccccaagttgttgttggtgttttactactccactctgttcttcctctcaccacttccgctccatcctggagtcggagcaaatgctgacattccacatcccccgctgttgccaggttaccgatatcgcaacccgtaactgcagtgagggactgaagcacactgtctctcccgcattccctccgatactccagagtcatgcttttcagcttctgcctctccattattcccactggagcactctccaggatccacccaatgtactttacattattcacatgctggttaacatctaggtcactccatcgaggctgaaaatgttcattaccaagccattagagagtcttacaagctggtcaaaggtttgttgaaacatacagcagtaaatactagatacttacagtgagaccagatcgaacatagtcagcagtcttgtcatcaatttttgttaactttctgctgtcctcggcaaggacaggatcagaattcacaaaataaggctctatttcccctcgaacctcttcaggaatctttgacaatctccttgtcagtttattcatcatcacccacacactgcaagataatattttgcaatacatctgtcaaatagctaacccatgagaccaaaaaattcctaattattcattacataaacttgtgtagttttttgtttaattgatgatagagcaaacactataaaaagagagtaaagacatcaggtatcttcatcagaaagaccaatgaatgatcagatgaagaaaatgagaataacttataaatataccaaaagaaaatctaaccttgatgctcgtgttaaggtttctccagtattacagtcccgaactagccaatcacgacgcataccattctttccagactgactgacccaggtgtctacttcaacaacatctcccctgtgaggcatatattgaataagcaaatgagttatgatgcaatataatatgcatgcagagcatataattcagggtgcaagaagtcattagtcatatgagcatatatctcgtactgtaaaagcagtatcaactgaaaaaacgaaatacacatcatttttcccaaacctggttaaaaagagtgagagcatgaacctgcagaaccaggtttatgcaagaggatagcttaccaagtaggatatttatcaaccacaacctgcatacgagtgacaacccatatcaagttcttcttaaacatctcaggtgtagagccaaacccatctccaagcaatccagcagtcttaacatgattaagcgccgtttcctgtcatgagcataagagcttgttcatacatatcaattaaaccagtgacaacaggtaaccgtaatcataatcaaatggtacctgcagatgattcatgacggtttctatagatgcagagcgatcagcacctatttcatatgacctaatagaaaaattctgacggaacacaaggccatcctgaacaattctccctataccaaaaggatccaccagcatgtcagaacgcctaggtttccaatcaagcatcatccactgtttctcagccgctaagaaaatcgtagttatagcagcaagaagcatgctccagtcaggtaactggttgatgaaagttctcggcgcagggtgtgatgaggtctcggtatcagtccttacaatatctacagaaccaggcaaaccaacctttttcccattaatcttaggtggagcctgagcgtttggtttaaccttcatcctaccagagttaggtgcagaattgagtccagcaagattcgtagacccaatcttattgccttttccattaggatcaagtgaagaagatggtacaggaaagaatgacgacgtagcagaggtggccaccatgacgaggagatgaagcgttcaaagacactgccaccaaataaagatcgaaaaaagttagctcaagtgagtgataataaaataaatgctacatcttttagctactagcaggaggatcttcctaaagtaggtataatttgtagttaactacaaaaatggcagaagaggaaaaggacttccataaacgaagtaaacaaacactaaaaatcttcaacacaccacacacacacacaaaaaaaaaaaaaaaaaaaaaactttttgttattgcgtaaattgtaagataatccagttcggccactgagactattatgtaaatcgtcattgtattcaaagattcaacatttgccaaaagaggtttccgaagttttggtagaaaccaatttgatgcaggtaagaaaaaaaacaccagatctgaaatacaaaacaacaaagaacagaagcgagaaaaagctaaagccggtaaaaccagatcgtagaaacgcaaaagaaaaacaaaaacttgtattagaaaaaatgtaattcaaacatcattcttcaatcaaacatcaatcagatgaagaatccgaaccagcgacgaagagattcagaaattacacaaagagaagaagaacccaaaaaaaacaaaaaaatgaaagagagagagatcttaccaatatgaagagagcagatgagaaatttgttgaggaaatacaaaaaaaacgtaacgccaaatttcaacaaaagtctccaaaccctaaattctcctttcttcggcagcctctctgtctctcacgatctctccttcgccttttctttaaaactttttttttgtttttttttgtatttctctttctcaaatattttttacaattcagtttttttgcgattctcaatactttttggggtaaacaatagtaaaaaaaaaatacaaatttttggtgttgagagaaaaatagggcgagaaaattctataaggtgggtgagagagagatatatgtggatatgagagtcggtttttatataattgcctctcctcttcttctccatagtttcaaaacaacaacgacacatttttatttcattttctatatttcccattttgcccttttcttgttacaagattggttaacctaattaggcaaatttattcaatttttattcatatggactacaaattttctttgaatttcatttagcacgcaaaacttgatttgcgcttccgtggaaatttcctttggacttggaaatttttttttgaaaaatcgaaccaatcaaatttgtaattggagagaaaaagacacatatccgaatgtgtgagcaagcttgttgtcaatactggcaccgacgctgtgtaataataagtgggcagagacaacaaggtacatgtgcatcaatctctatcttacttgtatttattaagactaacgaaaactacatttaaactaaacctaactctagctttttctcatttttttagtttaaccataaaactttgtcgaacgtgtaaagtcagccttcggatttatatatttattccaccgaaaacataatttaaattaacttcttcaaaattttacgtaccaagtaatctatacaaataatgttattatacaaaagcaacgtgttatttttttcaaatcgaaacaatatagccaatccaaatgtttaggagagtaggtagatacacttcccaacaagaacatcacaatatataattaccagtttggagagatcaattttgccttcagctatcattttggtagcgtataagaggctaacaagaagatatgataagctattgaggaccaggttcatggaattgactatgattgccaatctttacaaggaccatatccgtctcttgtttgctccatattcgtggttaaatttgacgatcataataaatgtgagacacatgcatgcatgagatgatggcaagcgtagatcaataaaagtttgacaacacatatactagggacatagataactaccacgatcgagagacgtgtgggagatgcacactcgcacaagcatgcttagcatacgtcttgaaggagacggtataaaactttgtagagcatgtgatctactagtacttccgaagagccatatggagaaggagacttaagcgaaacgtacttacaattctaaaatgagccatgagagcagcctattagtcctcgcatacgctacaagaggagcctgggaccaataatagtataaccattgagaaagtacagtagacatcgactagatcacaataaactttattttatgttgactatttcgtcattgatgatattacttatctttgattattattaaatctctcatttggacgctttaatttgcttggagacgagtcaagaattaagtcaggagaaacagcagcgttgataattctgttttcattttgaatatatatcgtgtttaatttggtttacattaaaaagtcttaattaaacaaaaaagatgattcaaaacctttagttgcatttgcatatttatttttcatatacaaagaagtacagatgattatgccttttgaaaacctagttattacttattgcatagtttattttctgatcaagtaaaaaaagttatgaacacaattcttcttatgaatgactctcaaaattaaggatgttgccttggagatttataggagttagcctacttttcaccttgaggatcaattttatagtcaaagctaataatgtttgtggtctatattagttaccacttgtttactacatccaagcgattgaattcgcatttcccatactcttgacttaattaaaccttgagatttcatgatttattatgcaaaatttaatccttcgctatctatttgttcctaaaagatataaattgaataaaaacgtaactctccaattaataagaaaaacttctttaattatttttctaggttaattaataaatttataaaacaataaatatcatattagaaattcatactaataaattttgagacattttattgaaatcttaatgtggatagtgctgcaatcaggaaaggatgacgagacaaaagatagagaagcaaaagtaagctgataaggtttgatacagtagaaaatactatctcttaacttcttcttcttcttcttcttcttctcctatctttgaaaatggcgatgactccggtcgcgtcatcatctccagtttcaacctgcagactctttcgctgcaatctcctccctgatctcttacctaagcctctgtttctctccctccccaaacgaaacagaattgcctcgtgccgcttcactgtacgtgcctccgcgaatgctaccgtcgaatcccctaacggtgtccctgcctccacatcagatacggatacggagacggataccacctcctatggccgacagtttttccctttggccgcagttgttggccaggtcagagaatttgcaatttgattctgcaggttgcataattctactcaatttgatttagttggagttgggtataggaaaaagcttcagtttttcatcagtgaactgtgtgttatgggacttttacatttgtttgttcaacttgttagatgccgaaagcctcacagaggatgtaatttgtttgctttaactaaatgttgtttgtaggaaggcataaaaactgctcttttacttggcgcggttgatcgtgaaatcggagggattgccatttcaggtcgtagaggcactgcaaaaacagtcatggcgcgagggcttcatgaaatcctccctcctattgaagttgttgtaggctcaatatcaaatgctgacccagcttgtccagatgagtaagattcttacaatctgagaaagaaattgcttttcttcttcttttaattcttacactgttggcttgtaccttttgtgatatatgtaggtgggaagatgacttagatgagcgcatagagtacaatgctgacaataccattaagactgagattgtcaaatctcctttcattcaggtacatttagttttaggaggcattacaatttttctgaaattgtttttctttttacttaggttttcctgtcgtttatgtcacacagattccactaggagttacagaagacagactcattgggtctgttgatgttgaggagtctgtgaaaagggggacaactgttttccaacctggtcttttggctgaagcccatagaggagtgttgtatgttgatgaaataaatctcttagatgagggaattagtaatttgcttctcaatgtattgacggatggtgttaatatagttgaaagagaaggaatcagctttaggcacccgtgcaaaccacttttaattgcaacctataaccctgaagaaggtgctgttcgagagcacttgctagaccgtgttgccattaatttaaggtactactggagtttataaatcaagtgtgataaatattgcctgtttcttttgggtaattcccatttctttctctttttacatcacgatgttaacctttgcagtgcagacctacctatgagttttgaagatcgtgtcgcagcagttggaattgccacacagtttcaggaacgctgtaatgaggtttttagaatggtaaatgaagagacagaaacagcaaagacgcaggtatcttcaaatgaattaagaaaaaaagggcctcattagtaaaaatttgatgggatgctatgcttctcatcccacttttctcgatcataatccagtgcattttctctgactttagattatattggctagagaatatttgaaagatgtcaagataagtagagagcaattgaagtatctggttttggaagctgtccgaggtggtgtccaggtattgagcaaaaattctgaagtaattttttgttaatggaagaaatacacttagtaacatattcctggaagaaaaaggataaacacgaaaagaaaggacaagatgcatgcaatgatgcaacataatgtcacgattatagacttcaactagtatagggctcaagaaatggctcaccacaggcagaaagatacatctagatagagttgttttgatttagaaacaacgctggaaaaagaagggcctggcatcaaatgcttttgttgcgctgttgattgtaatatttcaccaagttatgatcatatcactatagttatatttctgcgtttggtttacttggtagttacttctcatggcgtatcttttgtcgatgattacctggaatcgtttaatactcctttcccaaataacaaatttatgatacagggacaccgcgccgaattgtatgcagctcgtgtggcgaagtgtttagctgcaattgaaggacgagaaaaagtcacaatcgatgacctcagaaaggccgtaagtactcttctctagctcattcatttttgttttctttcccagaacgatcaagcaagtcataaacttatagaattagtcatcctacgtttactttcactttccttgtattgtctttgtctataattgaacatcttaatagaaatttttgattagcaatgtagaatgacgctctataatgatttggatggagtatttatgatatcctctagttattgattagcaaatgtggtccattttttcaataggttgagctggtcattcttcctcgttcatcactagatgagactccacctgaacaacaaaaccaaccaccacctcctccacctcctccacaaaatagcgaatctggagaagaagaaaatgaagaagaacaagaagaagaagaagaggtcagtggatgcagtacacattattctctcgttgaacacacgttcaaggttctaaagtagaaatcattaaccaatgtaggatgaaagcaatgaagaaaatgaaaatgagcagcaacaggaccaaatacctgaagagtttatatttgacgctgagggcggtctggtggatgagaaactcctcttctttgctcaacaagcccagaaacgtcgggggaaagctggcagggcgaagaatgtcatattctcagaagatagaggacgctacataaagccaatgcttccaaaggtttgcccttaacaaattctcaggctcccaaacatgcatagtccttaacaaattttactttgatagggtccagtaaaaagattagctgtggatgcaacccttagagcagctgcaccataccagaaattgcgcagagagaaggatatctcaggaactaggaaagtctttgttgagaagacagatatgagggccaaaagaatggcaaggaaagctggagccctggtactgaaccttgtccatacattcttctaaaagattgtatataaacagtttccttgatacaacattattctcactttatactttaaacagatgtttggcatgataaatttgacagtttccttgacacaagcttcagtgaaaacatagataatatctgattacgcttctgtttaccattgttgtatggcaggttatctttgtggttgatgcaagtggcagtatggcattgaatcgtatgcaaaacgccaaaggtgctgcactcaaactactggcagagagctatactagcagggatcaggtaaaggttactttttttgaatagttaacgtgcttgttgctagtttggatgaattcattgggccttcggatgagactcaatacaccagtaattggtttaggtttcgattattcctttccgaggggatgctgcggaagtgctcttgcccccttctagatcaatagcaatggcaaggaatcgtcttgagagacttccttgtggtggtggttctcctcttgcccatggtttaacaacggtatgtcaaatattatggtgttgttagtaagataactgctagtatcgactaaattgtgggtcagcataatcgtaacagtaacaactatattcatatcaggctgtaagagtaggacttaacgcagagaagagtggtgatgtcgggcgcataatgattgttgcgataaccgatggtcgagccaacattacactgaaaagatcaactgatccggagtctattgccccagatgctcctagacccacgtccaaagaattgaaggtaaacagcttctaacggaaaacataaagcaacacaagctcttcactgatattatgtaagaaggcagatgcagtgattaaaaatgcgggtgttgtgttgtttaggatgagattctggaagttgctgggaagatatacaaggcagggatgtctcttctagtgattgataccgagaacaagtttgtttcaactggttttgcaaaggagatcgcaagagttgctcaaggttgggtctctgcaattgattttgagatatttttttttgtcatttcaaagcagaaaataatcacattgtgttttgattgttcttcttcctcacaggaaaatattattacttgccaaatgcttcggatgctgtaatctcggccaccactagggatgcactatctgatctgaagaattcttgacctcattttgtctgcaataccttgattctggatcaaagtgtatattctaattgtgcaacacatcagtcactaaacatgaaattataagaaatgaaattttgttttaacatactcttaaaatgaatttccgattttattccgttggtcggtaattgacgactgatatgatgatgcattagtgacagatcactgtttgtattaagaagaagacgatgaagctgcaatattcacaattgatacaagaattaagatagtcggtataatcccggtttgcagtaaaccctactctaatgtctaaaccacatcacaacatcaaatagatggttcggtggtttagttacggcagatacaccggcctgaaccgaataaaagaaaactggacttggctcctggagaagagaagactgtacagctttctgaattccgaaagaaatgaaatctctctgcttcatttctacagctccattgattcgttcgcctccatttctcgatctttctccaacaagcttgaatcgatttacccttaaaattccagcttctctctatgtatctcatccaacaagatgcagcatttcaaacccgtcgagctctgaggaattgttgaattccaatggtggaatgtctagggcatcgattagtgtcttcggaggtacttcccttaacaatctcaagatgcaagtgggcagtccaatttctctgcattcaatcaatccattagcaaagctgagtttgagtgatcaggcatttcttctcttggccttcatcgtttgcacggtaaaaggagtttgctcgtgttttgttttgaccatttttgttgattcattgataaaggtttagactttttgatctcttttgatggtcctctgttacagacttcagtggcttttacaagtcttgtgattacagctattcctacacttgtggtaagtctccacatttgtctcaattcttttgcttcagctatatcctaaccgcatcactaattttaaaactgtttcaagtcattaccaatgaatcaacaaaaatggtcaaaacagatgaacaaagaattgattatttgtaatatgctatcaacaatctgacatataccttttcaaactcagtgagaaactatgacatgatctatgttatgagtgtagtcctctgcttgaaatttctactccacacttgctgttagcaccaactgaaaggataaaaggctaatgagtaacacatgagtacagtcactaacagataaaagattgaactataattgttgaattccacacttgactcttctttatatgtgtcctagatttggttcagctatatgatcatttctatttttggatttggctgaattcaacaaagcttggtggaatttttcagtttaatatgtctgtctctttgttcttggattgatatctattcagtatgtcctatatttacttacacaccttcaggccatgggtagagctgcaacttcctttgcaaagttagctgacacagctcgcaaagaactccctagtacattggcagcggtaaggctctctggcatggaaataagcgatcttactcttgaattgagcgatttaaggttatctctaaagctcttttcttttcttttcttttctggcttttgatcatctcaactctaaaaaaagtgaatgctacatgtttcaaagcaattagttcacaattagttcttccgagtcaccttgttatctgtccggaataagaaactttttctaaatcattattatgcgatgcaaatggtttcagccaagatataacagatgggataaacaaatcagctaaagcggttcaagcagctgaagctggaatcaaacagattggaacacttgcacagcagcaaactctctgtaagcttcttctaagcttttggataatctgtaataaaagctgctgttcatggtggcaacagttcacactggtaaaaaaaaagcggaaaatatgatctgatgatgaacttgatcttgtgattcagcaatgattgaagagagagcaaatttaccagaaatatcactacaacctgttgtggctggtgcagccgaaaagacttctcacgcaatcggcagtgcaaccaagagactaatgaacattataaccggaggaaacaaggatgaagattagacatttagaagttttcacttggagtgtgtttttggtccgtctttgtttgaagggattagtacaaggtaaagtccatttagggaaacagagaatctatgaacaagaagactttttagtaaaatttggtatatttatgaaacctgaagtgtaactgtgtaagacacaaaagaagaaataataacagccacagccattttaagatgtacaacagcagataaaatagtttacataacaagccgacaaaaaaaaaaaactattctattcttacatatgggttgactttgcaaagatggtaatagtgtgattgggattgggccaaagttaataggcccaaaagaagtggaaaattagaagtaatgaatcctttgattgagatagaagctttatcctcttcttcgtcttcatcatccgcgcatcaccagttttttctctctctctacaaatcttcttaacggcctttcatcaatggtcagcagacttagctttcgaatataggctaagaacgagcatgtcttcttgtcttcttcctcagttcaagtgcccacctgattctttctctattcacttccgaacctctttctgtgcccgttagtattatttccttctctccttatctatctcattcacattccctctccaattttgtattgttcatccaatttcggattttagataggtctatccatctttttttgtatgattattgtattcgttggatgtgattatttgatgctttagctgtaacttccttccattgttaatttccttgcagtttgctctgttctcattttttacaattcatgaatggattcatatcaatttgaagaatgcagtagtaaaaatccaaatttatggatgaatgttttgttagggacttaagctcagaagaagctaatactagggagacacaactctttcttgtttgattatgaagtagccaattccattatctagttgatagagtggggttatagaatctcaacccttgttctgatcttagatttcaaaaggaacacattttcaggaatgtgcactatgtcatcctaatcaatgtgaaatcatcttatttctcaattgttcacaaattttttggatgtgatgtgacacacttttgttgggacgtgcagctaaacacaacaagggttcagtcttcttccaaccgcaatgtgcagtatccacttcaccggcgttattaacttctatgcttgatgtcgcaaagcttagactaccctctttcgatactgattcggattcccttatatcagacaggcagtggacttatacaaggcccgatggtccttccactgaggttagtaatatttcgtatatttccatgtcacaacggtctaatagtggttcccaaatcttcaatgagattgttgttcaaatattggcttgatagtgaatgactaagattagttggtttagttatttgtatcagagtagtgactattgttcccacacacaaaaattattcttagtatttggtagctgtagctgttgtaatttgaagtccacttgataacttccttgtatttgtaggcgaagtatttagaagctttagcctctgagacacttctcacaagcgatgaagcagtagttgtagcagcagcagctgaagcagtcgcccttgcaagagctgctgtcaaagttgccaaagatgcaacattatttaagaacagtaacaacacgaacctattaacttcgtcaacggccgacaaacgctccaagtgggaccagtttactgagaaggaacgtgctggcatattggggcatctagcggtttcggacaatggaattgtgagtgataaaatcactgcatctgcctctaacaaagagtctattggtgatttagaatcagaaaaacaagaagaagttgagcttctggaggagcaaccttcagtgagtttagctgtgagatctacacgtcaaactgaaaggaaagctcggagggcaaaagggttagagaaaactgcatcaggtattccgtctgtgaagactggttcgagccctaaaaagaaacgtcttgttgcgcaggaagttgatcataatgatcctttgcgttatctaagaatgacaacaagcagttccaagcttctcactgtcagagaagaacatgagctgtcggcaggaatacaggtttgtcaccaatattccaaattctaaactaaccacctccctttttctacatcgcgtctgagacatcacaaacactcacccttcgtaggactctagattctaggcgaaaatgatgtctacaaaatctttagatgtttgagaatgacgaaattagtggttagtggtagaatccaagatcgcttctttgtgctttctagccaatatatcatctgaagttctgtgaaagctaattatcctgacatgcttgtcttaaattgaattgtcaccttttttgttcttattatgtagccattcaccaactgtttagtgttgatagaaaatgggaaacgtatgttcagctttggaagaatcaacattacttgtgaacgttatttcttcttctctgtaatttttcttatctttctttattgtggttttgatcacacactttggtttctttgtttaggaccttctgaagttagaaagacttcaaacagagcttacagagcgtagtggacgtcagccaacctttgcgcagtgggcttctgctgctggagtcgatcagaaatcattaaggcaacgtatacatcatggcacactatgcaaagacaaaatgatcaaaagcaacattcgactcgttatttcgattgcaaagaattatcaaggagctgggatgaacctccaagatcttgtccaggtttgagcttttctctccttatttttttttgtaataacacatctgtaagcagtagtgatgaaagtgatagatattgaacaccttgctcaaatattttcgaaatggtcacaggaagggtgcagagggcttgtgaggggagcagagaagtttgatgctacaaagggttttaaattttcgacttacgcgcattggtggatcaagcaagctgtgcggaagtctctctctgatcagtccagaatgataagattgcctgtaagttatcccaaatgtttttcttttttacttgtttaaacaaaaggtttgggattatgcctcaaattttaagggatgattggcagtttcacatggtggaagcaacatatagggtgaaagaggcacgaaagcaactgtacagtgaaaccggtaagcacccaaagaacgaagaaattgcagaggcaacagggctgtcgatgaagagactcatggcggttctactctctcctaaacctccgaggtcgctagaccagaaaatcggaatgaatcaaaacctcaaaccttcggttggtaccacctgacacaacacacaccatacaacatagacttgttgtttgtctaaaaatagtaaataatatgagatgggtttgtaatgtaaaaatatgcaggaagtgatagcagatccagaagcagtaacgtcagaagatatactgataaaggaattcatgaggcaggacttggacaaagtgttggactcgttgggtacaagggagaaacaagtgatacgttggagatttgggatggaggatgggagaatgaagacgttgcaagagataggagagatgatgggagtgagcagggagagagtaagacagatagagtcatctgcattcaggaaactaaagaacaagaagagaaacaaccatttgcagcaatacttggttgcacaatcataattctttttctcttcaatatggaatgttttgtgcatagaacccacccacctgagcataacaagcagtaaattattactttttagcatttacgattcttgtgacaactactaaatcgaaaaaattattttaaaactaaaaagaaattgttgtctgaaaaacataagtgatatacaacaataaataaatatctcttataagaatttgggaaaaaaaaaatccaaagattagagatatttgggtggagaaaacaaccgcctaggacaaaaaaaaattgtgggtagaggaggaggaggaggctttgttcacacaccacacgacggaacattctcttccgagtcttatccaaagcaaaatcatattttgcttaaatatcttcttctccggctctgtctctgtctctcttcttcccgcggagctttcagtttttgtttggtaacatcgtttctctttctcactaactctgatatcatattatcaatttttccttttcaacacccaaaatcacaatctttcagctttattctgtttttccttgcttgagaattgtgttcgattcatgtctacgaactgaaatcacaaattttgccaacgttttatgattcctggttccgtatttttttttttgtaatcaatagttagctcatttcgaataatcaaactcaattttattgttcatgatttgttatctgggataaaagagagtaatgtgctaattatgtatactcaggtattgcttggtgtggggaagattagatagtgtgaagaatggcagtagctacacattgtttcacttcaccttgtcatgaccgtattcgatttttctcaagtgatgatggtattggtaggcttggcattacaagaaagaggatcaatggcactttcttgctcaagattttacctccaatccaaagtgctgatctcagaacaactggtgggagatcctcacgtcctttatctgcattcaggtcaggattctctaaggtaatcaatcatactagtcttgtgtttcaatacaaaatttggtatttcgatgatctcattgcttttgatcatgtcaggggatatttgacattgtgccattaccatcaaagaatgagctgaaagagctgaccgctccgctgttgctaaaactcgtgggtgttttagcttgcgcgttccttattgttccatctgcagatgcagttgatgcacttaaaacttgtgcatgcttattgaagggatgcaggtaactttccttcgtttggattctgcatatatagtgtccccccaccaaaaccggttttattttcattgtgattgtgatgctataagtgttttgaattgtatagctccatactcttcaattgttgagaatgttaaagctagatgaagttactgtgtctgtctatgatagagctgaaatcagttgatgatatctttctgatttttttgccgtcaatttatatatttccctccttgtctgaccatatggaagcccaattatctgttaggatagaactcgcaaagtgcattgccaaccctgcctgtgcagccaatgtcgcgtgccttcagacctgcaataaccgtccagatgaaaccgagtgccaggttataatttattttgatatatcattttatgaggcagagatattgcttgcttatgaaagaagaccaatgattttgtttataattatgtgcttatattatatcagattaaatgtggggatctgtttgagaacagtgttgttgatgagttcaacgagtgtgctgtgtcgagaaaaaagtgtgttcctagaaaatctgatctcggagaatttcctgccccagacccttctgttcttgtacagaacttcaacatctcggactttaacgggaagtggtacattacaagtggcttgaatccaacctttgatgccttcgactgccagctgcatgagttccacacagaaggtgacaacaagctt

SEQ ID NO: 21 - DNA, 133840 bp, Arabidopsis thaliana
gaattcacacttgactcttctttatatgtgtcctagatttggttcagctatatgatcatttctatttttggatttggctgaattcaacaaagcttggtggaatttttcagtttaatatgtctgtctctttgttcttggattgatatctattcagtatgtcctatatttacttacacaccttcaggccatgggtagagctgcaacttcctttgcaaagttagctgacacagctcgcaaagaactccctagtacattggcagcggtaaggctctctggcatggaaataagcgatcttactcttgaattgagcgatttaaggttatctctaaagctcttttcttttcttttcttttctggcttttgatcatctcaactctaaaaaaagtgaatgctacatgtttcaaagcaattagttcacaattagttcttccgagtcaccttgttatctgtccggaataagaaactttttctaaatcattattatgcgatgcaaatggtttcagccaagatataacagatgggataaacaaatcagctaaagcggttcaagcagctgaagctggaatcaaacagattggaacacttgcacagcagcaaactctctgtaagcttcttctaagcttttggataatctgtaataaaagctgctgttcatggtggcaacagttcacactggtaaaaaaaaagcggaaaatatgatctgatgatgaacttgatcttgtgattcagcaatgattgaagagagagcaaatttaccagaaatatcactacaacctgttgtggctggtgcagccgaaaagacttctcacgcaatcggcagtgcaaccaagagactaatgaacattataaccggaggaaacaaggatgaagattagacatttagaagttttcacttggagtgtgtttttggtccgtctttgtttgaagggattagtacaaggtaaagtccatttagggaaacagagaatctatgaacaagaagactttttagtaaaatttggtatatttatgaaacctgaagtgtaactgtgtaagacacaaaagaagaaataataacagccacagccattttaagatgtacaacagcagataaaatagtttacataacaagccgacaaaaaaaaaaaactattctattcttacatatgggttgactttgcaaagatggtaatagtgtgattgggattgggccaaagttaataggcccaaaagaagtggaaaattagaagtaatgaatcctttgattgagatagaagctttatcctcttcttcgtcttcatcatccgcgcatcaccagttttttctctctctctacaaatcttcttaacggcctttcatcaatggtcagcagacttagctttcgaatataggctaagaacgagcatgtcttcttgtcttcttcctcagttcaagtgcccacctgattctttctctattcacttccgaacctctttctgtgcccgttagtattatttccttctctccttatctatctcattcacattccctctccaattttgtattgttcatccaatttcggattttagataggtctatccatctttttttgtatgattattgtattcgttggatgtgattatttgatgctttagctgtaacttccttccattgttaatttccttgcagtttgctctgttctcattttttacaattcatgaatggattcatatcaatttgaagaatgcagtagtaaaaatccaaatttatggatgaatgttttgttagggacttaagctcagaagaagctaatactagggagacacaactctttcttgtttgattatgaagtagccaattccattatctagttgatagagtggggttatagaatctcaacccttgttctgatcttagatttcaaaaggaacacattttcaggaatgtgcactatgtcatcctaatcaatgtgaaatcatcttatttctcaattgttcacaaattttttggatgtgatgtgacacacttttgttgggacgtgcagctaaacacaacaagggttcagtcttcttccaaccgcaatgtgcagtatccacttcaccggcgttattaacttctatgcttgatgtcgcaaagcttagactaccctctttcgatactgattcggattcccttatatcagacaggcagtggacttatacaaggcccgatggtccttccactgaggttagtaatatttcgtatatttccatgtcacaacggtctaatagtggttcccaaatcttcaatgagattgttgttcaaatattggcttgatagtgaatgactaagattagttggtttagttatttgtatcagagtagtgactattgttcccacacacaaaaattattcttagtatttggtagctgtagctgttgtaatttgaagtccacttgataacttccttgtatttgtaggcgaagtatttagaagctttagcctctgagacacttctcacaagcgatgaagcagtagttgtagcagcagcagctgaagcagtcgcccttgcaagagctgctgtcaaagttgccaaagatgcaacattatttaagaacagtaacaacacgaacctattaacttcgtcaacggccgacaaacgctccaagtgggaccagtttactgagaaggaacgtgctggcatattggggcatctagcggtttcggacaatggaattgtgagtgataaaatcactgcatctgcctctaacaaagagtctattggtgatttagaatcagaaaaacaagaagaagttgagcttctggaggagcaaccttcagtgagtttagctgtgagatctacacgtcaaactgaaaggaaagctcggagggcaaaagggttagagaaaactgcatcaggtattccgtctgtgaagactggttcgagccctaaaaagaaacgtcttgttgcgcaggaagttgatcataatgatcctttgcgttatctaagaatgacaacaagcagttccaagcttctcactgtcagagaagaacatgagctgtcggcaggaatacaggtttgtcaccaatattccaaattctaaactaaccacctccctttttctacatcgcgtctgagacatcacaaacactcacccttcgtaggactctagattctaggcgaaaatgatgtctacaaaatctttagatgtttgagaatgacgaaattagtggttagtggtagaatccaagatcgcttctttgtgctttctagccaatatatcatctgaagttctgtgaaagctaattatcctgacatgcttgtcttaaattgaattgtcaccttttttgttcttattatgtagccattcaccaactgtttagtgttgatagaaaatgggaaacgtatgttcagctttggaagaatcaacattacttgtgaacgttatttcttcttctctgtaatttttcttatctttctttattgtggttttgatcacacactttggtttctttgtttaggaccttctgaagttagaaagacttcaaacagagcttacagagcgtagtggacgtcagccaacctttgcgcagtgggcttctgctgctggagtcgatcagaaatcattaaggcaacgtatacatcatggcacactatgcaaagacaaaatgatcaaaagcaacattcgactcgttatttcgattgcaaagaattatcaaggagctgggatgaacctccaagatcttgtccaggtttgagcttttctctccttatttttttttgtaataacacatctgtaagcagtagtgatgaaagtgatagatattgaacaccttgctcaaatattttcgaaatggtcacaggaagggtgcagagggcttgtgaggggagcagagaagtttgatgctacaaagggttttaaattttcgacttacgcgcattggtggatcaagcaagctgtgcggaagtctctctctgatcagtccagaatgataagattgcctgtaagttatcccaaatgtttttcttttttacttgtttaaacaaaaggtttgggattatgcctcaaattttaagggatgattggcagtttcacatggtggaagcaacatatagggtgaaagaggcacgaaagcaactgtacagtgaaaccggtaagcacccaaagaacgaagaaattgcagaggcaacagggctgtcgatgaagagactcatggcggttctactctctcctaaacctccgaggtcgctagaccagaaaatcggaatgaatcaaaacctcaaaccttcggttggtaccacctgacacaacacacaccatacaacatagacttgttgtttgtctaaaaatagtaaataatatgagatgggtttgtaatgtaaaaatatgcaggaagtgatagcagatccagaagcagtaacgtcagaagatatactgataaaggaattcatgaggcaggacttggacaaagtgttggactcgttgggtacaagggagaaacaagtgatacgttggagatttgggatggaggatgggagaatgaagacgttgcaagagataggagagatgatgggagtgagcagggagagagtaagacagatagagtcatctgcattcaggaaactaaagaacaagaagagaaacaaccatttgcagcaatacttggttgcacaatcataattctttttctcttcaatatggaatgttttgtgcatagaacccacccacctgagcataacaagcagtaaattattactttttagcatttacgattcttgtgacaactactaaatcgaaaaaattattttaaaactaaaaagaaattgttgtctgaaaaacataagtgatatacaacaataaataaatatctcttataagaatttgggaaaaaaaaaatccaaagattagagatatttgggtggagaaaacaaccgcctaggacaaaaaaaaattgtgggtagaggaggaggaggaggctttgttcacacaccacacgacggaacattctcttccgagtcttatccaaagcaaaatcatattttgcttaaatatcttcttctccggctctgtctctgtctctcttcttcccgcggagctttcagtttttgtttggtaacatcgtttctctttctcactaactctgatatcatattatcaatttttccttttcaacacccaaaatcacaatctttcagctttattctgtttttccttgcttgagaattgtgttcgattcatgtctacgaactgaaatcacaaattttgccaacgttttatgattcctggttccgtatttttttttttgtaatcaatagttagctcatttcgaataatcaaactcaattttattgttcatgatttgttatctgggataaaagagagtaatgtgctaattatgtatactcaggtattgcttggtgtggggaagattagatagtgtgaagaatggcagtagctacacattgtttcacttcaccttgtcatgaccgtattcgatttttctcaagtgatgatggtattggtaggcttggcattacaagaaagaggatcaatggcactttcttgctcaagattttacctccaatccaaagtgctgatctcagaacaactggtgggagatcctcacgtcctttatctgcattcaggtcaggattctctaaggtaatcaatcatactagtcttgtgtttcaatacaaaatttggtatttcgatgatctcattgcttttgatcatgtcaggggatatttgacattgtgccattaccatcaaagaatgagctgaaagagctgaccgctccgctgttgctaaaactcgtgggtgttttagcttgcgcgttccttattgttccatctgcagatgcagttgatgcacttaaaacttgtgcatgcttattgaagggatgcaggtaactttccttcgtttggattctgcatatatagtgtccccccaccaaaaccggttttattttcattgtgattgtgatgctataagtgttttgaattgtatagctccatactcttcaattgttgagaatgttaaagctagatgaagttactgtgtctgtctatgatagagctgaaatcagttgatgatatctttctgatttttttgccgtcaatttatatatttccctccttgtctgaccatatggaagcccaattatctgttaggatagaactcgcaaagtgcattgccaaccctgcctgtgcagccaatgtcgcgtgccttcagacctgcaataaccgtccagatgaaaccgagtgccaggttataatttattttgatatatcattttatgaggcagagatattgcttgcttatgaaagaagaccaatgattttgtttataattatgtgcttatattatatcagattaaatgtggggatctgtttgagaacagtgttgttgatgagttcaacgagtgtgctgtgtcgagaaaaaagtgtgttcctagaaaatctgatctcggagaatttcctgccccagacccttctgttcttgtacagaacttcaacatctcggactttaacgggaagtggtacattacaagtggcttgaatccaacctttgatgccttcgactgccagctgcatgagttccacacagaaggtgacaacaagcttgttggaaacatctcttggagaataaagaccctagacagtggattctttactaggtcagccgtacaaaaattcgtgcaagatcctaaccaacctggtgttctctacaatcatgacaacgagtaccttcactatcaagatgactggtaataacatcttgtatccacccacgagggagagtcttgatagtgctgctattcttctttggcctaacaagctttcatatgatttttgcaggtatatcctgtcatcaaagatagagaataaacctgaagactatatatttgtatactaccgtgggcgaaacgatgcttgggatggatatggtggtgcagttgtatacacgagaagttctgtattacccaatagcattataccagaactcgaaaaagcagcaaaaagcataggcagagacttcagcacattcattagaacggataacacatgtggtcctgaacctgcgctcgtggagagaattgagaagacagtggaagaaggtgaaaggataatcgtaaaagaggttgaagagatagaagaagaggtagagaaggaagtggagaaggtcggtaggactgagatgaccttgttccagagattggctgaaggatttaatgaactgaagcaagacgaggagaatttcgtgagagagttaagtaaagaagagatggagtttttggatgagatcaaaatggaagcaagtgaggttgaaaaattgtttgggaaagctttgccaatcaggaaggtcaggtagaaacaagaaccaccattgttgtacaaactatattatacatactgtgttcggttcatataaagtaatatttttgtacacagtcatcatcattccataacaattggatacagaaaacacaaggattaaacatcctttgagcgaaacaaacaacgattggtaaacatagtacctcaagaagagctgaaagtgttaacaatggggatgacaacatttagaatgatcaagaggattaagtcaactgggtatctttgtaaacattcaccatttcattgaaattggatacaagacacgaaaggattaagacatccttgaagaacacaaaaggattaagacatccattggtacaaagaagagcgaaacaaaacaaaaggagtgaacatagccagtatctcaagaagagctgaaactggtaatgatggggatgacaacaatgagaatgatcaaaagcagcacaatgataccaatgcacatccattttctgctgtttctctgatgactctttgcagtcttcagctcattagctccatcagccacgtaatggctcgcattaatcacatgatgctcgatctcgtccatctgttcaccttgcgattcaaccatcacagccatatcaagaaacacttggtgaagctccaacagactcttctcaatctcctttgctgcatcatacctgtcttgaatctcaaccacagtttccaagacctttcctttaccatgttcctgaattgctcgcgtgagaaactcttcacctccagcgttatcagtgatgatcttctcaatcatctcatcattagcatgttctccagtgacagtgaagtaccttctctcaacagtctccttgtactcactcatcatcttttgcctcagcccctgaaactccatcatcacttccttaagtttcttcctcagcccattagtcacagcggttctgctcctataaaccggagtcccagagagccttttaatctccttgttggctttatccatctcttccagcttcgacttaatcgatttcgccttcctcaaaccagacacaatctcgttagagatcttgttacgaagagacttcacagactctgccttgtgaacacctttactctcttcatggtactgttcgatccgagccagcgtctcactaatcaaacccatctctgctttcacatactctgcttcttctaagaaagatgacagattctcatccatcttgtctgctttcgtagaagccatctcaagatcaaagtcaggtcctgcttccatatccttcatcgctgcttttttcaagtcaacgtaactcataaacgatttcgtcatcaagtcgttcatctttttcacctgaaagtcaacaattttacaagaatcagagagaatcgcagtgattgtaacagaatcaaacaagagaaaatcaaagaaaatacaacatactcttctgattagtgtgttcttctagatccacaaagtttctgcccagaaagtgagagagtagtgtgaagtaaagcttactatagaatttgattagcgatttgtgagatgagagaaagctttctttctaatataagaaaaaggagaaattagccgttactgtgatttcttcgccccaacggctatattttggcgatgtatccgttgtcgtccatttgtctatctgtttctgtttcttcaaatctatttttaaattcatgtgaatttctttcgaaactttaaaataatatagggactaaattgtaattagatgtatgttttagtgccgacgtgtgtgattgagacagctttaaagatatcgaaactgagaagaaaatatagggactaaattgtaattatgtgtatgacatcgcttttgtcgacaaatcatcattggtgacgatttacgaaagcaaagaagaggtgttcttagctgcacatttgtcaccatttatacaaaaattgtggttcttgtgttttgttttttatgttggaaaacttatggtatagtttcttttgttacgatacaccttagttgaaccattcaaattattaggatattttcaaatatataatattttaattctaatttcgtatgtaaacgactctccaataaaacatctccactagcttgttggtctctaaacttgaaatcagtttttatttttcttgtaatattttcaaaattgtttcaatatcgtagacaaattttaaataaaatgtacatcatatctctataaacttaataatacccaaaattttgactaatcacattaaattccttatgatattcgaataaaaaaataatttaataatatttattgtagtcgcaattcaatatttattctgtaatgcttgaaaaatgtttttaaaaactgtgtcactacattactataacgttagtatgtactaaattttgtaacgtttcatggttataaaatagtattagtttaccgacaaaaatatatagattacgtaacgcttgttttacattaaaacaaatttgttaggattgttttgtctattctacattcgtcacatttgttttgtttaaactttttgttttctaattaaaaaattattctgtttttgtaattaaatatagtaaatttgtttgccgcccaaaaaaatattacataacgcttgttttacattaaaataaagttgcttcgattgttttggctgttcaactctagtcacatttgttacgtttgttctacttattgtcgtgaatcgatcgaaaacttgtgcaatgtggaattgagggggttagatgtaaaccaaaaaactaaaaagggcaatctccaattattttgttaaagaggtggcaattgcaaatctccaataatataaagttcataaaaaaggttaaaggagagagttgtggtggagagagtgagacccacgtgggtgatgtgttggcaaactatcttccttaaaatccaaatccatttatccatcactacttttttttcttttgtttggtagtaaaatccttcactagttgattgcagatgactaataaagtaataatctttcattttggtggttcatcgcctaatttgttgtttacttgattgataaatgtttgaggatgaaactgtatcatttatttttctcaaaattgtttggttcatgacctatataatccatttgtttaatattaatataggtaaatttaaaattcgttacttaaattggctaaacatactcttcaaaataatatatatccacttaacatagttaaaactctgtattcagataaaagcatggtaaaaaaccaaacatatccatttaaatgtattcaaagtcatgagaaaatttcctatacttgttcctttatatctgcgagaagtcatgaaccttatccatttattagttttcttctgaccgactaaacctgataatcactaatccaccgttagatcttaaaattccaaatccaaaatggacggtcaagatcacttaacgaaaaagaaaacagtttcctgtccagaaatgtctaaccttgaggcctttttctctttcctttaaacttttttttttcgattataaattttctcgtgaagctaatttttcctgagaaagaaagcgaaacttcgctggcgactaaagattgctgagaagacacgtcgtctctgtgagaactttttctttttcttctggtatattctggagacagatattgttttttcttctgattagagaataatatgacggaagtgattagcaaaacgagtttgttcttaggagcttgtggtaatcatcaccgtgttgatgatttctctttctctccggtgagttttggtgggtttggtttgaaaaagagtttctcttgtctgaagcttaagagtcagaagcctcttagaagtgtattttacggaaaacagatcgttttcggagattctcaagacgagagcttcagaagatcatcagctatcacagctcaggtagactttaatgttttgtgttttcgtttttgtttatctgaaatattataatccattacatgcgagatctaattagaaagatcctgagagctaattgttgaaagaatagttttttagggttttgctttaattttgttgtgaattattggcttgaagagtagattttggtttagggttcatgtgttttcaatttgatgtgttggttttatggatctgtgaaaatatgatatctgacatgtgtaaatttgcagacaactttgaggattgggacagctcagaagtggtgggagaaaggtctgaaagataacatgagagagatctcttcagctcaagagctcgttgattctcttactaacgctggtgataagcttgttgttgttgatttcttctcacctggctgtggtggctgcaaggctctccatcctaaggtatcaatccacttcttggattgtttggtacagtattgatgaaatgaacaagttttctaacaatgatggtttatgattgttgcagatatgtcagtttgcagagatgaacccggatgtgcagtttcttcaggtgaattacgaggagcataagtccatgtgttatagtcttggtgtccatgttctcccttttttccgattctaccgtggctctcagggtcgtgtttgcagctttagctgtaccaatgccacggttcgttctcattcttataatccatgagacaatcaatgaaaaaaccatcttaggttcgattttgatcttgatttgttttatctgtttcagatcaagaaattcagagatgccttggcaaagcatggtccagataggtgcagcctcggaccgaccaaaggccttgaagagaaagagcttgtggcacttgcagccaacaaagaactcaactttacttacacaccaaagcctgtaccagttgagaaagaagcagccactcctgattcaaacccaagtctccctgttcctcttccttcgatgagctccaatgacgaaaaaacattggtctccgcagggagatgagactgaataaacatttccctgtatagtttgcgtgatagtagtagtagcagcagctggatatattgcagtacctaaagatgtcagttctcggagcagccagccggtttagtggggtttagttttttttcgggtcccctgagcaaaatcggttcttggcctctgggtttacctagagcaaaaccagttccgatggttacttgagttttgctcagttcttatgggattggagtggaaggtcgtgcgctcggcagcatggaagctttctcctttcaatcagcttcagtagagttttggtttctttgtttgttttttatttgctttaagaatttaatgtaaataaaaatccaatgaggattatcatacaatgtcatgaaggatctatgaattagtatctaatgttagtatatattatggtttttcctaagttggtactttctctgtttgaagtttgattatcatacatgtatttgttatggtcctctcttcaacatctttagaataaaacatataagatctgcaagggcttcagatttctgtagtgtggttagtctcttgggacattacgttaccataggactaacgtcgactatattaacgtcacctagaaaaagctctaggattaatggtacttttttagtttggattagtggtactttaacttggttaattttgctgtttcagtgagagaaaggaaaattgagttgggtttttatcaaattgctccatattctaactctccgtcaaaggcaccacataccagaaagaatgaatacaaaatatgatattttgataagacaaaaattagattgagaaattaaaggattcggaaaacttaaataaaatcatatcaaaccctccattcctctgcttcgcatcctccggatgcaaaaacacacgtttcacatttttgaaagaatctaaccagacattgagaaacctctatcatccgttagaagaaatgggtttacaggtatacacgacactcattctagcatacaatcagcagatttttcaccactggctttctggtttttcttctttttgcctggtacatgtatgcaaagatcttgttactttccattatcggcaaatttgaatcaagtgataatagttatttagacagtatgagatatcagaggctggcaaaagcttaaggattacctttattatttagtttgttcaacttcaagctcttcttaacgctaaattttctgggggatttcttggagtcttctgatgcagctgataaaccagacggaagagatcagctattaattaagcaagacaactaaattttaaagtcacaagaccaaaaggattccaaacaagcctttgtgctgaataatttcgtgagatacacaaaccaaatacaaaaaaaggacattcctatgaatatgtgaccaatagctttcaggtttaggttcaaagtctacattgataaccaaattcaagatatactatacatttctaagcattgagagttgattcctaactgatatttcgcaatcccaatcgcaataaaacaagatttctaaggacaagacttcattcatgctgtaaacaaagtgaagtcaagagatcaatcaacacatcaaaagctgagtagctttatttcagggtgaagatataccttgagcagaagccatctccacatcttccatagtaacaagacccttctccaccatatctttctgctcctgttgacgaatcaaacaactctttcttaactactttaaccacttgatattttcaaaacagaagctctaattgcattcaaagcttatataactactcaaaagacatgaacccacataggactatgacctagtgtgattctccatcttagaataaaccaattaaatcaaggaattacatactctgcgccatttgcgaaggagctttctctgacgtttgccggagacggaggggaccggagttctggtcttcaatttattggtgagaggatcgccgtgaatggctcgttttctatcggctttagcctctctcttcttcttcgcaatctcgttgtacttggccatcttactactctacccaaacccctagcttcgacgcctcgctcacttaatacctaaaaaccaacttcgatgcaaaaccctaaattccacagtcgcacgaattctatttgggccttttctcaatttcttatttgggccttttagatatcttttttatcgttgctgcttgagaaaaataacaattaatccggttcggtttgattcggctcaaattgaaagacgtcaaattattgaaatctgaacttcttcttaaaataaaaaaaatgtgaaatttaattacaaaaaaacaaaatgtggctaaactaattagatttaagtgtttagatggttaatggaaagctcttagcacatgctctccagcctcatcttctctctaaactatcgaaattatgatctcatcattagtatatatacatataattaataattaatgcatgcattatcattcacatataggatgtattgttgttattccattcggtattttatattttaaaatgttgattatgataaaaagtcccatatgggtgcatgtgaaatatgaaagggcatattataaagttagatttgagcaattattttttccttcttatgaatatgataatagaggataaatttgaaaggacaaagaactttaattagaggtactgtccatatctaccttgcaaacctacaacaattaaatgtgttggacgaaccgatagtcgatactcgatagtcgataatggatatatatgctcgaggtacgtaaaatttagatgttaatccgcaagaatatatagagttgtgctagatgtattaattaagatatcgatctccaaaaagtctatacactcacgagaatatgtttcatatagtttttgggatcaattatggtgattcttctaatgtgaacatgattcattcatttaatgggtatatccgatcgaatatatatgttttagattttaagaacaaaataaaaatgatagatggcccttttcgatggttctaaactttattttgatatcgtgagagcacttaatgctactttgttcttcacgcaatcagcatgcatatttactcacaagttgcaaccacacgaatataaacaaattcggttacggacttagggctacatattcagttacgtcttgatgtcatatgcatagtttattgaagctccttgtctaaaaatgcattaatatgcaaactttatgcatatatcatatgtatggccttaaatctctcaactcaaactaatatacagagaaaaaaaaattctgataatcgtattttgaaaaacattaaaatctgtgtttataagatctagaaaaacatatatgtctacatgaatgcaataatttaattaatgtatttgtatttttttttttcaatgcatgtgtaagtagatatatttgatgtatgtatatctctctagtctctacgtaggtgtcatgggacgttcctagctacttgcaacttggcaatggagttatgaactttcttatttcctaattttaattatgttggaacaacgtgggaagattctctcacgaccatcatctttcatgtgtgtttttttaatgacgccattcgaaacaaaacattctcccgactaatgaagacatgcggaaactcaacctagctcgaccgccaaggatgatataactaaccttataaccaataaaaactttgcgttctttagttactcatatttaagtgaagttaaatcatttgtaaaaaaacattgtttgtgtcaaatcattggtgaggtagaactaaaatggtagttttcttaaaagactttgatcttgcctaattagccatcatctttgaatagaaaatagttatattggacagtaagtgagacacattctctgcccatgtttcactgtcccacaaatctctaatgaggacaaagctttacaagtcactcagtgttttatgatttagctagctgttcagaaacccacgatttcttcatattatatatcccattatcattattttaatcttctttctcaccgcttagttgtttgatattgcacagatcagcaagataatccttcaggatatggttatggaattagtgctcctcaaaattttcggttcgactttattcacaatttagcatttgggtatgcatatgaaacaaacttataatctaatttcgttttctcaaacacaattcacaatttaacacacgaagatagatgaaaacatcaaggaaattgtatcactttttctactatgtaatgtcacagatgcagaaacaaagcgaactacttgctatcatacaaattgttatgacgccaatggaactcgcatattattccaccgaacgaaaaagaaacacaatcatgataaaataattgagagagattaaataaaattagattctgactaatcattgtttttcagcttttggtttccactctcttattatcaacttcgcttggggaccttcaatctcagttgcacaaaaatgccataaaactagccaaaaagtgaagaaatagaggagaaaaatggcgatccctcgacttttcttcctcttctattacattggtttcgctcttttcccttttgtttcttctgaaacatttcaaaactccgaacaagagatcttgttggccttcaagtcagacctttttgatccttcaaataatctccaagattggaagagacctgagaatgccacaacattttctgagttggttcattgtcattggacaggagttcactgtgatgcaaatggctatgtggctaagcttcttctctccaacatgaatctcagcggaaacgtgtcagatcagattcagagcttcccttctctgcaagcccttgatctcagcaataacgcatttgagtcttctcttcctaaatctctttctaatctcacgtctttgaaggtcattgatgtgagtgtgaacagcttctttggaaccttcccttatggtctaggaatggcaactggtcttacacacgtcaatgcctcaagcaacaatttttcggggtttctacctgaagatcttggcaacgcaactacacttgaggttttggactttcgaggaggttacttcgagggctcagtgccttcttctttcaagaatctcaagaatctgaagtttctcggtctttcgggtaacaactttggtggaaaggtaccgaaggtgattggtgagctctcttccttggagaccattattcttggttacaatggcttcatgggtgagattccagaagagtttgggaaattgacgcgccttcagtaccttgatttggctgttggaaaccttacaggccagattccatcttctttggggcagctgaaacaacttacaacagtttatctctaccagaaccgtctcacagggaaacttcctcgagaacttggtggtatgacttctcttgtgtttcttgatctgtctgataaccagatcacaggagaaatacctatggaagtaggtgagttgaagaatctgcagcttctaaatttgatgaggaatcaactcacgggaatcattccgtcaaaaattgctgaattaccaaaccttgaggttcttgagctgtggcagaactctctcatgggttcattaccggtgcatctcggcaaaaattccccattgaagtggttagacgtctcatcaaacaagctttcaggagatataccatcaggattgtgctattccagaaacctcacaaagctcattctcttcaacaactcattctcaggtcagattccggaggaaatcttctcatgtccgactttagttcgtgttcgaatccagaaaaatcacatttccggatctataccagctggttcaggtgacttaccaatgcttcagcatctagagctcgcaaaaaacaacctcaccggtaaaattccagatgatatagccttatccacatcactctcatttatagacatatcatttaatcatctctcatccctatcttcctccattttctcaagtcctaatcttcaaaccttcattgcctcacataacaactttgccggaaaaattcctaaccagattcaagatcgtccatctttgtctgtcctcgatctttccttcaaccatttctcaggtggaatcccagaaaggatcgcttcttttgaaaaacttgtgagtctaaatctcaagagcaaccaattggttggagaaatccctaaggcattagccgggatgcacatgttagctgttcttgatctctcaaacaactctttgacggggaatataccagcggacttgggagcttctccaacactggagatgttaaacgtgtcattcaacaaactcgacggacccattccttcaaacatgctgtttgcagccatagacccaaaagacctcgtgggaaacaatggcttatgcggtggagttctaccaccttgctctaagagcctagctttgtcagcaaaaggccgaaatccagggagaattcacgtgaatcacgcagtcttcgggttcattgttggaacttcagtcatcgtggctatggggatgatgttcttggcagggagatggatatacacaagatgggatctttacagcaactttgctagagagtatatattctgcaagaaacctcgggaggaatggccatggagactcgtggctttccagagactgtgcttcactgcaggagacatcttatcacatatcaaagaatcaaacatcattggaatgggagccatagggattgtttacaaagcagaagtcatgagacggccattactcactgtagctgtgaaaaaactgtggagatcaccatcaccacaaaatgatatcgaagatcatcatcaagaagaagatgaagaggacgacatactcagagaagtgaacctacttggtggtctacgacatagaaacattgtgaagattctaggttacgttcacaacgagagagaagtgatgatggtatacgagtacatgcccaatggaaacctaggaactgctttgcattccaaagatgagaaattcttactaagagattggctctcacgatacaatgtcgccgtcggagtcgttcaaggtctcaattacttgcacaacgattgctatcctccgatcattcacagagacatcaagtctaataacatcctcctcgattcaaaccttgaagcgaggatagcagatttcggattggcgaagatgatgcttcataagaacgagaccgtttctatggtggctggatcttacgggtatatagcgccggagtacggatacacactgaagattgacgaaaagagtgatatatacagtctaggcgttgtgcttctggaattggtgactgggaaaatgccgatagatccttcgtttgaggattcgattgacgtggttgagtggattcggaggaaggtgaagaagaacgagagcttggaagaagtgatcgacgcgagcatcgccggagattgtaaacacgtgatcgaagagatgctcctggcactgcgaatcgctcttctctgcaccgcgaagctaccgaaggatagaccatcgattagagacgtcatcacaatgctcgcggaggcgaagccacgccggaaaagtgtttgccaagtcgccggggatttgccgattttcagaaactcgccagtggtagggctgatttagatgacggaggcgataagggtagttttgtcatttcatcagctggggctaattttaacattgggctaacaagttaactttgggctgaatcaaaaacccatgttttcaaatctgatgggtgcactaaagcccattgaaccaaatgacatgattcaaaattgtaataggccccttgttgatggctgatccagcaaattgtagttaccagaggctaaaaaaataataaataaagattttaattagttttgttttaatggaatattaatctttcaattcacagagaaatattatcttttatgatacaataattataaataaaaaaatttgatttttttctataaatgaatttttatgaacgaaatataagttaaatatattgtatatgttcttgattaatttcttctattctgaatttgtttccatttccggttaaaatttttgattcgcaattgcttacatcaactatagtctatatatgacaaagtcaaatatccaaaaacgagattttgtaattatgagaatcagtctttggcaataatctctgatatactcaaaatagagtgaatacaattattggtttttcatgctaaatatgagtttgctatatataccaaatggttatataaatttttttggggacaaaagataattaaatatacagcaaatggtcaagttaccttcttcttcttttttttttctttttgttatcataaaattttataaaaaatggtaaaactacatatgccaacagagaaaaaataaccctaggctggttaaacatattaaaattttcagtgacaacaatcctaaaaaaaatataactttagaaaataactaataaaatacaaatcaaaattgcaaaattaaacataaattttaattatattctaattctttttcacgattagaaattgtcttgatattgataaaaatcaacttcaccgaaagtttatggtctttacgtgcctacttgctatttggtagatttttgaaattgaaatatatgcttagttaatctggttcgataaacctctcatttgaggttttgtatatgttgttattcgctaacatcgataacgtttattcactaacattggtaacgtcgaaatatactcaactaaagtccgattgagaaagaaaaaaaattaaatatagtcttgaacacgagtagaagaaactggaaatgtcaaacaaccatttcactcgccactgcagaggtggaaagttgtaaatcgattatctaggttttacatataagtaaaatatatccaaaaattgtaaaattgtacctttttctttttctcacgatatgagttaaatataccggaaagttgtaaagttgtaactgttttatgatttttctgaacccacgaaatatgattttaatggattggagagttgtaaaattctaactgtattaccgattttttcagctcgaaatatgagttacatatattgtaaatactaaattttacataattgtttctaaaatcttaatacaatcatatcaactatcttttttttttttttttgacaatcaatcatattaactatctaataaaagtataaaactacaacctctaaacttctttttttaaatttctttttttttaacttcttaaataatacaatcatatcaactatctaataaaactacaacctaaacttcttttctaaaacatcttttttttttaacccaaaatcaatacacaaaaggtgctttctctttgctatgaaatctctattcttctcaaaaaaatatttacatagttttcatcacctacattgtctctaatagtccaagttaggaatataatctgtattttccgaaaccgttgcaactctctctctataagaagttttgaaacatctgaaaccaccaaacactctcgacaggcctcactgcgacgaaccgtttcgatcgcgacccttcagttgtcgtctcccccaaacgaaaccctagcaaattcttccgagtctgctttcgcactaggtaggattctctcgctttggtaagcctattcttcgccgtcgcctaaatttcgagcgcttgatgaaaatgcttagaattaagtagccttgtaattcttaattaatcacgatttgtgctactcctcttttttatgtagaccatgatatatgccgcaaggatgctcgtgatctcggagaactgatgtatgcgtatgctgtaagtcttctcctttcgtgtagcttcaattgattagggtttttcaggtttcagagcaactgggttgggatttgctggtccgctttgtcttctactgttttacacaactaattatggttttgccttccagaacctgcaaaattttggatgcaattctcgtctctttaggtaaacgctattgcttcttctcttattttctaagtcaattgattctgggtaactttaatatcatgcttaaataaagttcgtggttattaattgtcgggatttagagctgagtttagttgtcttgtcgtaagatcttattgtgtgagatattaaataccagattgtttcacagatgcgtctttttagttgtggtaagtctcaggaggtgtgcttaacgtttccattattgacactttttcagtagcaactagcaagtgaagatggaggcaaacgaagaaagtttgaagggaaaaattgaaaagctagagggaaaggaggttattgtggagtcaaaagaggatgagatggatataataatagaagaaaatagggaagcagaacaggaggtaatggaggtgaaagcaagagatggaagaggggagcaaaatgatgtactgatggaagaaaacaacaatcagggtgagcaaaaagatgaggagatgcaagatgcttctagtagatctgaaagttctgacttcaattcagatgaagatgaacaaattctgtcccggcgtgatgatgagttggatcttgaggtatgcatcatggatatctcttgtttacttggcggaggaatagtgtatgtttatctaatatttcttttttcaattattgggcagaaacctttgagcgaggaagaaatagatgagttaatttcagatcttctggcagttgagagcaaggtatttaatctcttgcttttgttcaatggaaatctggataggcctatttaactttcaggtctaaatctcactctttatgattccccattgatctgaaggctgcagaagctcaagaagcactcgaaaaggagtctctttctaaagtagagagtgaagttagggaggaattagcacaagcactccgtggtgatgaggttaatttctttttctctctatcacagctacgggttcctttgctcttttccatttaaacattttaagagtgtgcctttttagttggatgaagctgttgctgctgaaatgatgacttttaaagacgaatgggaggcaactcttgatgagcttgaaacagaaagtgcaaccttgttggtatgtttcgttgttgcttcttctattcccacaaaacttactccaaagggttacttgtcatttaaagtaacttgcgcaactctgcttcccttttcgtttctttcttaaaggagcaacttgatggtgctggaatcgagcttccaaaattgtacgaaatgatagaaagtcaagcccctaatggttgctacactgaagcttggaagcaaagagcccattgggttggtactcaggtgacaaaagaaactgtggaatcattggctaacgctgagaggtttctgcacactcatcggcctgtccgaaagtagggtttttattatctttaacttttagttagttcatttactctgagtctcatggatggtatatctatacatttctggtgtagacgacatggaaaacttttggaggagggagctagtggttttctggagaaaaaactcgctgatggtgctgttaaagaatctctagctggaacatctgagcttgactggtcgtctctaaacaaagtgttttcggaaaaaagggatgagtctgtttcctttggtagtaagcagtgggcttctgtttacttggcaagcactccacaccaagctgcagccatgggattagaatttccaggagtcaatgaggttatattttcaatcatgcctttatattttctaacagtcctgatgctgatgatgatttgcatatgtttacatctgttaattttcgtcgctccaagaaaaaaagcattaaacgtgacatcccctttccttgatcgtttacttgccgttagacatcttaagaaagcatgcgtaattttcccattttgtttatttctgtttgcaagttgctgaatttttggcccgctgttatgccataatcatgacaggaaaacataacctactctgcaatgtaggttttcattaggatcaaaatattaagccaaactctataaataaattcgagcttatacttggttatcattagttgtagttgtagcagttttagatgatgcgaggcactatttacaaccttgggatgcaatcaggcttttattatcctagatcacgccatcctacagcttgagaatcttaattatactcctggcagtctggagtgattatcacagtatttattatttaattttgttgttaggtggaggaaattgaagagattgatgcaagcttagcagacccatttttagctgatgcaattgacaacgaaagagaacttgcccttactgaagaacaaaagacaaattatataagggtattacttttgacttaacttcttagatttctgttaccaagtcttcgaattttgaaagtattaccttttttggctgttagaacaaaataaaattatctaaaggtattagtgtttcacttaacttcttagatttctggaattaagcgttctacttttgaaattataaccttttctggctgctccttatgttcttgcttttgcggagttggcagtaaatctatatatatgaaataccatttaagactactcacaactcctgccttaccctttatgagcttcagtatgacattaaatcatctacaggtcaaagaagaggatgatataacttgtgatcgtgtacttcaacttcgtttgaaacggaaaagacgcaagaaaagatctaaacaggtctgttatgcatattctttcagttccttatcgtaactttgcatatatctgattgaaggcgtcttggtgttacaagtagcatagtcacgactatcttctttagtggatatcattcttaatgagcatggttttggagaatttagtcactgataggttgtgttttcctataattttcttagttaatattaatggtgattaaagtaccagaagatatattactgagaaatatacatttttagtataaagatgacaatttgcctgtaagtttagccctcacatcttgttgctcaattgtcaagtgatggttctttcttgtgttaaagcggcatttggggcttgtggtgccaggggtttcgttggtttgaaggaataatctttagctcacgtatcagtcttcatttggttttatatcaggttattaggtgtgcggcagagaatatggatgatgattctgtgtatttggatgggaataatactaccccaaattttgccaaagatcaagtgaaaagtccggagactagcactcaagttcataatagtgaagtcaacatagaggaaaacgggaatttttctaattcagatgtagataagatgacccccagcacacatattaatgtagatgccaagagagatgattcacagaatccagcaaacaattttaggtgtactgcctgtaataaagtagctgtggaagtgcatagtcatccccttttagaagtaatagtttgcatggattgcaaacgttcaattgaagatagagtttctaaggtatgcttttttcttcttccaattatatgtgacttactttgtttttgcatttgggtcagaatttagttagaaattagatttctttaatgtggtgaatagcatatcacatggatggcttcttttctgaaagggattgaaaggtaccaatcgtgttcatggactgctttttagccacccttaattggttagcttcaatatgattgctggtttggatattcaatgtgcgcaaattctgggggactggcacatggaaagattttctgttgccgtagtagattcagctgctttcctttgagtaacggacttcttttggtgcatgttacttttgttatttagagatcacatagaaatgttgccgtaatctaaagaatattgctatatctgtctctttctaatcaaaacgttgacttttgtctctttctaatcaaaacgtgacttttgcctacaggttgatgactctttggaacgtcattgtgaatggtgtggtcatattgctgacttaatagattgtaggacatgcgaaaaacttttctgtgcatcatgtataaagaggaatattggtgaagaatacatgtctgaagctcaatcctctggttgggattgttgttgttgctctccaattcccttgcaaagattgacactggaactggagaaagctatgagagataaaaagtcaatagaattgagctctgattcgagttctgattccagctctgataacaattctgttgatacagatgctgatgtcaatgtaacaatcaggtattatcatatactcatctaacaaaaattgaaaatttcagcatgttgccaactaatttggtatttttcttacgtgcatggtttttttcttttagctcaaagaagaaatcgaaaaagaaaattcggcggataatcgatgacgctgaactagggaaagatacgagaacaaagattgcaatcgaaaaggtgtttaattttttggcagttgcttttgttaaacttgtatataaacttcaaaaaaaaaattatttaagtattgctcgttgtacattgggttctttctttttgtaggcacgacaggagcgccttaggtccttgcagttttctgccagatacaaaacaattagctctatgggagacgtgaaatctattccagaaggtgcggaagttgaggttcttggtgatgctcacagtggttacatagtgaatgtggttagggagattggtgaagaagctgtgagggttcctcgtagcatatctgccaaactaaaagtccatcaggttagcatttacatatgtgtatccctatcatcataatatacttccatctcgcttgtcacctataccattgggtattaaagatagccatctcgactagaaatgcctattatggaaatagcttttgctgtaagtttggagttttttttttcaggtaacagggataagatttatgtgggaaaatattattcagtctatcagcagagtcaagtctggtgataaaggtcttggttgcattctagcacatacaatgggcctgggcaaaacttttcaggtgcttaattcttttcatgcacgaggctgtttggatatatcgtattatcgtccgattctattagtgcatactactaatggttaatcgttatttgttaattactggctctttatgtcttctctcacttaaacctattcaggttatagcattcctgtacaccgcaatgagatgtgttgatttagggttgaaaactgctcttattgtgactcctgtaaatgtgttgcacaattggcgaagtgagtttgagaagtggatgccttcagaagtgaaaccgcttcgcatttttatgcttggagatgtttcaaggtataaattcttctatgaaagaaacttttggtacttgacaattcagattcttatgttttctaatctagtctaggttttagatatttaaaataggggctgggtagtctatagtggtgtgccataacttatggcccataagactgctgaatgttacttatactaaagctatctgaagatcttttccctaatcaaagaatatagatgcaagccctctcgtccaaacacaagatctcagctgtcttaacttcctactaaactgacctattggcccatatatcaaacacttattttggcctatgtaagttgtatttttggtgacagtttctctatccacttcctgctcgaatgttttttttgaagggagagaagatttgatttgctaacaaagtggcgaaagaagggtggagtctttttgatgggatatacaaattttagaaacctgtctcttgggaggggggtgaaggacttaaatgcggccagagggatctgtaatgccttgagggtgagactataatgtcacttgcaaaattttattgatttctatcctgttaatattctaggtcattttaggaaagcgtttgacgtgctgtttatgtttacacattactttttgaaggttaatatttctgctatttaaaggccatatctgtatcatagattttgttgttttcatgttttctcttgtttatgatttcccttgtgcatatacctctgcttgcaatattttattcttgcaattcctaaacctatgtggctgcaggatggacctgatatacttgtttgcgacgaggctcacatcattaagaacaccaaggctgacacaacgcaagcattgaagcaagttaaatgccagagaagaattgccttaactggctcaccccttcaaaacaatctcatggagtattattgtgtaagttactgagggaactatataaaattgtgacctaattttttcttatctccagtatctttagctatgtctgtactgcaacagatggttgattttgtgagagaaggattcttgggaagtagccctgagtttagaaaccggcaagtctttcataccagtttttttttttttatctgtctattatgatgttatgtttctagagttttaactgtggttctccatacctgcagcttccaaaatccaatagaaaacggacagcatatgaattcaactgcggaggatgtaaaaattatgaaccagaggtcacacattctgtatgagcaattgaaaggttttgtgcaaagaatggatatgaatgtggtgaaaaaggatctgccacctaaaacagtcttcgtaatatctgtcaagctatctcccttgcaacggatattgtatcagagatttcttgagctttatgggttcagcgatggaagaacagatgaaaggatgagaaaaaacttttttgctgcttaccaggtcttggctcaggtataaatgtgataaaggccttgctatacttaaattaacaacttatttgagaaaaaaatgttaagaataataatgttaataactgatttatctggtattcgttttcatattctgaactctctctttggtattacgtctcccagattttgaatcatccagggattccgcaattaagaagtgaagatagcaagaatggtcgtcgtggtagcattgttgatattccagatgactgttcaagtgatgaaaatatagactacaacatggttacaggaggtaactcttaattggcactactcacatattttaagattttattaaactagtatgaagaatagaaggaacagaaaaacattggacttgttccatggttaagatagatgtcttttggttttgaattcaaggaatactaggtgcagtagatattatacctttttggtaccgttccagtttgaataagattgccaatagaggattagttttattggtctaagactttcttaccaagaataatctatgacatgcaatagttaagggaccttcgattcagcaatgttatgttttaagcttcatcatattctgtggagctttcaggagtgatctttctttgtttgcatctatgcaagttcaataatagtgagaaaagtattaataatctgtgtcattgttgttttggatattgacagagaaacagagaactatgaatgatctgcaggataaagttgatggatacctccagaaggtaactatagtttactcagcctgagtgaattagtaactactgcctataactttaaagtaaacagcagcgtaattgtgcacccatgctctgattctaaccctgtctttgtgccaggattggtgggtcgacctacttcaaaaaaataattataaggtgtcggacttcagtggcaaaatgattctgctattggatattttatctatgagtgctgatgtgggggataaggcgcttgtgtttagccagagtatcccgacattggatctcatagaactttatctttcaagagtacctcggcatgggaaacaaggaaagttctggaaaaaggggaaagactggtataggttggtatcttattctcttatattcgcgtgaatgttttttgaacaattatgaagactctaacttcccttgatggatgcagaattgatggaaaaactgaaagctcagaacgccagaagttggttgataggtttaatgagcctgacaacaaaagagtgaaatgtacactaatttcaaccagagcgggatcccttggaattaacctttatgctgctaaccgtgtgatcatcgtcgatggttcatggaatccaacctatgatcttcaagctatatttcgagcttggaggtattttctagactatggaattaaaatttgtcaatatagcattacaaacggtggcttattatacgtggacttattggttgcaggtatggccaaaagaagcccgtatttgcgtacagattgatggcacgtgggactattgaagaaaaaatatataaacgtcaggtattgaaaggcataaaacaatgttgaattttgctgtttctttccttcaaagagacattcatgaatcagatctgttaatatgattaggtaaccaaggaagggctagctgcgagagtagtggatagacaacaagtgcacaggactatctccaaagaagagatgttacatctttttgaatttgacgatgatgatgaaaaatctgaagccgtaactgagataagcaagcaaaatgaagcgggacatagcaatctggtggagcaagcaatcttgtggacaaagaaggccactttatctcgtgttggtggcgacaaattgatggagaacttactacagagacacggccccaagtaagtttcacaagcgtaaccatattcacatcagtacctaaaatctttggttttttatgctacttgctttgtaacactatatgtcctttttcactagctggatttccagtttccatgagcacgagacattgctacaagagaatgaagaagaaagactgacaaaggaagaaaaagacatggcctgggaagtttataggagagcacttgagtgggaggaagttcaacgggtcccattcagtgaatctccagtggttccaaaaccttctccttccacacaaacagagcccttgccccagccaaaggggttcaacaggagtcgttttgtaaaccgcaactgcactagaatcgcgcaccagcttacactcataagccaaggattaaaagtcggcagcagcacagtctgtggggagtgtgggcgcgtcataaggtgggaagatgttatacccgcatccaaactttcagcggtaattgtaaactaaatagaacattgcaaaaatgttgagttcatttttccttcttttaaattatgagactgaaccaaaatttatgggaatagtaacatttgaaactcccttcagattagatgtgagttataatgtaactcagggcgtttggtaggagcatgttgaaatttgtaatgacacctgtttcgagattcaaatatacaactttcaacttgtttgttgttttaacgtttaaccgtatagcagaaagcagtcactgaacaaatggaggcctaagctttctgattcaaccattgccggatacgactgatttcctgtacaaaaaagcttaatagaaaaagcaaaaaaagagtctgcttcaattacgtttcctacacttctttcaagagtttccattgcttcagtttcttctgcaactgaacagcctcgcttcccattcccatctcttccacgcctttaactattgcggtgtatattgtctcatctggcttacacccacctgttagcattatctcaacaacctctatcgccatttctatctctttcttcttgcacagcccttggatcaccaacctgtaagtgctacctctgatcccattccctctattgctcgtctcctttaaaacttggccagcttcttcaactaggtttgcccggcagaaaccatatattaaagaccgacgagttatatcatccggaaagattccagcatccagcatctgatggtacagctccaatgctttcttcatcaggccctttttagccaatccatcgattacagagttgtaagtgatcaagcccggcggacaacatgtgtttttcagcaatccaagcaactcaatcgcatcatctaccatgccctctttggacatggctccgagaactgtgttgtaagtgactatatcaggcaaacacttctgttccagcatttggtagaagaaatcaattgcacgactcaaaagcctggctttgcataaaccattaatcaggatgttgtaagtaataacagttggacagtaggacgtctggtacatgatgtttagaatctcctccacttcatcccagtactcgtgggaacagagggaatgtagaagagtgttgtaagttacagtgttcagttccaatccatgagataagatatgctgaataaccgaagccacctcttccaaattccctcgcctgcagttatagttaaccagagaattatatgtgacaatgtcaggatagcaaccttccactgccatgtcttctaaaacttctatagctcgagcgcttccacagtacctgcacacgagttcgaccaaaaccgtgtatgtaatcataaatggagggcaaccattctgcagttgatccttccaaaacctgatggcttgctcagcattcccataatcaaacatacaccgaatcactgtgttatacgtgatcacatcaggagggctcccactcaaactcatatcttctaagaggaccaaagcagttcttatatgccctttcttgcaaagatttccgatgatcatgttataggtaatagtatctggaaccccaccagacattaccattactctcaagatacacattgctttatccagttgatcaattctggctagaccacggactaagtttgagcaagaaggaaaatgaggaacctgattatgtcgtgccatcacctcgacaagtttgcacgcatctgttaacttcccattgctgcacaggttatgaaggatctcattgttggtctcttcgtcgttctctgtaattggtccatcagatgataaaccaaattgcttcataggtttcactctggctctcaagttagtaccgacaccatagtgatggaactctgagcttctctcagcatgatcatttacattgtcaatgcacacactacttaacaagccgtgacatctaaaaaaaacatcctttttcagcccaatttcttgcttccaatctaaagaagaaaactttctgcaagataaaggattcgcctgcttttgagacagactaggaatatgcaagaactgaacctcaagtagcaaattcgacgaagccatttctcagaatccagaagctattttaacaaaacagagatctttccttttacaaaagcttatcaaactcaatgaagaagaagttagaccaataattatttgctggtatgatgttcagtctctgctgctttatctcataacctattcttgagtgaatggagaaaccaaacctgtgaaaaggaaaggtacaagttatagagacagagaagcagactgaaacagtttccaacaaaagaaaagaagcagaaaaccttcaagttgcggttaagtttgagaaaccctaacaaatctggagaaatgatgagtgtgagaaactcactgttcgttgttcgaagccgacgcgggttttgagatgataagtagggtttatcctaaatttacaatgtgcaccctatatgtctcgacatgtttcatttattcccacaaacttatgaaacatctaacattaacctcctctgtttttattccctttgtttttgtgaatcggtttaattattttgggccaattcagctatcggattgggctttttcaagttttgggttgagttacaaccaaattaaaaatcaaacagagatcaatttctccgcatagaaaaataacatgttacattaccattcgaaaacaagatgaatagtcatttatacacgcctctcttacacattataatgtctaaataattgcattatcatattcaaaatttagatatgttggtcaaaaacagaattaagtattataaattgtgtataccaaattagttgacgctatcattgcatatcatactcacatactacaatatttattacatgaactaagtgattgtattccagtggctattttcatttaactataacaaaaaaatcgaatgcgataaaactacttcgaaaataatcgatggctcttggaatttttataaaatctagttcttgaaataaataaaaatttctatgcaatatttttcggtaaatttttgttctctattacaataaaattttattttaaagaaatgaaattgttatttagcgtatatttgtaaccaaattagcaggcgtaaatacaaatcctttaaataactctgttgttgtgtggatatgcggtaatgtccacccgtgaataaatgtttacgtgttatatgacccaacaaagtgaaccaattatattactcctctctaacgcacttgtttattgcatttttatttatttgatggtcgaaacaaaatagtaagagtagttgttgcataggaaattgcatctgcttgcttttgaagcgttaataacttataaccaagcaagacatatatcatacagagcaaaaaattaggcaaacccagaaaaagccaccacatgttcctcttctcatgatcttaaaattgaaaaaaagaaggtgataagtttaatctaatcttgaccagtgaaatagctttttgttgcttgttgtttttgttcattcttcacagatttaattgtcacatacccaacgtatatggatggacctgtagatttaattccagttttacccttttcttcttcctttcatctgattttgtttgctgctttttttttgttttctggggaatatggaaaaggttaggtttcatatttggacctttttttttggtgttgaatttttcttcttaatttttatgcaaacatggaaaaggacatgcgatgataatcctgaatctactagtgcttagatctgatgaatactggattattaaaaaaaaatattactaaaaatttcaatgatctagggtttcttcagatctttaaatttgttgctgattttactcgatttctcttagtctgggtgcagttgatggagctccagctattttgaccatccaatttcaccagaaaccctaaatcacaagactatgtaagcattttccttatggctcttcttcctgatttttgattcagctaatttggtgatgaaccgtttatatatatctgtaatcgtactttaccctgaaaatatgtacctaccatatgtgtcatgtgtatttttattattttataaatggttgtgatattattgagacatgaatgaatgatgcttcaattgtatgtagtgttggcacagaagtaatggggacagagctaatgagaatctgtgtgaaagaagatagtgatgatttgccatctgttcctcctggttttgaatcatatgcaacttttaccttaaaaagagtagtccctgctactacttctgataaagccaagactcctgcaattgaaagtgtttctgcaaccgaacaagctaagatggaagttgaatctgatgaagccaaagctgctcgggctctacgccgtagaccttggattaatcatagcggatgtgatgatgatggtgattgtgctgcaaacaatgacaatgctgcatctcaaaatcctgatcaagttcgttctttgttttgctttttattcctggcaacttgtgtttcaactttccatctctttgtttgccttgcttatgcatggtgttgttacagaattgtgatgtgaagccagctcttccaaagggtgtggtcaggggatgtgaagaatgtaaagattgtcagaaggttaatctcagttaatgcttgtttcagaaataaacttataaacgtctttcgcttgagcattagatgtttgatcttttcttcttatttacgattttcataaccctctaacgttatattcacaagtttggcaggtaactgcgagatggcatccagatgaagctcgtaggcctgaccttgaggacgcccctgtattctacccgagcgaagaggtcttgttcatattctatacttccaaacccttttaactgaatttctagctccatatttctaacataaactgcaaacctgtttctaggagtttgaagacactttaaattatatcgctaaaataagaccggaggctgaaaagtatggaatctgtcgcattgttcctcctccttcctggaaaccgccgtgcccactgaaagaaaagcaagtatgggagggttctaaatttacaacacgtgtccaaagagttgataaacttcagaatcggagttcaatgaagaagatttcaaagcttcctaatcaaatgagaaagaagaaaagaaagtgcatgaaaatgggaatggattctgtcactaatggtatgggcgatccctgttctgcaagcactggaatgaatgaacttgagacgtttgggtttgaacctggtccagggttcacactaaaagacttccaaaaatatgctgatgagttcaaggctcagtactttaaaaagagtgaaacttctacagacgataaatgtaaagttgataattcaatagactgctgggagccagcacttgaggatgttgaaggtgaatattggcggatagtagataaagcaactgaagagatagaggtaaagttttgtcccctgttgttctttttatttgggggtttatggtctattaggacccctgtatctcctaactaccacaatgatttttcaatataggtgctatatggtgctgaccttgaaactggggtatttggtagcggattccccaagatatcatcaagtcacaatgcttcttcttcagaagataaatatgcaaaatcaggctggaacttaaataactttccaaggcttccgggatccctccttaagtacgagggcagtgatatttccggtgtccttgtgccgtggctgtatattgggatgtgcttttcttctttctgctgggtaagattgatctctgtgaattgcataatttattttgcaggttaaagcatgtacttagttgggatctcttccttttactgaaatcaagcgtagcctcatacaaaaacttacaactacaaccggatgtgctttgttttttgtatacctattcacaaatagtagataaatgtgattaaatttctgtgctacatatttacaatgataatttttccattattcctaaagctacgctaggattattattgattcaatttcccacaaaagtattagttagtgtcttcatattatacagttttcttacaccagtggatgcaattttcattacttcacatcttatttcgttttatattttccacttctgacattccttttgttctgctttttttttgtttttgtttacctgaaatagcatgttgaagatcaccacttgtattcgttgaattatatgcactggggtgcaccgaaattgtggtatggtgttggggggaaggatgctgttaaactcgaggaggcaatgaggaagcatttgcctgacctttttgaagaacagcctgacttacttcataagctagtaagtattggatatttgatgaactaaagcatcgctttgcttctctataatcaatgatcaatagaatcttgaaaagtagaaaagtgttcaatcacgatgatgttcttatttcactaatatgttaatgttagcatataatagaatattaccatatctgtgtttccatttttgtagttaatcaccctgtaggaatttctacagacccgttttatgtcctctattgacttgcacagttgcacctggtttaaatacatttgttgcagattattgtttcggtataaaacaaatcctttgatgctctttcgtgtaggttacacaactctccccgtcaaaactgaaaaccgcaggagtacctgtgcaccgttgcgtccagcatgctggagagtttgtcttgacttttcctcgggcatatcatgctggatttaattctggtttcaactgtgctgaagctgtgaatgtagcacccgttgactggttacctcatgggcagattgccatagagttatactgtcaacagggtagaaaaacgtccatctcgcatgataaattgttgcttggggcagcaagggaagtagtgaaagccgactgggagctgaacttactaaggaaaaatactgtagataacttaaggtggaaagcattcagtgcgaaggatggaattttggcaaaaacattaaaggtaaagattagatattcttactcttgattcttgaagtttagatgcctataagtgtgaatgattggaaaatcctgaactcatgaataacttgagaggtatctttgcaaactggtaccacggtggtatccgttgtaaactggtagcatgaggttgtaattgatatggaacttgaaattctcttaagttgaggggtattgcatatcacacgaatctacagctaactaacaagggaagaacggaagattactacaccacctcttactagttaaaacaaatgattagttcaggaggtgttcatcttctgcctgggtctaactgtacaaataaatctcgtaggtttaagaggatcattctttattgtcaatatggtgattaatggacttgtcatgttttttatttaggcacgcattgacatggaacgtacgagaagagaatttctgtgcaactcttcacttgcattgaaaatgcacagtaatttcgatgctaccaacgagagagagtgctgtatatgcttctttgatttgcacctgtctgctgctggctgtcgttgttccccggagaagtattcatgtttgactcatgtgaaggagttgtgttcatgtccatgggttactaaatattttctatttcgctatgatatcgatgaactgaatgttcttgttgaggcagtggaaggaaaactgagttctgtatatagatgggcgcgtcaagatttaggattggcattaagtacagacgtctcaggaagcaagatggagatagatgaagaaggaaaagtccacaaggacccgactccacaaacaactgcactttcagggaaggatttgcagttgaaagtaacatcgaaagaagtaagtaaagagttagaaaagactagtaaattatctcatgttaatttacttctgaaagaaaaggaggagcaaataacgtcaagtcactgtatgaagcctgtcaaagaagaaactgtttgtgattcttctgatccaaacgtttcagcttgccaaccatctgaaggaggcataatctgtatgacagctgttaagtccgcaagtggtaaaaagaattcacagagtctacccaatgatgtgatactcctcagcgatgatgagtatgacatacctaggaaacgaggttctgtgagaagagatgcaatttcttctggcaagaaattagaaatacgagagagaccgacccacgttttggcgttagaagcttctgccaaaattgctgctccaatttgccaaagggaaggagattcgctgcgtgatacacgaaacactatatcattgcctactaatgaccaaaaaacaatgagaagggatgtaccgagttctacttcgcacgcggaagttaatgcggaggctactgggcttactcaagatatatgtaacagaatggcaactaacagccacggtggtggaaaacctactagttgtaaatccaaaaactctggaggtttggctatagtggatgttgtggatgggacaagaagtagttcaggtacaccgtcttgttcgcaaaataatagtccggataggttcatccgccaaaagggtccccgcattgcaaaggtcgtgaggagaatcaattgcaatgtagagcctttaagttatggatgtgtgctgtctggaaaatcatggtgcagccggcgagcaatttttcctaaaggtgacatgtggtcaagtatttttgctacttgagaacattaacagttatacatattgcaagtgcttattgtctattcttctttggtgcaggatttcgtagccgggttaagtacataaacattttggatccaacaaatatgtgcttctacatttcagaaattctggatgctggacgcaacagtccattgttcatggttagttggtagatagatgctgatctaatttaactaaccttaaaaatatgtctgagtagtgtttcattttcaaattaaatattgccatatgaataaatccgatgacatgaatctgaaccggaaatatgatccattatttggctgtcaaagacgtagagtcccatcatgctaacataaactttaaaagttttgaactgagtatgaaaccggaattaacctattaatcaacctttaaaatcttgtgtgtgtgtgtaaaaaaaggttgttttgtcttgattctattggtcattgtgcagttccaaaaatcttgcccatcaacaaactgtgtggtatgttctttttgtcaggtttacttggagagtaatcccagtgaggtgttcgttcatatgtcgcctacaagatgctgggagatggtaagagagagagtaaatcaagagataactaagcagcacaaagctggaaaatcagatcttcctcctttgcaaccctctgggagtcccgacggttttgaaatgtttggatattcgtcacccgcaatcgtacaggtaaatctttacaagttttgtattaggctcagatttttatgcttatttctaattatatatacatttaaattctaacaacaagctaatatgaaagtccaacttttgacattttctcatcttttatgatagctagaaagagtcggagtatagcattgttgcttttgtaaaatggaaagcttcatttgtaaatctagttgacatatagatactctaatgtgattaacaggctatcgaagcattagacgtgaatcgagtttgcacagactattgggattccaggccttattcccggccacaagttcagttccctgcaaatcctcttctcagagaagccaacacaagtggcagatcgaatgtgggaaatctccagctaaaccctggacaccatatatcgcctactggaataaattctattcttaaagttctgttcaagaaagctagcatggaggaactaagctcacttcaagaggttttaagtgagactaactcagatatggtgaccgaacttgtgaaggaagagatccagaaccgtcgctgatttgattcaaaggggattgattttagagtgtacatacggagttgaatccactcactgttttgcaggatgaggctcccttccctactcattctttttggacacccttacagaggaaggatataagcatacagctaaaaacctagtttcttcttctgtctcaaaacaaaaagaaaagagaaagatagaagattttagggttcttaaaaccattagttttggttactagtcaggctaaaaggatcatcaagtgtgtggcttagttcccacatcagtttactagtatgacatctgttttgaaagtccaaaggagatggattttaggagatttcatatcaacgccctcttaatgctccattcatctctcacttaaagcatctgattttctattttgatgagcaaataatgattgataatcttcataatcaaaggtaaaacaacttataaattaaaaactcaaacatccaggaatgagggtgacaatttcattgaaatgcttatagttttaattaaaatgtactttagacaacaatatttaataagttgaaaagaaaagaagaagcatttcggtttcgccaaattaggttcggcttggttcctgcatcgttagcattgcttgctgccaaagaaaacatcaatttcatataattagatgtttcaccgtaacaaggtgtgtagtagataaatatgaatattctttttacctgaaagcaagacaatgtgtaatgcacatcacttgttgttatctggtggtgtataactattctgatcctgaaaacacatcccacatataaatagttttgaaaaattaatcaaaattttagtaaaactaaacatttttcacatgtaaacgtaaatgctacacataccgggatgagtttccccggataaggagaatgccattctcctctagattcttccgcagtttctcagccgtaagtcttgaaccatcctccatatccatgaaaatctgaatttgttgttatgtaacttaatggttagtcctagtgattgatgcatcactgagtcactattcgaaattaaatccggcataatgcatgttgttgacgaagaagaaaaacagactatagttgtgtcaatacgcaccatgttggtctccacggctgcaacatttactctaatccctttcatttgattcaacccttctgcaaatatttacgtaatgaatttactttttgctgctaattattgtagtgagtaaatgagtggtgccaacgtaacgtaccagctaacaacttagccttcttgtggtcatgttgtagctttgggaggttttcttggagtgcgaccaaagcggctgcgcacagaacacctatttgtctcattcctccacctaatgttttcctaaccgttttcgccttctctatgaagctttgcgaaccaacgattacagatcctaccggagctccaagacctttagagagacacacctgaaaccagagtgtgtgtgaatgactcttatcttttagctataattttcagatgttatagacgagaaagagagaaattggtacctgaacggagtccgcagccttaacaagcttatggactggaactccaagtgcctacaaaaagagatctcaagtcttttatttatgagtcttatggataaagaatggaaaacagttaggtgattgatattacaatggaagcattgaaaagacgggctccgtcgatatggagcttcacgccatgtctcttcgcaatctctccaactttctcagtgtattccacgctcaaacatctcccaccagagctgcattatcaggtgcatggccgtttattgacacatataagcatagtattcgaacgaggctctgctttaacagtcaaatatttaataattcatcgtacttggcatgtgtgttctccaagcaaatcaaccttgttgatggataaaacgtgcttcctttaggatctctaatagctgcttcaatggcctccaagtccatggtcccgtcttcttcattcttgactgtcttaggatgcactcccccgatagtcgatatccctccattctcgtaaacatggatgtgacaattgtcgccaagaatcacctcgctgcctctcacgtcgcagtgaaccatcacgctgatcagattccccattgtcccggatggcacgaacagagcagcctctttccccatcatcttagccatctcctcttcaagacgtctagccgttgggtcatatccgaggacgtcatcatccacctctgcgttacacattgcttctcgcatcgcatctgtcggtctagtaacggtatctgatcgtagatccacacttctcatcaccatttttacacctaatttacctataagatattgtttgtgagaaaaccctaggaacacttttgagtaccaacacctataacgtcggaattagtctgagtttgacctatgaaataattctatccgaagaatcaagaaaagagaatctcctgtcccaattgtttataatttattatcaagaaattgtttcaacagtttgacggaagaaccttaaagaatactataatatcatcttagaattgaactggtcttggggacaacaaaatcactctcctactaaattgcaaatgtccgtacgaatctcacaaaagtactctgttttcaatattataaaatggaatgaggagaatatcacgaggaatatttcagactataatttagattcactccccccaatgtgaaatatagtaaaagcattaaccataatatcaaaatagggaatgtaagaagaagaaaaaatttaaaatataaaaagacaagaacaaatatggtgttgagtctgttgagacatgaaaatgatgctcatgcattatgaaataacaattaattttaaataataacccctgaagtaatctaaagtaatcaaatatgtaagattcagttagtaaattaagaacagaggtttcgaagaaataaaatgttaaagagtaatattcagatagccgagacaaattgtgttaaaaaaaacaagcacaattctaaatgaaactagaggagtgagtacctgtgtaaatgaagaaggatgctcttgtttctgattctaatttgaagtttcttatgaaataagcttgtggtgtcctgagatcaaattaacacataataataaaaattagaacagaaaaaacatggaccgtgaagctaatatataatgaagaagaatttcagatttgtatgttccttcgacatggcagagaaataaagaaataaacaacaaaaagaaggatactaacacagaatctcctaaatcataagaggaaattcgaatgggtgtgggagattcaaagatctttttcaataaaaaaaaaaaatttgagaatctgaaacagaaccttttagtctctccacactaaagattctttctttatgaagtctcctttgatatattttgagaaagatgcaaaaaagtgagtgccacgtggataatttacgtgacatacattaggccaccaaagttaccatttggctatcatgaacgccatagagattaggaactgacatcgaaacttagaaagaaagaaacgacgaaaatgaaatattatcgaaaacgacaaattctttgtttggtttgataaagacaaagaaactaactattatcaagaaagtaatgttcacgagaaaaggatgaaactgagttctatgtgggaaacacacgtagatacgtgtcccaatgcagaagtaattcacgagaatgttgtcttcttattactctcggactcatcgatgaaccaaagctttatcattcgttaatgtcaaatcaaattttcaattagtaaattgattcagataccgtggaaattctaaggtgtccggtcacatttcatcccttatatatactaaatgaaaattagataatattctaaactcaaaacaaaaacaaaaaaaacgtatatgaaaacacccaaacgagttgtttaatgacattacaaacacacgtacgtaacctatacacagaaatgtgactatgtgagaaatcatgactataaaacaaaaacacatcgagagatctactttgaaaacataccttcttcagtattcacacacaaacggtgatcctctaactcatatataatgattgtatttatactctctattgtatgttgaatattttagtaatacttagaatgtgtatatattttaccataaaatcagtcaattatattaatatactactaaatctaattttaggcaaatacaataatgaatataatcttaggttattatatactaccaaatagagctttttcccttatttcttttgtttttcaaaaaaaaattattcattcctatatcaattgttcaatgtttcatttgttttttttttacagttaaaattcatcatgtctccaattaattgaagcattaggcaagatatgtcatctagaaatatggttaccacattgattctaagaaaataaatcgaacttgtgtgtgtgttttcaaaagaaggagaagaagaagatggaaaatgagagcgaattagggaaacgtaccactttagtagtaagaaacgctttgaagttgaagacgtaactcaaatatacttttcaaagtatgtactgtatatatagtgtggagcagctgtacgtactccatctataaatagagaaagacagagatatagagatagagacagagtcagctccaacgtgtcagctctactcataattggcgtctctgttctctctctatcacatttgttttatttcccatcggattcacttcacctacatagtcctttttcttttgctgaccgtagtggacactcctttttgatgacagtcgaattcagtcttagccacctgacctgacctttatctaacccaaccaatcagattcgtacctcaaatctatgaaacatcttttcagatgatttttctcgccaccacaccaaagatattagctctctattttgatccctataacttttcatctatcatcaattctaaactctccacagttgtgttttaacaaggttgataacgtttctcatcttcgtaacgcttcaattgtgtgtacgactgatactttcaaggtatctcaagatttttcacttcacgcatattattgctccaatacaaaaattaaaaaaccttccacatgcgatcctcagcattaaacgtaaatagacaagacttagattctaagggatttctctcttgcaaaatttacttgattttccacacaaaagaaaggttataaagataaccccatctctctgtagaaaataaacttttcatctcccagcaacatcctataatacagcataacttctccaaaagcttctaactgaccaattctcctgtggactctcgcattatctgtaaaacgacgctataacatagagcatgaaagccgatgacgccgtcactataagttcctgcaaccgaattagcactgttcagtcagttcttgttacatcatcaaaagcctggttgactgatatcacttatggaactatttaatttacagaccagacccttctctttgctatatcttaattcagcaattgtggcaacacatatccaactcatgtgttcccaattcatacctaatacttgtgcatttagtttttatttcagtacaagtacttcttatacctatagatgtcacaaatcaaaacaaacagcacaatcatctacaacctaatcaactagtgctgttcattgaggcttagccaacaattgacctaaatatcctaaaccattttttgatcaaaatgatcattttgtgtgggactagttaagagaaggtttcaagcgaagagagatgtaagttatgcaaaaaaaacaacctggttgttgtaaagaaccatgggtatggagtagcccatgtactcgatgccatttaagaacccagtgtatgcctgcaaaacattgttcactgagagttaaacataggtatacacaattaaaagaactcctgacatatctaataactagatcaaacaatcaggagcatccataaaataacgcttggacacatttatatcacatatgccgctctctttgaataaacctaatactagatggtgcaacataaaacggattctttaaaataacggagtcttgatggatatgcataccaaagatgctaagagtatagagccaaaaactaaggaaagagaacgaagaagcctctttcccattctcaatccccgtccactttcttcgccttcctcctgcagccagtgtcaaacatcagtgcacatcaggattaaaagagccactaagtgtacggacatcaaaacataaggcttcaaaaaaattcaaaactcacgttatatattggagatgaaggtgcttcaaaggattttaatttctcaaaaattctgtaaacaaatacaaaagacatgaactgcagcggtttgtattcaacattacgttttatcgcaatccatgcactctgcaaaagaaagaaacagaaagagtgggagaggctcatatctgattgtacttgaaatgtcatatatgcataaatgtgtaagaaacaagtcactttttctgcaagaattcagtcatttatgcatgatgtcttgattcataaagggtacagataaaaaaaaaaaaaaaactgacatttctaataatagcaaacctcatatttcttaaaaactacttacaaacacaactgatattgctaggttgatcaacatatcattcttggaggacctggaaaacctgtaacaacaagggtaaatcatgagtagtaacagatcctgcttttgaatgatgaaaattaataatgcgagtagactcataaagaatctctaccttggaccccatggtataatgggctgcttatcagcatatttaatgtccttggaaacctgaattatgaaaaattcaccaaggattgagaaagaaaggtcatagagttcaagacagcatatgacaagaaagaggatacgatacacaccttaaacgaaccaaaagtcacaccctttttcctattcatcaactgggcatacatgagcttatcatatgccttctcaagctatcaaaaggtaaaacagagacgtgttaacaagaaaaaaaaaaaaaaaaaatcacttacaggactccaaagaaagagagaggtaacgtaacttactagagcagcagtggcttcatcaccgctcctctgagcatctttaagtttccttccataagtttgcttgatcttgtcaaatccctctatagggttaacaccaagaacctgagaaggtacacacactcatgtcatgagaaatacacaacgaccaacaaaacaagtcctttatagggctctaacgatcaattacctcatacggattaaagtcagcatcagactgtggattaccagccgcagacgaagcagcacgtatcacaatcctgctctgtaacacctttccgaggggaagcctgagaatttcaatcatcctcattacaatgataacgtgtaccaaatggtctgataagcacaacaatggaactctcttaagtgcaattgaaagttgtaaactttataggcaacagtaagaagctcatccacgaattaagccgtcggaattcaattgacaatgtttatgaaggaagaagataacggttacccacaaaatccgtaagtttacacaacaaaaagaactatcaaacgatgattcttcgactttaaagccaccgaagagaagtggaaaacaaaaaagcagcatcaagagaaagtacctgacaaaagaaggcgatttgggagcgcgaagagagttcctgagagaaatttgaggatgatggtaacgaagcgcgtttgatgttgagaaagccatgacggaggagcaagaagtagatagtgcgggagccatggcagagcagagctctagtagggttaaaaggaaactagaaggttggtgattgatgtttggaagctaatcattcaatactcaatagtttgttaaggctaaaaactgaggcctgaccaatagttcgcgtggcccaatggataaggcgctcgcctccggagggggatattctcggttcgacctccatcgtgaacgaattaggtaataataaagacggcctgctttcttcagcccaactgatttatcggcccaatccagtgtctttattagtttgttttcgtgggatctctggtttacttacttgcagggattatctcccaattccaatccaaacatgccacacttttcttatctctttttcagatttcaatctcgtccaagaaatcgtttagtactcacattcaatttggaaatgtttttgcataaattggggttggatttcctacctctttttcactagattgtgcattatcaatttatgaactttttctggaaacatattaaattgtagatccaatattttatcttaacaaatctggatctgttgagaatgtttttctgtaatttagagaggattgtaattgtgtagtacatttgataataaacttaaatgtgaattttagactaccaccaagtaattatcatttcaaagaacaaaccaaatagataataaagaactgttagaaagtaaaattgtatataataagataagaaaagacattacaaagtacaaaccttctccaagtaaacttctaacaaaacaaaaaaatagatttggattgggaaataatatctaaaatcctatttaaaacaaaataaaaacaaaaaagatataacgttaaggaaaaggaaaatactagtagaaaaaaaaaacatgtaggcatcaaaaggaatattctcaagagttttggctataaaaaaaggtagagccgactcaagaggtcttcttaactcacacaagaaccaacacaaaacaaaaaatattaagaaagtgatattatgacttgcagccaaacactcggaaacaacaacaccaacaaataccagatctgcgaggagatcggccgtggccgtttcggcaccgtctctcgcgtctacgctccggccaccggtgatttcttcgcttgcaaaaccatcgacaaagcctctctctccgacgaccttgaccgtgcctgtctcgacaacgagcctaagctcatggctctcttgtcctatcaccctaacatcgttcaaatccatgatctcatcgacactgattcgactctctccatcttcatggagctcgtccatccctctgtttcgatctacgaccgtctcgtctcttctggaaccttctttgagcctcagacggcgtcgttcgctaaacagattctccaggcgctttcgcattgtcaccgatacggcgtcgttcacagggatattaaaccggagaacattctggtagatctacgaaacgatacggttaagatctgcgatttcggttcagggatttggttaggtgagggagagaccaccgaaggagtcgtcggaacgccgtattacgtggcgccggaggttttaatgggatattcttacggagagaaggtcgatctatggagcgccggcgtcgttttgtacacgatgctcgctggaactccaccgttttacggcgagacagctgaagagatattcgaagcggtactcagaggaaatctccgttttccgacgaagatattccggggggtttcatctatggctaaagatttcctaaggaaattgatatgcaaagatgcttctagaagattctcagccgaacaagcattaagtaagattctaaaaccatcagatctgtttctctgttgaatttttaatgtcaataaatttcatctatttttaacagataatgttatcttatccacactaatccattttttagtaggttggtttaatgataaagtgaactaaatttggtattttgtaattttgttttgttgcagggcacccatggatccaaagagcaggagaaacagaggagagattcatctagaagattctctcggagaaataaataagtgtcaagtgatagcttatcatctctctcggtggttttttatctaacaagtatggaggagtgtcgggcatgtaaatttgggttatgggcattttagattccgccagcctaccaacctagtagaagagaagactctggaaaagacttttaaccaaaaaaaaaggagctgaataataaaagaagcttgtttgttgtggctgcttctgagtttggcgatgagttttttttttttttctgcatttgttgcttatgtgaattttgtttggcttttgaaaagtctttttaggggtagagacggtaatgtagagaggataacaaatctttttccgccttttacgggtttttttttccatgtggggtgagtaaaaggatgtgagaaagcagagttgtactcctttttctgcttttttttttttttaatcaataaaaatagtttatgttatccctaatctaacactttgttgataaagacctaatctaacctttgcacatataattaaacgaaataattttctcaagcaatgaaaaatgtcgttcagatacttggagaaaccatatctttttttgtttttattatctgattgttatccactctcttatatttaaatagtacctttttaattcaaatgttcgtttacatgcggatcctatttcagtgtagtgtcttttgataacaacattccaccgatttaaagttaatgcacacttttcgtaatagatcaacttttttcactcatgactatttgatgttgaaaacaagtacgttgagggaaaaacacgatgtacggtggtgggctagttaggtacgtttcttctgttttctaaaaattccccacattccaaaatttcaaaactacagcacttttgttgcaaagtcaaattataagaataatcctctcaattttctagcatctccgtatgttattctttgtctgcaccaaatatatattggaatctttcaaaaaagatcaaaacccacaaaggtaatatatggaatatttatttgatatgagcatattttaagcatattctttcataaatagacctccaacgaaatttccaatctccatgagatattcccacgttagtatatgccgtggatcaaacccttattgattcctttcttgaaagagtctctttagttataacgtgactcattatgagtcttctgagtcagtggaagttactactgtttgattaacaattctaacatttttttggcctacaatatttttatttttaatgttctcgttttaaataaatgtgaacacatgaaattcccctttcatgaatgcatgaaaggatcctacattatttaaagaataaaataaactacataattaaccataatttggcagtcctaatcaaaggaataattatatttttttaatcacatattgcgtgctacctcacatgccctatgacttgcatcagcatgcccataacactttataaattattactagctccgatactatccacaagaataattaaataaagcttattcgaaaattcatatgttattgattgtggcattagaaatcgcatgtcacgtaactacgtggcatagtatattaattagtttatatccatcatcaacacataacaatctttagtggtgcatgtcaagcgtcgtggagtctagcaaagaatccactaacgtagaattcattttaataattcatggttgcagatgtggaatcatttttgcttggcaacaagacgtggaatcatttgataaacggaaagatggaatcgttatatctgtttttcttgtcttttgaattgctcttaaaataaataaaaaggttattcaaaaaaaaaatcagatgaaacaaaacaaaatttgggagaaacgaacgaggtggagaaggcaacacaacactgaggccctacccatgtggtacggttagctcaatggataaatatctcatcgatgactcttgagttgttgttatatggggtatcgagtagacccataatttatgcaaacaaaaatcaaatttaaaattaagaccataatttgtgaaggcaactactaatattatattatacgactgcattgaccgattaaaatacagttgtttcaatactattagatccaaagtattttagtgctttattatattctaaagaagagtcatttgtactaggctgttacctacaaatatttacgagcaattaaaaatggaaatctagttctgaaagaaacatgcaagaagagacaaacttgacctaatttattgaaacctaacttaactctatcatatattgaatctgtcagagccttagctaataagatatcgacattttttactattcctaactgcgacatatttcgagagacaattatttcattaaagaaataatagtatatagttactcccacaaataatttgtgccgttgtggaactgtctcttggagacgcgttaaaggcagcgttaggagcgggacccattacgactggtggtgatcagcggcttgacagatcacgtcatgtggtcgaccgaagaatcaactacgtggtggttgataagctatctttcttttagcaatttgcctttggatagtagcgatgccgtattataaattgtttttttctccattttctttttttctttttcttctgtcgatatttgtctaaagatggttcgtacggtagcctcggaagtcaagcacagaaaaaagcaatcacgtggtgaataaaacaatcacgtactatccaatgcacctttgattaaaacgagggaaattaacgataataaactaactcatgtggttgaaatttattcataacatacatttaaactaggatttaaggttttattatgattttaattgtggtcgagaaacgttttaaagaatttccgatttttctttttaactcgggatattagatttaacaaaaaaaaaactccggatattagtttttggttttgcaagcggtgactatggtcgacatcaagacggatcggtcgatccgattattattcttcaattggttttatgaactccttcaatatatatgtagttttcatgtgggaatttggcaattgaatttaacaacggattagcgacgggttaacgtcttaacgacgtttattttataaagacatttgttttaaagttgagcaaggttcatgccttgacaactgtatatatttaaccaagaaaattaaaaatattattgttggaagcatagctgaaaagaggttagtttaaagatcataaagagaagatatttggtttaggaaataacaagtagaaagagcatggcacaaaaataattggcatgcatgtttagctatgaaaaccacaaataacatgctgttggaatgtggcaaagtaacacaattacacttttatacatcatacatgacacaccgttttaaattctacttcgtcattttcgtgaacttttttcttttgccgagggatattttcgtccgtgttggctgaaaattccactttctgaatggtggtttcttttattatccccaacaacaatcttcagctatggccttatttgtaggtatacccgaaaaaaacaaaaccataagggcccaacttttcgaccttaagatccttattacggacaatcctgttttgtttgtcgaagaatcgcaccagtaaattctaaagattccttttccttacccacaaaaagaacatccataaactcgctctaccgatctctttctcagctatgtttagatcagtatatgaatatagatcttacatagagaactaattgattaaacatattgcttcaacaaaattttcgtgaaatgtaggaacctttactttgtaagctcaagatgttattgaaattgaacctttacaagatgataaaaaaatttacgtatctaatttcagtggatgcctcacgcaaaccagatcgtccagcttatttccatccatcttatactgtgacacgcctttcatttggatatagtgatccctagcttcctttcttaagctcctaaacggcatcacttcccatttcttgtaatttgacttcttcctggtctcactcatgtccggagatcccgagacaggtccttttgtagggtctgcatcgccccacaccttgcaattaccgaattgtcctgacccatccctcttcgaactagttggctgttggctcctttgtaggcgtaaggcagctgtgtgagctctgcttatcatttcacgacttggcacacttgaccagtcctcctttctctcggatctcatgggagaatggatccgtattacctgccaagcttgatttattcagagagaccacaaaaagtttaacgattagagcaaagtagaattatggttttaacaagttatctgtacaccaagacactctagaagttggtagtatgcccttccttgaagtgggttgtgccctttccttggcgtggaaaagtaacgcgtcctacattgataataaagatacaaaggaaaaatatgatcagaatcgtaagtatccaacctcccaaagagctttggaaatatgagagatagcaatatggataaaagttatttaagatacttgccactctgtgtatccaggatcaacagtgaaaccatatatgtcaacaatatcgcacatggacaatgctagttcaatggatttcatcccggttcctttggcacctctgcgtaggacaattccttggaaaagataaacagggtttggtatacgctgttacaagataaattcaaagtcgtgtaagaattgggataaaatccatgtaaaagcgaccgcaaggattcagatttcagtctcttcaattatgttatggataaacgaccacagtggaagttgtaaaaacaaaacaagtaatgatgtagaaaaaagaaagaaagaaaacggtaatcatacctttatcatttcattgaagtctcggtgggtcacactttttattataagcacttcattgtctgcagtaaatgatagttacagaaggttacatcacaaggccaaagctgcaatttgcaatgagcgcttgaagaaaatgaatcacaagatgcagccagacagtttctctttctaatgtgagtactaaccagacccattgagaatcttaatcatgttacgagctgcaccacgaacaactagtcggaaatcccttttcactcctacgtacttggcatacttctgcaacatagttcaacatgaatataagcaatgccagcaacaaaaatcaaaattcaagaatcaagaccatgtcgaagtgtcggtaaactcaaagaaatcagagtgttagacatattattacctcattgacaggagcttcattgtctcgaaatacagcatcatgactgtcaatctcttctccgaactctgtttttaacagatctccagaatttccaacaacagcgcatttatgaaactgccgtgggtgaaaaggaggcttcgctggaagaatcacattaagatgctcttcacacaatgtacgattataacacttatcagctcccctgaaacccaaaagatcaaagagttcaacaagaaagatcaaacaacacaagcaaaccattagacaaaaacgtttagaatcatacaactgtgcaattctcatagctgcgtagtccaaccacccatcagggcgtacatcgaggtattctcttgtcaatactgtagtcatattgcggtactgcattacccagaaacattagaattgcgagaagttctaaaacaagaaaaactaatcagagaaagaaagaagcacaaacctgctcccataagagaactgcctcacaaacattatacttgaactccaatgcttcaaaaactttaaattgtgcattgtactgtcattgaaagataagaatgcaagtgtaaaaaacttgatcacaataaaaccaatgaaatctcaaaaagaaaccagacaagtgtaaacatacccaagtactgttagtgccttcagggaacttgaggataagattacagtgatcgataatatgggcagagagtccaagccctctgttagcctgcaacaacattattgtaactcccaaacacatctgatttatccaaaatcaaaactagtgcgccataataaaccaaaactgtggcatcgatccaaatccgaagaatccatatagaaaagtaacaagtccagaatcaaagaaactgggaaaggagacaaaccacgcactgttgaacgctggactgaaaatctgacaagatctggatatcttccggctgaagatctagtttacgattattatctgcgcgagagatgaagaatcatattgctattcgaacaattgaagtgtatatataatggaaagggaaaggtacggcgatagatgacctgcgaagaaggaagattggatggtgaaaacgaaaacggagaaaacagcgacgcagccgagaagttgaagaagcggaagtttgcggccagcttggtgagatctcattcttcaaccatgaaagagcgaatccaatccaatccaatccaagggaagagtaacgaagcaggtgagtgtgatgatccaagaaactccaaaactgatgccgccggaggatactcttagtacgacgccgtttacgagatctaaatcccaaggactaaatatgcaaaaaataaatcccacgtgacctttactgaaaatacaaaacaaatacatacttaagtaacatatttctatgtgaatatctaattcaataaatagagtttttatacatttactcgtatatctaatctcgcataacatgtgtttttttcgctattgtatactgtatttctattttatgtagatatttttcatatgtttctaataaatatatttttttgtaagaaaaataaataaaaaaatagtgatatattattttaggttaagcataaatgttagcatatactgtagcatgtgtacccttggcttataaatactcttcttcttgttaagaaatcaaaatctctattatttttttcttcttcgagaaacaaacctaaaaacaaaaatctatcatctatttcttttctaatacgtgatgcagttcttttctccatacagagataatcaatcaccgatgcatgtaagcgtcgcgattaacgtatttgtgtgagttcatcgtctcagaatttccaaaactttgttctttggtcataagtaattctatagagcaaacataataatacaaccaagggaaatctaactctaagtcgaagaagaaagcaagagttgagcagtcttgtgctcattttcgacgaatggatgatcatccgcgatacaatcattttcacaagtttgatggttactcaacattaacgagccgtctcgtccgttgttcgtttcagaatgtatgacaaaactcgagtttccaaatcctgtgatccgaccaatgctttgcttacggtttctttctcgctcatctttaagaaacatgtcgtcttcaagcaatcttagtactttctcggctatgtttcgaacctttagaccacaatcgaaccctctctcatcaatccactccatctttatagcatcttcaataatagctctctcatgttgaaactcactgaatacacttagtgggccattgagcaacaagtggttcaacattgacaacgtgttgcacatgccgcgccattcctttctatcaaacactaccattctacaaaaaaaaattaccaatcaataaattatatagacactaaacagtaatctgattcttgactattatgatgaattactataaaattttcgggatttttgatgcttaaatggtaattttattgccgtcaaaaaaaaatatggtgatttttatttttggtgtagtattgtgttgatgaaatcattgatggttctgtgaatctgtgatatttatttctaagttgttttgcttatataacagtgaggcaaaataacctttgacgtagaatcttcacgattctttggaattgatcaacctcaaaagaaactcttgttatggccgccatggagcgtgagtctatggatgagtgatcgctgcccgtaacttcttctgtcaatcttcacattagacagtttatatttcaactcaattagtacaagagagagagagatatgctaaaaataccacaaaaacaagttttgattgcaaaaacacttgataatacttgtaaaggtttctaaaatatgagagatttaggtttagcaggaaataggtttataactttagtaaagtttactcacagttcttctgcagtaacatcggttacagcaagacgagcagtcttgatcttttccttgatgaagaaagaagcttgcttcttcaattcatgtaacaccggattctgcataagcttagacattctgctcgatcaataagcatctatatagatcattctcctgtcttcaatatatattggagtaccttatcagaattgtagtacgtaagaagaacaacaactccactatacctagaacaaaaaaaagatcacccactctttgaacgtcaaaggtgtaaattaataaacaatggaagagatcaagagagcaagaagagacaagaaacggagattgagaaacggatgcttttatcttttagttttctgttgccttcttcgatttatcttctagatgatgtcatctttaagtctataactatttctttctcaaatattttacaacctacgtgaaaaaattcttgattaagctattttaagattataaatttattccgaaaacggttgaggaatttttcatcgcgcggatttggtcttaaacgaattagtattgattcaaatgaaacgattgattgaaaacctagataacgttgttgagatatgatcaacttgtaattctataattatattccatgaaataaggaaacattcttactttagacaaaaaaacaaaaacaaaaaggaaacattcttacttgtgcaattgcagcaaatgaaaaatgaaatttgtgaaccaagttaaataaagcatctttagatgcactaagggcatctccaacccacccacatctatagaggtgttaagatattattgtacaagtaatgaagacttctttaagaaattaggctattaacaattagactctatcatcaaccactaaaccatcacattagtttacttttttaccttttccttcggtttagtctaaagtcaaacgtcatttttttcttggtgcgagtatggttagcctcgtagatgatataaccatcataacttactatatcgttaaaatcgaatatagtttttgttcatatattatatgcaatgtaattgctaatgatagaattttttatgattagattgaataattattatgatgtgggtcagcccaaaagcccacagaaaaggagtattaatggaaaacatgtgaatagtttcttcttccccttttctcaaactaaaggataaaaaagctttctttttctctctctctatcatctctgtcaaattcaaaattcgagtattcgaaaaatccagctccaaaatcgttgattagcagcgactaaaacccaaagtttcctccaattttaacgaattacttcgtgggtcaatctcataatctgggaacactctttcggttttgattttgttggcagcatctattctaagcgaaatgatgggaagtaaaagagaagaagagaggaacgagaagattattcgtgggcttatgaagcttccaccgaatcgtcgttgtatcaactgcaatagccttgtaattttatctaactctctctcccttttaccaatttttgtcttccttcaaaggcttaatttgttctctaaattgttcctgtgagtgtatcaactgagttttgaactgatgggtttcagcttctgtgattatgatttctataatcttgtgaaagatatgttttttttggggggcttgtgtttgtctagaaaatgttttgatttatgtccttcgatgggttctatcagtgaagttaatctgcaaagccaagtaatttgtttatttccagatatagaaatggaaagagaagctcgcaaagctacaatttttcgttcatttgtgtgaatttggatttaattccattctggctatattatagtaagacttgcaaatgatgcagggccctcaatatgtttgcacaactttctggaccttcgtatgcatggcttgtagcgggatacagtgagtaccttccccttcctatatactttctttgcaactattcctgacctctcttgtgttccttccttgtcagtatcgtacgctggtttgtgttaccttttctctttccatgatttactttatcatcttacatcttacatttacagttaagttatatgtaatttgtaaagtaggaataagtaacctttttgttaacggtttcctatgttcatcccacgattaagttttctgctatattgtaagctatcgagtctaaattagtttaaatatttgtagacaggactcattgtgatcccccagaagcatggctaatgcattgtcttacaaaatatacatttatatctagtgtttgattgtttttgtgggctttagtttttgtttcatgcacctgatttcgtcgacagattgtgtgagctgatttttttggcatcattgtatttggtggctgacttataccttttattttattactcttgtactgatataacagaattctcaatctattcagtggatccctttttatttatgtctcttgtcttgatttggtaaattttggtgcaactgttatacgagacttgttatcattgaaaaggaaatataggcttatgtgaaatgagcagctgtaatctttcttcgcgttatttttaggtatattcggaagtatttctttctccagctgtgcatcgtttcatatgcggttatagggttcttttgatgcatatttaagtatagggaggtgcagtgtgcattttatttattacgatttcctgtttcctagctaagttacactgccttgatgtagtgaatatgttcctaccttttctttttctcttagtttcagtttttcatggtttattttattttgatgacctgcagccgcgaattcactcatcgtgtgaaatctgtgtcaatgtcaaagtttacttctaaagaagttgaagtacttcaaaatggtggtaatcaggtagtattgatgctaaagtttcaattttctaaattttccttagatagatgtttccgtctgtagcttatgagagttttctatttcagcgcgcccgagaaatatatttgaaaaactgggaccaccaacgacagaggcttccagaaaacaggtttaaataattagttttccttggtgttcatgtttgagcagccagaaacattgcttttttgaaaaaagaaaaaatatgatctgtttaaaatccatgatatgttgttgttgttctttggcagtaatgctgagagagttcgcgaatttatcaaaaatgtgtatgtgcaaaagaaatatgcaggcgcaaatgatgcggacaagccttcgaaagatagtcaggcaagattatcttgtttcttttatgccatctttctaaatttgactcatattttgctgcaatatttaggataaaatcttatatccaaagcagcaatgtatttgagtgaaattttccgtctaagtgtgttctattggtagtacttttctttttctttaggatttattttatacttgaactttctaatctaacaatacaatattatgggttttaagatgatcaatgttgctctgaagctcaaggtagtcatataggtcttctagtgtctgatacttattatttcttttgacttgctctaaattcaaccatgtgcatgcatgcatggaacacttatttatttttcattttccctgtaatgcaatggacaggaccatgtaagttctgaagatatgacacgacgggccaactcctatcattcttactcccaaagccctccttacgattatcagtatgaagagcgccgttatgggaaaatacccttgggatttaccggcaagtctgcttcagtgaaaggtcttcatgcaaaagcctctagttttgtatacagccccggacgttttagtgatcatatgtttgaagaccaattctcaaatgaggactcagctccaagggcttcagattattctgtttcgagtgcaggagatccgttcaggtctgatatacagtcaccaaattttcagcaggaagctgaatttcgtagtccccagtttcagcattcaaatgcccctccaagtgaaaacttatttccaggcaggcaacatcaggtaataatacccacatcctctaggaatcttgtttgtatctgggctaagagtttttttgttacaattgtaaatcacctcctggtggaaaaagtgagtttaccgatgttccaatttcttcgttcagagaactacatcttctgggagtgtcagatcagttgacagtaatttcatgtctatcaagtcatatacttcgggtggtttaggggaagccgtatctgaaagtcgtcaaaatacaggaagccagcaaggtaaaacatctaatcatgttcctttagtagcagagtcgacaaaggctcctatagatttgtttcagttgccaggagcgccagtggctcaatctgtcgatacatttcaaccttcaatagcaccccgatctccacctgtgaatcttcaacaagctccacagacatactcatttaccccggcaaattcgtttgctggaaatttgggtcagcaacccacttcaagaccatcagaattgtctgcgcctaagaacgaaggttgggcttcttttgacaatcccatgcctgctgcaaaatctacaaacgttattacctcccctggagatttccagttggaactgaaaattgaagagattctacagcctagcacaagcatgcaattgccaccctatccatcaactgtggaccagcatgctttgtcgataccaagtccatggcaggaagatctctcgaatgttctaaaagatgttgtcgataacccggtgagtcttaagtctttgctctgtcttttcaattatattatcgcgggtgcagcatgagtaaataaaaaggaaaatgtttcatgtgccaccatctcatccttgcattgactatgatacttctttcattcatgaaaattgtgatgatcctgtacatgttgggctcggcaaacaggctggtctcatgttttatggaatttattggccaagctgtaatctgacaaactaaatactgtagttacttatgtctgaaataacggcatgattccacaatcaagattagcattcatacttgggatgtaatgaactaactcctacccaacctgtttttagcagccgtggaatgcctttcccgactctattgaggccaatcctttggacagcagtaggaatattcaccaacaggtagatggagcaagtacttcgtcatataacactgatcaccagcatttggaatcacaagttttagaggttgttgcattttcccttatcacgtcagtgtattttggatgaatctctttgttgattcctctgtgatgatgtcaagtcacaggaattaagcaatgatggcacccaaacaaccagaatccctgctggctcttctgcttttggttttccaggaaatattggcatggcaccatcatactcggtactcccctcttatggtttcagttatgctttgcagttttcccttatatccttatcgacctccctccttttaacttgcctatccattatctagtctttgatcgattgagatctttattcgcaggaagaagcttggcagcatgtaaatgaacaaaagtcagctaatccatttgatctcccctatgattctgagttcgactcaaatgacatggtatgtagagccttgttcatgcatttgtcttacaatcaaatcagatctcacaccatcatttgtatgcaatggtgtaatgttgtagaaactagagaatctaaaatatctaagttgggtgacgacttcaaatcttgttcagtggaattatcatgttctttttgagagatagtatatcatatggatttgataggaaaagaacattttcctttctcaattatccaaatcaaagaagctaggcaggaaatctagagaatcccttactttcccaagctcagtatctatccaaaagaccctatctgtttttctcattctatttttgattctgcattttgtctgatctttttcctgttaatttttcttcgatgtttttaggatatcctcgtaatatagttcatgtggagctcatcttaacctagactttcgataagcatatttgcaaactgtctatgtcattcaatggttcatttgataaaacacaacataggtcgtgcaagattacaagtgaatttctgaatacatcactaaaagccttttttttaaattctatatttgactttgtcgtggttgtaattaatgccagttcttggacatgagttcgttacaaggggcactgcccgatatccagacaccacaagccttccttaatggtgtatcacaaccgtggctcgctgcagattctgtaccctcgtacttacctgctccagcagtcgcacaaggtgatattaattatgtgctatgaagtatactcctttctttttattagttccctacaggaaatttatcaccttactatgttgcatgaaatatcaattcacaagtccgatgttcgcccccttcaaagtgtagctattaaaaaattccgtcttgtcaaagtttgagttgaaaatgttctcatgaaagaaagtaaatatttatggttgtgcacactacatatatctgatactctctctggctgactattaggaacctatccttgtaaccttataggccttgtacgttatctaattctatgattttttttgctgcaggtggcttagcatacatggcagggcaagcatcaacgtaagtttcaaaatgtgataatgtaatctttaagatatgatggtatttgcatatgattactgcgatgcttttgagtgaaaaatccaaaaagtggtatgttcgtttgtttgataatgtgatagatcctttggttacatttttgaacgcatagcgagaattatcctcaaagaatgatttagtgagaagatattttgtttctacggaggagcttatctttttggcttattacatggatgtaggaattcagcagcacaaggccctgttgcatttactggaggcaatccatttgcttagacacacctcggtcttcttcatcttcttcttcacttatgcctagatgcttcatctttggattcatcttcatttagtgccttccatatttttttaaaaaaaagaagaaaccagccttattgtgcaatgtgtttatttctttgttcggaaccgacttgagctgtatgtacctttgatttgagtgtatttgcaagtggacatgactgtcatgattaataataagtcggactcaaccaaaaagcaaagagatacgaaacaagcaggtgcaactcataaacatgaatgcaacttgacttagctttgatgtcttgtgatcgagaagttggaatctctcttttttcggaattcatttttctgcgttcagaaaactacgtcatcctgggagtttctgaaaatggtcaaaatacaagaagccagcaatatgaaatatctagtcatgcatgtatctttagtagcagagttagcaaaggctccaccaaatggttcacttttgttatatgcaagaagagacgattggtggtggaataacaataatatgtttgtaatctttttttctttgtcaacatttataagtataataacaaattgtattcattagtaataaatattcctttgatttatgggatagatatataaagttgacaaaaaaataaaggattgatagataaaatttagcaaggacgactgcaattgcacacacgttggggaggtaatgaaggtgatatttgagttgcatcagtacattggcaaagatcatatctaaatctcttgtttttgaaatcgcctaagcaagccttgttcccatcatttccgcattttccagtgaacatttgatttaggtgacacctcttgttcgcaccttctacgtcttttgttttgtttcaacaacaacgacaaacatatttttttattttgtagttaacaacgacaatttaaataaactaattgataatgcaaccgaattgaagttaatttgatatataattctatatctatacaagtgatgaatcaaaactaatatgttattaccttgaatatagctcacgacaagaaacatgaaaacacaagaaaccatcagtaaaatagcagatttcatcattcaaaggctgtttgagattgtctactctgtcttaaactcgtcaaaacttataacattcgtagtaaaaatatacacaacacaaggtaagaatagtaattttccattaaattatatataacacaaaagaagaaaagagaaaggtggagctaagtcaacgagatcaacgcgatcgttcatttattttagaatattcttctatatctttcaatatttaatattttgtttttttactaatgttggaaattccttttttttttatatatcttagcagttttatttgtccccacagaatattgctcaacactcatatttgcttcacttgaacatcacaaggtgaaatacatggataaagcagcataatcaggatttcatttacttggtccactagaattttgggttaatcagaacatcatcaagtttgttgtcaccccaacaacaaagggctccatcaatagtcgcgtcaagaagtaaaaaacaacacccaacatgatggatatgggaagggcaggcagagctcggttgtacacagataacaaaataagagtgcacccaagtccggagatgatcgcaaggtaacaggcatacacagtcatcagatcatacattgctgccctaccaacaagaacactgtagaaaataaagtctccaagaccaagttttatgcctctatttgaaatgtccacaacgttatccgactcctccaaacctcttgcttcttccctattatctccccaacccatcaactcaactagtggagacatttcttcatccataacactttctctgtcttccatatttcctctggttcctactgaggttgagtgctctgacgcactgggacttccaactagaggtgacctctcaagtccacctctgcttccgttaccaataccatcatctacattgtctatatccctcaccgcaatagcattataatccatattatgagaattttcccttccaagttggtttacatcatgattccgaactgcttgcagctcaactgatccagaatctgaaacccccccaccaccaaccaaagcccttaaactcgagccacggtttctcctttggttgcctgatgaaacagtcggcctagcttcataaaccatagcaggaagttcctcatcgcggctcgaagccagctctaccaacaacttaagtggcccaccaggtgccaaaacagcaaccaagtcatacaaagctaaagccaccaagataaaccatgtagtccactcaggtaacttagtgaaccaagctgcaacaactatccccataacaaccatataacactgtctaagcacaattggtatcccaccagcaaacacagacaaagtccccaagatcgtgaaattgaaaagcaatatgaagcaggtgatggaatcaacaggaattgagaaatgctggattatcgataggaaaattgcacctcccatcgtacctgagataaagaatcaacaatgaattcgagtaaaccctaagaagaagaagaagaagaagaagaagaagaagaagaagtgaatgaggaaacaaaaattggtacctaagacaaagaaggcagagaaacgcatgtaatgcttaaggaaattggtgaagttatagtagaagaggagaacaaggatgaaagtgacggcggcaatgaggacgacgaagacgatggcgttggcgagactaccttcgagcttgacggtggtggagtcggagggattctcgatgtaaatgaggttagcggcgctacggatctgagggtcagaagtgacagagagagagtaggtgagaaggacgacgaggaacatgcagatggagacgggagccatcacgccgataatctcaactccgagggaatcgaggatactagactccatcgttatcgatttcggtggattttttggcttacgccatttttgggagttctagaggaagaagacgagaggagagaggtacttctgagtcttcttctgaccagcagctcgtctatgccaatattttattttgtttgtgtcgacctacgatatatcatttaaagcccaaaagggcaaataacggtacaacaataacagcccattaggcccaataactacaaacaaagctacttttttaaaagtatatctatttaatatattaaaaataaaattcggtttcgggatcaaatgtttcgattttcaggtcggaccggagtggattaaactggatttaaaaccaggattttgcctttggcgtaacctttcgaagaggaatgtctgcaaacgagatacccgacgagctatggagaaagatcctagagattggcgtaaagtcttcgactttctcgtacaaagatctttgctgcatctctatctcctctcgccgtctcttccgattgtcctgcgatgattccctctgggatcttctgctcgtccatgatttccctaaccacatcgtctctgcttcttcttcttctgaatctcccaccaagtttatctacatgactaggtaaccttgtttgattgaaatttgtgctttctgagatttcttctgttgttagtgtgagtatttaagctcctatggatgtggttgataggtttgagagggagaaggagaggaaattagctgcccatagaagagctttactcaggaaggagagtgaaatttctgaatggggccggaggattcgtgaattggaggcacgattgtccgacgaggctgagagactacagtcttcttctctgcaattttcagatttgctgaaagtgaggtagtccccaacctggtgaacattttgtcagatttcagaaagtttcgttttttaaagtcgttatagctctctgtctatggctacgaatagcaattataaaggagattgcttgttcagttgtgacagtttagaaagatgattctttgttgatcaagtgaaatgagattggtcctactgttcttgcctcatgcatccttctcatgtaattttttaatggctttctcaggcaagcatcagtagctttgaacgtttggcagccggaggtagtacgtggtagacaaaagcaaatggttgagcaaaacgctgttcctgttgagggtcgattgcgtgcacttgagatggagatgaagttatgcaagcagcaaatcatgggtttgaatagggcacttgtgagtcttagttagggaattccaatcatgttccacacttccactggttgactttttaggtctcttaaattgttatctctgtaattgcagagggaggtaaaacaccgatatgacatagcaataaaagagctagaatccatgaagtatcatcctttacgagattacaagtcgatacgtaatggagaccaaggaagtaatggcaagacgaaaaagttgaaaactagcatcaactatagtggagaccaagtaagtaatggcaagaggaggaagttgaaaacaagcattgattgtaagtttatgaacatttctcacttttcttcatgtagtagtgttaccgaaaaattctattcttactctccaaaaattatacatgagtatattcctgaaaatctgcttgttctttgaagtgtgagacaatgcaatgtagaagagttttatgccgatatggacttgtccgaaactatgacgtgggatgtttaatgtttgaagttatagatttacattgttgatctttgttatcttagttgtgttatcgattgtgggtttttaatatacttatgaacacttgttatcttgattccgcaaaagcagttccagcaaaacccagaaacacggagaagctgttccagtcagaatcagaatgatggttggctgttccagtcagaatcagaatgatggttggctgctccattccacagagagattgaatacttgagagttgttgttgttgtattgtttgtaatatttccaattagatttgcagaagaaagctgaaattttgtcacataatgtggtcgatatagaattctgtaagtttggaatatcatgaataaagatgtatttgtttaaaaggtataaaactccttggttctttggcatgtctgggtcaaatcaagactctgttctgctttactgttcccattggacctttttttgtactcggattttccagttttggtttatagttttttactagtcttttcatgaatgtgatgatgatatggaagaatgctcctaataaggaatggtttcatgatcatcattgaactctagagaaaacgattatagatactaactcatggctaaatggtttcttaatctggttttcgttgcattgaatcatagtcggttcggaatctcccgctcgaaaactgcctggaatctagatggaggatttacggatatagacatctgttgtcaatcgggtaattatgtttttactattaaaaaaaaagttaccctattagccgcgtacagaaattcttcagcgtgtgggtcccgatggcgacgtgtcacaattaccttttgcttaatcttaattggataattttaacaaaaaggtcaaaacagtggcatagtcgtaaatcctgtaaatttggtccctcccttttttaactcgccggctaagtttccgtcactcccaccacttttttgattgaccaaaggaagaagaagaagaagaagaagaatctgaagagagcgatgaagcatattttcaagaagctacacagaggtgggaatcaagagcagcagaatcgaaccaacgatgcagctcctccatcggatcaaaatcggattcacgtttctgctaatcctcctcaagcaaccccttcgtcagtcactgagacgcttccggtggccggagctacttcttctatggcctctcctgctccaaccgctgcttcgaaccgtgcggattacatgtcttctgaggaggagtatcaagtgcagttagccctagcgatcagtgcttcgaattcgcagtccagtgaggatccggagaagcatcagatccgagcggcgacgcttctgagcttaggaagccatcaacggatggattcaaggagggattcatcggaggtggtagcccagaggttatcgagacagtactgggtaagttttctctttttatatctagggaaatgctggattctctctttgtgtttatcgactcttgggtcataatgacttcaaggtacgccgagcttgataagagccgaatttagcatgtcatgattgttgggattcttattagctaattgaatttcattacttctttactgatccatatgccaagtaaatttctttctggtgatttttttggttgttgttgcacctgcttggttttatacagctttgtttcctctctgacgattcagccaaagcttttatagaaagttttgccgtttttacactgcctacatgattttacatgaataataacttgtagtaaactatttctaggaatatggcgtgcttgactatgaggagaaagttgtcgatagtttctacgacgtatacagtctatccacagactccgcaaagcagggagaaatgccatcgctggaagatcttgaaagcaatcatggcacacctggctttgaagctgtagttgtaaatcgacctattgattcttccctgcatgagttgctagaaatcgcagagtgtattgcactgggttgttctactaccagtgttagtgtgttggtacagaggctggctgagcttgtcaccgagcatatgggtggatctgcggaagattccagtatagtattggcaaggtggactgaaaaaagcagcgagttcaaggcagcattgaatacttgcgtattccctattggatttgtaaagattggtatctcaaggcatcgtgctctgcttttcaaggtatattctcaaaccctcttcctagatttagtctcttgtcttatcctacttgtggcaagtcatgaaatcgttgaatgattggaccagctagtaaaaagaaggaaacatgaaatctcatatgttaaggatgattgaacaaatgacttgtgctgttttcgcagaatcagatgctttgctgcttgtactcataaatcttgtttgattttgaaaactgatccgtgggcagtttacttctcccaatgtaggttttggcagatagtgtcaggttaccttgtaggttggtaaaaggtagccactacacaggcaatgaggatgatgctgtgaacacgataagactggaagatgaaaggtgtttttgtttatctttttcactatgattccattattttcttttttctttttacgaaaatgtaacatatctccccttctttcagagagtacttggttgatcttatgacagatcctgggacgcttatacccgctgattttgcaagtgctagtaataacaccgttgagccatgtaactcaaatggaaacaaatttcctacagctcagttttcaaatgacgtgccaaagctctcagaaggtgaaggaagtagtcacagttctatggccaactatagttcttctttggatagaaggacagaggctgaaaggacagattcttcatacccaaaggtgggaccacttcggaacatagactatagttctccttctagcgtaactagttctactcagttggagaacaattcctcaacagcaattggaaaggggagtcgaggagccataattgaatgttcaagaacaaacatgaatatagttccttacaatcagaacagtgaggaagacccaaaaaaccttttcgcagaccttaatccatttcaaaataagggagctgacaagctgtatatgcccactaaatcaggtttgaataacgttgatgattttcatcaacagaaaaataatcctctggttggtagatcacctgcgccaatgatgtggaagaattacagttgcaatgaagccccaaagagaaaggagaatagttatatagaaaatcttctcccgaaactccaccgtgatcctcgttatggaaacactcaatcctcatatgctacctcaagctccaatggagctatttcctcaaatgtgcatggcagagacaatgtgacatttgtgtcaccggttgctgtaccatcatccttcacatccactgaaaatcagtttagaccaagtatagtggaggatatgaacagaaacaccaacaatgaactagatcttcagcctcatactgctgctgtggtacatggacaacagaatgatgaatctcacatccatgatcacagaaagtacacaagtgatgacatatccactggctgtgatccgaggcttaaggatcacgaaagtacaagttcatctcttgattctacatcctaccggaatgatcctcaagttcttgatgatgcagatgttggtgaatgtgaaattccttggaatgatctcgttattgcggagagaataggattaggtaatgtggcctgcagtttatttgtttacgtgtttgaaagatttaactagttagtatctattttcttttctattttggacggcagctaattattatctagtgggagcacaattttatagcatagccccttttttacgatctacagttgcttattacaagggatagctgtgcaataaactttaggtagcatatagcttttggagatcatatgtcctaatgcttatcttgttttggttagggtcctatggagaggtctatcatgctgactggcatggcacggttagtttttcagaaccttacatttgatttcattagagctattgtagcaacttgtatctgttattctcttccagaacttgccgctttagttgcgttcacattttttagggcttcaattgtgtcaaggagcatgtatctggcggttatctggaacttcaaacattattaacctgtcaaatttgttaatgagtgcaaagagataaaatgcagcgcttaaatgcatgttttgtcattaaatattcaaagcagtgtttgtgttcttaaagtgaaacagttttaaaaagcacttttatatacgcttgtttcagtcactagccacaaaaatgcattagtgccctccatggtattgtctcacattctctcatcaatattagctgttgtctttttagtttatttagtgatagattatttttggtgatttaaactagccttctgtgtctgcccgtgctgtttatcttcacagaagtggaaggtttcaagtttatatttctgcatttttgttatgattggatttaggaagttgctgtcaagaaatttttggaccaggacttctcaggtgctgctttagccgagttcagaagcgaagtaagccataagttcacttgcgtttatttactagtatacttagctacccatttatttttttggttgaacccaatggcttacgttgcagcttatttgcttgcctttgaattcccactctattaatatttccctatctgaaggtacggattatgcgaagattgcgtcatccaaatgttgtattcttccttggggctgttactcgtcctccaaatctttccatcgtcacagagtttctgcctaggtttgtcccatcttcttcttgtgaaagttaattgcatatgagatttttgagtcctaaaagattctaatgtttttttgctgttttattatagaggaagcttgtatcgaatccttcatcggcccaaatctcacattgacgagcggcgccggattaaaatggcccttgacgtggtagaaaaatagattcatatatcaacttccatgtcccccaggcttatttcttcagaatagtcactaaattccagactattgttactttcaggcaatggggatgaactgcttacacaccagtacaccgacaattgttcatcgtgatctcaaaacaccaaaccttttggttgataacaactggaatgttaaggtaggaagacttttttcttaagttgtccaacgaatatacttgtttactctaatggtaaataaatagattttgtttttatcttactaaccttgtaggtcggtgattttgggttgtctcgcttaaagcacaatacttttttatcctccaaatcaactgctggaacggtgagaacgcagaacccttaaatctctttactttttgatagaaatgcaactttcctactggcatgcttgttataatctggggtacggcttcttctctaatcacatgcattgttaattttaccagcctgaatggatggctccagaagttctacgcaatgagccctcaaatgaaaagtgagtagcttattagaagctcagttctgttcttggttctactagaaaatgttaaggcagatactactctttactttccctttccctttttttccaaggagattaaaaaaaatgttggctgtttttcgtcaggtgtgatgtgtacagtttcggggtaatactttgggaactagcaacattgagattaccatggagaggaatgaacccaatgcaagtagttggagcagttgggttccagaatcggcggcttgagatccccaaggaacttgatcctgtggtgggaaggatcatcctggaatgttggcaaacgtaagtgtcatgaaacaaactcaaaacacttttagaatctgcgctggttgaaaatatgtttggttttatgtttgggcagggatccgaatctgcggccgtcatttgctcagctgacggaagtgctgaagcctttgaaccggcttgtacttcctacaccacaatagatgtcatctgtgtgaatatgtgaaagaaaatttggttaatgtatactatttgacctctggtgctgcgcagagttattatacataagccagcctagaattgaggaatgtaaatgaaatcaatgtacactatactacgttttgatgtattatttgttataggaaaagccgctatgctgtgcttattttatcagaaataatgctaataagttaaacgtctgtcaccaatcatagttataatcaaatccaagctccatagagttacttgaatctccaaattaatcctttaacttaattattttgggacgaaattacatatactgcgaaaataataatagagtgtgttggagggagagagggtacgtgcgtgggtgtcgagaggagagtgagtgattaaggtccacgaattggcgcgaattccatgggaagaagaaacctaccgaagtccgaggatgattgtttcctctctcgcgcgaacaacaatgtcactctctctctttctctctgtttttctattctacaaattgctgtttcacctcttttctctctttctccttttccgatctcgatttttcccaatctcatgctttttctggtgactgcatcgttttacttttgttctgggtgacccttatgcctgaggatgtcttcaaattgtggattgattttgaatttttccgaaaaaaatctgtaaccgattgagtttcatccggtttgtctgaatctccggtggtcggtctgtttgtctcgaaaatctacagacttttgtatgtttcttgcgtacaaagtcacctcatcccactatatactgtggaaaaatgtcccaaggattggattcccttcacttgtatctcttgtaaagaaggaaagacagactaacattggataatggtacgtgaatgttttactttccttaacatctttgtgttacatagcataggttagttttcatgtttaattgttcaattcatgtgccacacttgtttgcaagttatatattttgcatatcctaattcctaaagcatatcaacactctctcatgcttttgcgaactgcagggaactccagtaaatattattgtaggttctcatgtttggtttgaagaccctgaagtggcttggattgatggtgaggttgaaaaaatcaatggacaagaagttgtcatccaagccactactggaaaaaaggtccagtcatcaatcaccgaaattctaacatttcaacttcacacctatagtgtatatatcccaacactgattttatatatctgacttgtataggtcactgcaaagttgtcaaagatttaccctaaggatgtggaagctcctgctggtggtgttgatgacatgacaaaactctcttacttgcatgaacctggtgttcttcagaacttgaagatcagatatgaacttaatgagatctatgtttgtatctcttacatcaattctgttgtaggaccttctactgttttctgtcttggctataatctattattgttcatgacagacatacacaggaaacatccttattgcgattaatccgtttcaacgattgcctcacatctatgatgcccatatgatgcaacaatacaaaggagcaccattgggagaactaagtcctcatgtttttgctgttgctgatgttgcatacaggtgagtttaatacttatatatatgtgatctacatgtatataatgatgatatgtgttgtgagcataagacggcttttatcttctttatacactcagggccatgattaatgagggaaaaagcaattcaattcttgtaagtggtgagagcggagctggaaaaactgaaaccactaagatgcttatgagatatcttgcatacttgggaggtcgtgctgttacagaaggacggactgttgaacaacaagttcttgaagtaatgacttttctatctcttttctgtgatcttcttatgtatggattctacacgagcttaatctactaacttgtttgtaatatctgtctccagtcaaatcccgtccttgaagcctttgggaacgcaaaaactgtgaggaataacaattcaaggtgaagcaaaatctggttataatagtgggcatctatatctatggttcggaattcagctaactgtgtactatgctttggctcagtcgcttcggtaaatttgttgaaatccaatttgataagcaaggaagaatatctggagctgctatacggacctatcttctagagaggtctcgtgtgtgtcaaatctctgatcccgaacgaaattaccattgcttctatcttctttgtgccgcaccgcaggaggtacgtactgttaaattatggaatatatcttgttcccgaaaaactagccatataacatagttgaactagcaggaaattgaaaagtacaagctcggtcatccaaagacttttcattatctgaaccagtccaagtgcttcgagcttgttggtataagcgatgctcatgattatcttgcgacaagaagagctatggatattgttggaattagcgaaaaggaacaggtcagtttctgtaagcaactacacttagtatgttgcaaattcaatttagttcatgcacttctatattgatgatgaacttaattctgcctttatatcaacaggaagcaattttcagggtggttgcagcaattcttcacattggaaacatcgattttactaagggaaaggaagtggattcatcagttcccaaggatgagaagtcgaaatttcatcttaaaacagcagcagaacttctcatgtaaaacacatttgtctctaagaagacctctaaatgtttcatcagttgaaagctaattagaaatctcgtttcaggtgtgatttaaaggcacttgaagatgcattatgtaaacgagttatgatcacacccgaggaagttatcaagagaagtcttgatccacagagtgctgtaaccagcagagacggtctcgctaagacagtctattctcgattgttcgattggtaagtggtttgtttaggggaaaagatcacagtaagtgatatttacatatttgatgctaagtgaatatctctagtaatgtgcaggttggtagacaagattaataagtcgattggacaagatgccaattctagatctctaattggagttctggacatttacggatttgagagcttcaaaactaacaggtaaatgaacctttaccttggttaagactaacagacttgcagtctgccattctctgctaatacccttttgctgcagttttgaacagttctgtattaatttcactaatgagaagttgcagcaacattttaatcaggtatgttcgtgagtgtagttgaaaaaggtttattaattccatatctgattctcaaatcggctttttttcagcacgttttcaagatggaacaggaagagtacacaaaagaagcaatagattggagttacattgaatttgtggacaatcaagatgttctcgatctcatagaaaaggtcatttctgaaccgagaaaggacaatgttaacaaaataactccacataccggttggattttgttatctcactttatttccccttttattttccatctgcagaagcctggtggaattgttgctctcctcgatgaagcttggtaaagttaaagatcaaactagttccatatgaagcatgaggtgattatgttcttgatttgaactaacgaggtgtaatttttcagcatgtttccaaagtcaacccacgaaacatttgcaaataagctgtatcagacttttaagacacacaagcggttcatcaaaccaaaactctctcgaacagatttcgctgttgcccattatgctggagaagtaggttctctctcctttgaagaaaaatggaccttgtaaaacacagaagtttctcatgtcttctaaatctccaggttctatatcagtctgaactatttctggataaaaacaaggattatgtgatccctgaacaccaagatttgttgggggcttccaaatgtccctttgttgtgggtcttttccctccactcccagaagaaacatctaaatcgtcaaagttttcatccattggttctcgctttaaggtagggaagcttgttcatatgttcagcaccaattgtgtaaaggaagaatgtctaactactcgggaagactaaaattttcttttttgattaaaaaactaatattttcttaattacgagtaactgtaactagtaactattggcctggttgatgcagctgcaactccagcaactgatggaaacattaaattgcaccgagcctcattacatcagatgtgtgaagcctaacaatcttctaaagcctgccatatttgagaatgtgaacatcatgcagcaactgcgatgtggtgtaagtttacaaataatttcaactattgggttgttctagacataatgggttctaaaaaaaaatatgttaccaatttcctgcgattaatggctggaacgtatgtactaacgttaaacccttatgttatctttctagggtgttttagaggcgatcagaattagttgtgcagggtatccaactcgtaaacctttctttgagttcataaaccgttttggacttctatctcctgctgctttagaagggaagtaagtaaaagatcattctccctagctgattttatactgttttgtgagagtctaaatcagtagttacagattttctgacttctcctgaacagcttcgatgagaaagtcgcatgtcaaaagatcttggataacatgggactcaaaggataccaggtaacggtttctcaagtgtcaagcgaaccatttgtgtagtattagtgctgcaatgggatatggttcaatcatagcagagttgtgattaacccaaatgcaaaccatattttggtaatgcagattggtaaaacaaaggtcttcttgagggctggtcagatggctgaactcgacgctagaagggctgaggttctaagtagtgctgcaaaaaaaattcagcgacgtatacgtactcatcaagctcagaaacggttcattgttctgagaaaagccaccatttctcttcaagctatatgtagaggtgagccatcatctaacttgctctaccgttttcatggaagttagaagggctttcacttttatcaatgattggctgaatattacaaacatttatgtaaactttcatatattgtaggaagactttcctgcaaacattacgataatttgagacgagaagctgctgctgtgaagattcagaagaatggtcggagacattattctagaaaatcatataaaaaactccatgtagcttctcttgttgtacagactggtttaagagcaatggctgctcgtaaacaattcagattcaggaagcaaacaaaggctgccacaattgttcaggtttaggttcttgcgagaattgaatgctagaactatcttaggtttctcatgatcattaacacataatttttcctgttactaatggcaggctcagtggcgttgtcacagagcaatctcgtactacaaaaagcttaaaaatggagtggtcctatctcagacacgatggagaggcagacttgctaagagagaacttaggaagctcaaaatggtacaactagtttcttattcacatatatattcatcacatagtcaaaagcctactatcataatacatgatatttttcgtggaaactatcatgccatgtatacattgagatggaaactatgcgtcggcaagattaattatataattttttgataaatactttcaaaatcaggatgctaatttaagggactttgaagctgaaactgataaattatcttgtcttcttccttttgtagtaactaagtgactgcttcaaagattagttatcttaacatactcaacatttgtattatcttcaggctgcaagggaaacaggagcacttaaagaggcaaaggatatgcttgaaaagaaagtcgaggaactcacataccgtgtccagttggagaaacgttcgagggtatttgccctagaaacatcattttaatagacatgtttggagtagatatataatgtctagcgctgaactaattttatagggtgacttagaagaagcaaagactcaggagattttgaaacttaagagttcattcgaagaaatgcggaagaaagttgatgaaacaaatgcgttgcttctgaaggaacgtgaagctgcaaagaaagccgctgaagaagctcctcctgttatcaaagaaacacaaattttagttgaagataccaagaagattgaattgatgacggaggaactggagagtgtaaaggtacttgctgtcagtggctatcaacctgcaaatcagttccatctaaatttgagatttacattcattgttacatattagtctactaggcatcagtaatcatttgtgttttaacaggttactctagagaacgaaaaacaaagggctgatgatgcagtgaggaaattcgaagaagctcaagagtctctcgaagacaaaaagaaaaaactggaagagacagagaagaaaggtcagcaactccaagaatcactgacaaggtaagaatatatcataaacattttgatattattaatctttctattcatctgattttgctggtaatttattttcctctgagctgaactagaagttaatgtgatcaggatggaagaaaagtgcagcaacttggaatcagagaataaagtcctacggcagcaggctgtgtccatggcaccgaataaatttctctctggccgctcccggtccattttacaggtaaactagaactgtaatctcaaatatattagcccacagctatctttttgttgcttttgtcagaagttgataaattactctgtttaatatttacagagaggttcagagagtggtcatcttgcagtggatgcgaggtcaaacttggtaaatatgttttaccaatttaattttgatcgtctgtcagtctcaaatttaggttttgatatgatgaagcaatggctttaaatttgaatcaggatctgcatagccattcgattaaccatagagatccctcagaagtggaggataaaccacagaaatcattaaatgagaagcagcaagaaaatcaagacctacttatccgctccattgttcaacacttgggattccaggggaaccgacctatcacagcatgtatcatttacaaatgtttactgcaatggaggtcatttgaagttgaacgaaccagtgtctttgatcgcattattcagacaataggccatgctattgaggttggcttcagcttcctagtttttataggtatctaattgtgattgcaagtgtattggattaataatgttgcgaaagttgatctctcagactcaagataacaacaatacattggcctattggttatccaatacctcgacactcctattactcctccagcgcacactcaaagctagtggtgcagctgggatggctccgcagcgccgccgttcatcttctgccactctatttggaaggatgagtcaggtatatagagttatatatatggtttgagatccatcaacacaatgaagcaaaagcttattctttcgttataactttaattttgataaatgttatcatcaattagagcttccgcggggcacccccaggtgtaaatcttgccatgataaacggtgctgcgggaggtggagcagatacctttagacaagttgaagcaaaatatccggctctactgtttaagcagcagctcacagcttatgttgaaaagatatacggaatgattcgcgataacttgaagaaggagatttctccactccttggattgtgcattcaggtatgccattaattacagccatcacgttcccaagaaaaaagaggttgttcttgcttattgaatatatctggctgcaacttcaaataggcaccaagaacatcgagggctagtttagtgaaaggagcatctcgttccgttggcaacactgcagctcagcaggcactgatcgcccattggcaaggaattgtcaagagtcttacaaatttcctcaatactctaaaatcaaacaatgtgagttcctttgcgattccatttcctctaaatattaacaagttccggattgcccggagtttgaatcttctatttatgcttttaggttccttcatttttggtgcgtaaggtgtttacgcagatattctcattcatcaatgttcagctgtttaacaggtttttacgggaatctttagcatctaaaaccccgttatctctagtctcaaacattgctagctatgttctactaatcaaatgcttcctttgttgtccacaacagccttttattgagacgcgagtgttgttcatttagtaatggggagtacgtcaaagcgggcttgtctgaattggaacactggtgttttaaggccacaaatgaggtatctctcttagcagtctgctatcattattcaacaacactaactgattaactaacaacaacaatttcagtatgcgggttcttcgtgggatgagcttaagcatattagacaggccattgggtttctggtaaccttgccttatcttctacctaaaccttcaggattgtcccataagggtaaaaaaataattcttgctccaaatacaggttgtacatcaaaaaccaaagaaaactcttgatgagatcagtcatgatctttgcccggtaagttgttgtatcccctgctcagtctatcacaactttcttttattccttatgaaacacttgccaatgttcttataaaagaagaaaagaaaagaaaaatcagggctttgtaagtgtccatttactgataaattgaaactgtggacaggtactaagcatacaacagttatacagaatcagtaccatgtactgggacgacaaatacggcacccatagcgtctctccagacgtaagtgatcaccttaagctactgatgatctgtgtaattatatccttaattagctcatagatatacctctctctctctctctgactatgtataataggtaatagcaaatatgagggtgctaatgacagaagattcgaacaatgctgttagcaactcattccttttggatgacgactcgaggttgttacaagaccaacaagtttcgttatgggcactttgatgacgtcttctaacaggttttgatgattttgcagcatccctttctcggttgatgatttatcaaagtcgatggagaaatttgaaatagcggatatcgaaccgccacctttaatccgggagaattctggatttagcttcttattgccagtctctgagtgattcttttttgtctctacaatacacacacaccaacggaagccatatattctttttgaagtgttcctcacttattcttttaaatgttcatgacttattctttcgggttaatttactgaatgaccaaatttgacatccttattaagagaatgaccttctcccagaaaagttgggtatataacgtttttttaccatgcgaaatatccgatatagcctctacggatgggcggcaaaaccatattcccgacagcagacttgtagatgtaggggagctagagattgtagggcaatgattacaacgtatcaaaaaaaaaaagcatgcattacttatgcagttactactaaataaagcatgaactatttatgagtgtagatctcaatttagagctttcattactacaactttctaagtttgtactgaacgtttcataaaatacatgcaatttacaactgcagcagcatgtactatgaaaggatttatttcattttttttttaaaaaaataatcattaaaaaacaaaaaaattagtattgaaatggagtatataccacgatattgggctggtaactttttcgggtgagtattgtactggattgattattcaacaaggtgaatgggcttttaccttgaatctatgaccagcagaagtactacgatttggtaaacagcacaagtactacggaaacaacatgtgatgttttaaaatcacaataatcatatcggagcaacttggaaagaaaacataagagaaaattattagaaaaattcccggatgtgacaataaaaagcgcgagcaaagagagatggagatacgtatcagacgcatttaatgcggcgtcagaggatatacagcttccaacgtaatatattgttgtatgtgtaaacccttttctttagtgtagcactttttaacacaaggtttgtgtgcttatgctatacgctacaaaatggcaggtcgataagttgacacgttggtcaatgacgtcaagattacgaataggcaagtgggggcagaagatatactgaatctatacctcggttcacggaaatgtgtaaagcaaagactaagtaaatcacatggttattttgacgataacatgcaatacaaataaagaacacttaacacttcgatttgacattggttaattgtgtaaagcaaggtttgtgtgcttatgctatacgctacagaatggcaggtcgttaagttgacacgttggtcaatgacgtcaagattacgaataggcaagtgggggcagaagatatactacctcggttcacgaaaatgtgtaaagcaaagactaagtaaatcacctggttattttgacgataacatgcaatacaaataaagaacacttaacacttcgatttgacattggttaattgtgtaaagcaaggtttgtgtgcttatgctatacgctacagaatggcaggtcgttaagttgacacgttggtcaatgacgtcaagattacgaataggcaagtgggggcagaagatatactacctcggttcacgaaaatgtgtaaagcaaagactaagtaaatcacctggttattttgacgataacatgcaatacaaataaagaacgcttaccacttcgatttgacattcgtgaattgtcgcttcacgcctccctcgggtgttgggagggaaatcataccgttttgaaattcgcgtggctgcaaatggttaagcaactgttactagaaatatctttagttactgtagccctaaaaaacaaagttaaccttttctataaaagaagaaagatggcaagatatcatctctcacacctctacttcttcctataaagcacacactacgtatccaacaacatcgaagaactcgatcatttctgttttggtatgcaattaatgaatgttcttttggtcgggtttgttgctatttttaaaaaactcatggttgatttatctctatttaatgcaactctattaatgtgtaggtaccgatggtggttataaccgaaataaccgacgatcgttatgtcaggacggtgagtggctcctgggcaatcggagctgatggaacatggttattcatatccaatcacaataatgcagtgaggaggttgagcattggggaaggggagaagttagcatctgtgcgccagcttgttagagaagcgtacggacaggaatacgttgaaggcccactacacctgacttaccaatggcctgattggatggacatggaaactacctttggtgggcgcacgaagccagtaagcataacttcagaggagacaatgggagtgtttctagctatgcgttttgagttggaggacttgagtttgtttgtctccaagcaaacggtggatgatggttccgaagatggtggaacaagtcagacttcaagttacggatttgcagataaaggcaaatcacctttatacgtcaacgctgaacgatcacctaactacgagtccgttgtgtggaaaaggcttatggatgacgaggcggtcctccgctggatgcgttcaacggaaacagaaggtcaaaacgttggagactcttctaccaacgtacaacaacaccctgtgagaccagctgttgaggcagcttccccgatgttaacgactgaaagtatggacacagcgactgaagatggagatcaggtaaaatattctgcgtttattaaattcagccactcgaatataccattacagtactaagacatctatttacgcaggaagaagactcaactgttgttgaggcagatttacttaaaaatctggggttaccgtcaattaatttagccactgaatcttacgactctctcagtgaaggggaagcgtacaacgacgaaaacgactatcccgggggcgagacaattaaggagtgcaatttttttgggccttccgcaactaacttggtggaacctctaggtgtacacttggatctcgcggtacctctgcatgaggctcttgaagacatgtgccttaacttcgcatctttcaacagggatgcagcgccaaccctagacgaacaaggggaagaaggtaccaattacatagcatgttgtttttaagaacaacacatattgcaagagtgttctaataataaccgtcatatagagtaacatgttattcgtataaataccatgcaataaaaatttaatttcgctgaattcctgattagtcgtacgaatacaatcttaatatccacatcatatttgtttagtttaaataacaaattgtatttaatatcatgtaatataatgatatgcttacaaaccaacacatggtttcaatttacgttgatatccctgagatatccctaatcaaaatatagagtaacatgctttaatattgaacatcatgggatatagatattatgttggtcaaagtgttactatttagtcatacaaatacatgctttctacattcacaacatgtgtacagtgtaaataacacacgaactttattgttgtgtaggccgcgtcggaatggaattagcaattcgggatgtggtctacgaaggtgatgaactgtttgttggccgggtattcaaaaataaacaggattgcaatgtcaaattagcagttcacgcacttaatagacggttccatttccgtcgtgatcgttcctgcaagaaactaatgactttaacctgcatttctgaaacatgcccttggcgtgtatacatcgtcaagctggaggattctgacaattaccaaattcgaagtgctaatctcgagcacacttgcactgtagaagaaaggagtaattaccacagagcagcaacaacgcgggtcataggcagcataattcagtctaaatatgcgggcaacagtcgggggccaagggctattgaccttcaacgcatcctattgaccgattactcagttagaatttcctattggaaggcatggaaatcaagagaaattgcgatggatagtgcacaaggatcagctgcgaatagtttcactctgttgccagcctacctacatgtgctgcgcgaggctaatccaggttcaattgttgatctaaagacagaggttgatggaaagggtaatcaccggtttaagtacatgttcttagcattcgccgcatcgattcaaggtttctcttgcatgaaacgagtcattgttattgacggtgcccacctgaaaggcaaatacggtggatgcctcctaaccgccagcggccaagacgctaatttccaggtttttcccatagcgtttggcgtggtcgatagcgaaaacgatgacgcatgggaatggtttttccgtgttttgagcaccgctataccggatggagataacctgaccttcgtctcagacagacattcctccatttataccggtcttcgaagggtaatccttaaaattgataattttaaatgttacatgttatatacagcatatggctcttatttattttagaacacatgctatctaccaatatgccctgctatatacgtataacacatgttaacatgcaggtctacccaaaggctaagcacggggcatgtattgttcatctgcaacgaaacatagcgacctcatataagaagaaacacttgctgttccacgtgtcaagagctgcgagggctttccggatctgtgaatttcatacatatttcaatgaggtgataagactagatccggcttgcgcacgatacttggaatctgttggtttttgccattggacacgcgcttatttccttggggaaagatacaacgtcatgactagcaatgtggcggagtctttgaacgcagtcttgaaagaagcccgtgaactaccaatcatttccttgttagagttcattcggaccacattaatttcctggtttgctatgaggcgtgaggcagctagaaccgaagcatcgcctctaccaccaaagatgagagaagttgttcatcgtaactttgaaaaatcagtccgatttgcggttcatcgccttgacaggtacgattacgagataagggaggaaggcgcaagtgtctaccacgtgaagcttatggaacgcacatgctcctgtagagcatttgatttgcttcacttgccttgcccccacgcaatagcggctgcagtggctgaaggcgttccaatacaaggactgatggcgccggaatattctgttgaaagctggagaatgtcttacctaggtaccataaaacctgtacccgaggttggtgacgttttcgctttacctgaaccaatagcctctctccgcctcttcccgccagccacgcgccgtccatcgggacggccgaaaaagaaaagaattacttcaaggggggaattcacggtaaacgttatacatttggaatttactgtaacacccttagtgttttaaattcctaacaattgctcaatcttcatctcagtgtccccagcgacaagtaacacgttgttctcgttgcacaggcgccggccataatcgcgccacgtgcaaaatgcccatataaaggtacaatgttattttataccgtatcatgctatagatagaaacaacgttcatacaatttttataatatcatctgcagggggtgttgtgtctcgcgtcttcttcatgagttatatgttgtgttatataagcaaggggaagtccatcacatatggatattatgtaaaaggaagggtcacttggtataatgtacatattagcaattagatgtggcaattagggtggcaactaaaagctacgttgagaatgcaatcaagggaccccaattccagtaagtgccgtatagaagaccaccttctacggacaaaggataatgttctgttttttggcttttgtgtagaaaaaaactttatgttcccccttttgtaaacagactcatgatattaagtaaagacgcgagtgtttaattattaatacgtggtgtaatgtaaaattcagatccacagacaaggggttaaatgaggaaatatatgaaacaaatataacgaatagatatagcaccattactggcaaattaaagtccataaaaatgttcagccatcatgaactgacattttatgtcaaggattccaacaagatgaaatcattccaaccataaatcaaaataagatgctattcgagaaaaccacatgtgatgtttagcaattgcgtgaggtaaaaccgggcaccgagagttgaacagttccacataggattccttatgccacttcgactattttctcagaacccaataagtgcttctgcaccacacatttcaccccccaactacgccacataaatgagtgaatatatacactaacaatattggactatatatacatattggctatcaacatctccgtcaataataaaacgtccttcggcctacttacacatgcttgcaagggtagaaatgagacagtatcgtcagaatccagtactcatgcgggtgggtgggctgttcagaaaacaatttgacgacgcattggaggcaaataacccggaagcacattatcttgaagggctaaggtatgcttgttgggagaaagatttagtcatggcaaaaaaacacatttttaaagctgtaaacaaggtagatgaggcgctgtttgttatggctatgttgtctatttgtggtggtgagaaggagctaggtgaatttttcactgaacaactgtttgccctaccttgggccgaagtattagctatgggtgattctttattttcagctcttgaacgaatggctgtgcgccatggtacagcttacaagcttacatggaatggggcccatcctccatgtgtatcaatccacaacatatataatagatgcgaagagtgctacattttcttttgttcaaaagaattctgtcggcgatgttagatggtacaagctgcacccaacgtggaaatctcgtaaccagaagggaagcatcctttaaaataatatgctgttattttatattaacccgcgtagcatctataaatcacattctgtttgtaaaaagtacatgttttatgtctaatgtgttagtcgttatgataatggtgtcaaataacgatattacattaaaatggcgtgatatgtacctatattacatgttttatattgactttttgatcatgttaatctgtctaaggtgtataatccaaaatatttttaaacgggtcattattattgcaaagtttacaaccgggtaagtcctaaatatcaactaagccacagttagaatgcatctatatttaaacgaatcatgaggtaaatataaaacgcacggtacatattagaattgcagtgacatatgtttactacacaaaacaggtgcatagaaagaacattaggtactcaactgttaggtgtctaatatattacagagtcaggtaatagaaggtaaacacactagaacatttgggtcagacaatcccattagctaattcaaaaccggcaatgaaatatttgttagcagcagtcaccacatcagcatgcttcacttctttgcaagcctgaatcccaccattggcatgggcttcaattaaacgagctgccatgactccagaatattttacagaatctgcctgtggaatatcattttctctgtgaaccgcaagagatttcaaacgaagtttcttttccccagccattttaatagcaaatcgaaatagatatggtaacatttcagcaaggggcaaaagcactttcttcaattttgtttcacgccataatcctgtatagcagtcgaggacgctaatgatccttgcactcatatcaacacaaagccctacccaatgctgtaaatcaatgagaaatggaatgtagaccacagcagaacctgtaggggtacattcaagtaggtcgtgatcaaacccatacattcccttatcagcagacttgacgaattttgggtaatgcttggataattcaaccacaaatgttgaatcaatgaatgaaacggcttggtgcttttcaatgatattatttgcacaccagttaatccttatgctattaatgaagatgtccataacctgtaaatagagtagaacgcatattaggtgtttaaggcaaaccctatgtttatagagcactatgtaatcttttttacccacatgatatttatcataccattttgggtacaacggtcttgaactcaacaatctcacgcaactcaatggcggaaagtgttcgacaagccccaaaatcaatgtccctaataacagccatatgcataagttttaagtaatatgagtcaaacaaaataaaatagcataaggttggaattaatacccagacatgccatataagcgatttatcttgttcttacggctaacatcatgcccaaaagtaacagacctaccgcttgtggaagaggctattacggattcatgttggagctgtgagcaacgtaaacgtgattagaaaatcagatgttatcttaataatcaggaaattagagtttgcataatcctaaacattctgtgttaaacttaatggcatgtaatttgttctaaaaccttgatgtttgtacgggcaaaacacttacaatatgacaaaactttttaaatatttttttgttatattaggtaaaaccctgaaccatgctgaaaatacatgatgtatcgcaaaatataaccgtgtgcatattaaaccagtgttttgtttttaaaaaccatgaataagtaaacttgacctaccacaaaactacgaaatccatatttaacaatatcttaaccattcatgcacccaaactagacctaacacaaaactatgaaatccatatttaacactagctaaacgcatttatgcaaccttgccatcagggtccacaatatcatttgttggggctggcagggacggttcagatatcatcggcatttggcttaaattggcctaaaataagaaacagttgcatgtaattagtttgttagtggtaacgagagtaaaaaataatgaattatatgatctaacattatcggctgtagcaggtgggtcagcaagtccttctccatctttatctgaagcaccgtcatcaaccattggcccgggggttgacttacattgggcagtcaaatcagactctatctgcaaggcaaacaacagacgttagagccaatacacggaaaaaaaaaaacataaaaactatatgagaaggtttgaactcactatgcatgggatggtgtactgcaactctggctgacctacattgtatgcaacaccatccatgtcaacaagcaccacatatggatcagggaggctgggctcagattcaaagaactcattgacgtctgtgggaggaggaagcaaacactgagtatgactcgctgcagctggaataggtttatcagggctagtttggatatcatcaaggccctctccacctatcccatcaccgggggcatcaaccaagatattatcttgatgggatacagttttatcaccagaaacagacttttccgcaaacatatcgtctaattctttagccggcagagtggaagagccaatgtcatgaatcccatctctagctgactcatcctcagtggtatcagtcaccacccctccaactttgttgatattgacagcttcaggggatacatgtttatcagcagaaacagacttttcagctgaactgttgtctactgctggcgtcaggatggtggctgctgttgggccattgttgcctctcttccgtttctgtttgttatgaaaacaatacttgaattaggaagaactctcataaaatacagaatatttacaaaactgttaaacgtataccagagaactacgcaatccaggcctagtcggtggggataagcgacctatgggggttgtagtctgtgtaggttctgcgtcgttaatatcatgcatcacttcacctaagacttgatcaataaatccagaaccactgttctccttcgactgggctaccctgccattatccaaaacaacaagggaggatcccttcttcccacctaatccctcacccacatctcttgacttaggaccactgtgacgcttattcttcctgccatggctttccctcaacaagctgctcaatctagcctctgaatcagctatagccttcaacatacgcgactccatacgcttgtctttcatgtcaatgtaatttttaatcgaatctggtatgtgaacctgccctttagttttacggggtttagaagagccaggcaaggaagcatcaggttgtatggtatcctcatcaacacaatcataagtgctacatacatcactgttgtcattcctttcatcgggtagcgaatcagggacaacaccacctgaaaacatggaccccttgaatatgtgctcctcttttattagttgcaacatgtagtcaacagatagatcttcttcgtcctcgacccaacctgacttgaaagcgtcaccagtcggtgttccactccaaatagaaacgactttaatctgaaaaacaaagagttagactttagccacatgatattatgttttattacatgtactaaaagtatttatactgttactaacagtgaaatatagattatgtacccatgtgctccttaaaaacaacatgttatttcatcatataaccagatgttgtaatgcataccgccatacgtgacttactaaggtaacagggtatggttattaaaaagaactgtgatcatatttaaaaccatgcagtttttgcataaatcatgatataaataataaatagtaaatcagcacatattaaaaaaaaacttaaccacatgctacacatttacagccatgttatgattattctaaagaaactgtgatcagatttaaaaccatacaatttatacagaaatcatgatataaataacaaatagtaaatcaacacatattaaaaacctaagccacatgctacacgtttacacagaatgatatgaatctataattgtatgtttttgataggaaaagaagaggttttcatgataaaaacgagcatatgaaaattaatttacgagagcagagatgcattgctcacctgagactgccggtcgactttccaaacaagatccaacttcaaactccataagcgctcaatttccgtatctgtttcctccatttctgagtcactatcttcaacggcttcagggaattgcaattctctgattcgaggaacactttgcagtagcaaaagttggagtgcgtgtgggaaaccttgaacggtgatagatttccgcataagtttatcagctccccttgcagtaacactcttcaacgtcattaggaatgacatagtcccccaaggaaaatttagaaacatgtctaaattttctgccatgtccgcatggaccggagagattttacttctacccgaggttgggcataaaacgccatcaatcaaggccagcacagcgtaacgtaaacgaattccttgatcttgaaccactcgcttcttcagcctgccaacaacccactcaacagatacatcactgcggtcaaataggctgtaccaatacttgccaggcgccaattttcgtttccctttcctctctttcatacgaggcggtttgtcgcagttcaaaccggtaacattttgaaactcagaaatggaaaaccgaacaggggatccagagaaaattacccaaatttcttgtttcttcctaacaacaagctgcctcgttagcaaaaagtgaataagcttcccagaatacgcggcgctttcggagaaatcaaataatttcccaaactgagatttccggagaattttcatgtcctccgcatctaacgcgttagcgatgtcatctatcaaagacagttcactgtaggactgcactctctcaccgttgggctcggatccagacctaaacaatcgacggggtaaagagttgttcatcatctacaagtcgaacccttttctgcacaaaatagaagtttataaatcagaaacagtatgtacctaagatttcagttaatcggaatatagattggagaaataaagaagttgatggcgatcgagaacgttgaatagcttaaaccgcatatatttgtgaaattacctgtagcccgatggaattgattgcctaactgcgagattgaatctaaagaaacgatatgtatgagaaacaatatagatttgaaatagatattcggagagtttgcagaatctatgggtagagaacggaagacgtttcctctcggaaaaccagcaaatgaagcggcgctaggtttttttttggagctcctgatatttcaaaaaattcgataataaatcgatttctcgaaattaaaatctatatcgtttgcgtccacatacagcattgctcttaccaaggttttcaaaattcaaatttctgcaatcatacgcctatacacctatatgtcccctaaccaagaacacagttatagggggttgcgggtaatttcagatacgtctccgacagacactatagactcatagttagtttctatattattattgatttcatggtcatctagtgcatataccctattctttcttccattgagaaatgcgattatattttaagatgcttttgcattcgttacgttagtttttatagtccaatgtagattaagttaagatttttctttacagattctctgattttgtctcgaaatttacatagttagtggaatttcatttctctcttcttcttttttgggataattaattggaattttttacgaaatcaaactgttgaaaaaaaaatcaaagagaaattctatattgaatttaagaaagtaaaaaaccatttaataaaattttaacgataatttaatgtaatcaatttatccaataattcacaacaaaatagacaaagtaatcatataaaaggatttatttactccgtcgtttgctcccgtcttcaccgtttccttccacgcctccgccggcaagctagttttctgactggagttccatcgtggacgccgtaatccctctttttcgtactggtaaattcttttcaatagattatctttgtgatttatatatcaagtctacaatctaaatcggagacgagattcggaaacctcactatcgattccaaacttcaattcagattatcttcctaaaaatgaagattcttacactcgtaatgcttttatgctactcgttcgtctcttctaccggagatacgactatccacacaaacaattgggctgttttggtctgcacttctcgcttctggtaaatatactcacactcgattgcttgtaacagagtttttgctcgatcttaattcggttaatgtgtagctttcgtgcccattggtagctgatcaatgtagttcttctgataagtgagtcacaaatggtgataggctttgaagttgtattcttctcaccatgatctctaggacctttgaatctggagttatgacgtaacctgtgctatagatctatatcataatttcgtgccttcttgatttgtgttgtcgattggctgagaaaacctgaatttgtttctctagtcaactgttgtttcatcttttgttacttggttacttaggaccttgtgtgggagagttatgcttgattgagaaacttgttccaggtgccaaaagtctatctagcttcatcaagttacatactaacctattgctgcggctaccattatttcaggtttaactaccggcacatggccaatactctgtccctctataggtgaaagctcgtttttttccttatgtatatgttcgattaaccattcattgaggtagttctcttcactctttggttcttacgttcatattctctttacttggtgtttctaggacagtcaagagacttggaataccagatgagaggatcattcttatgctggctgatgatatggcctgtaatgctagaaatgaatatcctgctcaagttttcaacaatgaaaaccacaaacttaacctctatggagataacgttgaggtaaatttctggttaaaggatacttctccaagggtttagtacaatgagttgtttatgtactattgaaggttctgtcttgagtagactaggtgtattagaagcatctgcatcttagcacagaatcattatctatgttgggcggcttcttttctctgtgttttccatacaattaaaattttttgacagtgattgctcccagcccatataaaaagatatcttttccagtagaaaggctgattgtatgaaatcattttctttcaggtagattatcgtggatatgaggtaacagttgaaaatttcttacgggttttgactgggcgtcatgagaatgctgttccaaggtcaaagcgtctcctcagtgatgagggtagccatatactactgtacatgactgggcatggaggtgatgaatttttgaagtttcaagatgcagaagaactccagagtcacgatttagcagatgctgtaaaacaaatgaaagagaagcgtaggtttgtttcacatttatggtgtttctcgagtcatattgactccatttcctccattagttcagtgctttttatctgtcttttgaaatctggcttgtcctgcatatagcttttccacagggcatttcttggtggaacgaaaattattcattcaatgtctcatcttaattcaattttgactatctaatgacattatttcgcttgcctagattcaaggagctgatgataatggttgatacttgccaagctgccactctctttaatcaggtacatcttcgcacactttttcagggttgttttgtctttatatttaagtaagccataattttagttttgctctgccttttggagctagtatgttaatttgacgttgttagttttgtgaaataatttttttggtagcttcaatctcctggtgttttggctattggtagcagtctaaaaggagagaactcatattcccatcacctggattcagatgtaagttcccttcaccatttcatgaatggaaagtaccattacgatattaaggggaaaattattcaatgaagttgtcattgtttggggattgtttcttctttttatcattgtattgatctccaaatctaatgttgtttttgcttcagattggtgtatctgttgtagatcggtttacatattacactcttgcattctttgagaggctcaatatatatgacaatgcatcacttaacaggtacaataactatgcaactctcgtcaccaacattctgcaaaccttttatatgatattcgttttcactttgattatatatgacggcattgtgattgtcaaattgactaaggagacgattaaatagttggctgtttgaactaatacgcctttttagcctgaactatctgagctagaaacatttgttcacctccccttgctgctgtgcagtttatttaggtcctacgatccgagactgctaatgtctactgcctactaccggactgatctttaccaaccacatctggtggaggtatggactaaattgatgcaatgtgacgtttaattgattgtcagcttaaattactattctgttgcaaccaatcaagactaagtaacctaggttctagttgcttgttatgtgcactgaacagtctaggattatccataagttcactgtaacatgatcagggaaatgatattgatttaaataaaaaacttgcaccttccgcatatttttccttgatgattaattactcattctccaagtttactcgttctgggaactaggtaccggtcacaaatttcttcggttcagttatggagaccattcatactgattcagcttacaaagctttctcaagtaaaatctccgaaagaaagatcaattctgagatgccattcaatcaactttccgaacacgatcttaaagaagagcttgagaatacaaacataccaaacgatgagttgatagctgaggttactgtctatactctcttccctggtttatcatactttggattgagtacattacttagatatatgaatttaagcagggttagggttttgagcatgatagatgatgtatttgctttctggcttgtgttcgtactcttactggattcgactaacagaattgagattccatgttatgttgttgttgcagaagcaaaaatgcccatattcacaaatgcgggcagacctccacgagaaagtggagaagcttgaaaatgtcgatacagtggttaacctcagcatagcagtgatggtactcgctgtaatggtctcatcatctttactacgatgaagaactgatataatcatctgcacttcacttaatctatgtagtctgattcactgttgcagcttcacacccattttgtaattttttgcacaatgctataaaaaaaaatcaccaaaatcaagaaaatatcaactctcatgctcgaacctcagaaattgtagccagttatgctgcagtccacagattaattggctacttttcaagcctagatctaaggttcatgttcattcggcaatagttaaatctgcataaaacaagggaaacacaagatttaaggttcagaaattatgctcaccgtagctctcagatcgggtttggtgagctgcttggtatggcctagtaataatgtaatatcataaatgttaacaaataaaacaatattctttacttaatctgattaggatactgcaactttatccttgggtacttgaaaaagcaatagtttgttactatgctaattattgttaattttgtttcttactcaaaataactatcttctactattaatgtttttaattttaaaaattgttcaactttatattattaaagtataataaataaaaccacaagaaaatttacaaaatgtaataaaaaaccaagtaaatggaaggatgcattggtgtagccacataagtaggggcggaaggcaacaaagaaggagccatctttatcgcaactcctgaaactgagtctgaccctctacttacttcttttattgctgctctctctcattcttaattccaatctaataagtacgggctctgctagtacagatagagagagagagagagtgtagaccaagacacacaacacaacacaacagagaaagagaattacattagttttttttctttcacattcctcttgcttattgctcttcaaaatctacctgtacactcttctcttttattgtcttgtttgtataaatcatctcctacaaaaataattaatataagttgtcccctttctctttgcttctctgtttttcgcaattttctctttttgattctcttccttccttggaatccaccacactccatttgcttcttctgagatctgatctctctcctaggtgatgcgctgcggagatggcgaatcttgtccccggcgttttactcaagcttctccagcacatgaacaccgacgtcaaaatcgccggcgaacacaggtcctctcttttacaagtcatcagtattgttcccgctttagccggaggtgagctattcccgaatcaaggcttttatctcaaagtctctgattcctctcacgccacttatgtctctttacctgatgaacacgatgatttgattcttagcgacaagatccaattaggtcagtatattcatgttgatagagtcgaatcttcttcccctgttcctattcttcgtggtgttagacctgttcctggtagacatccttgtgttggtgatcctgaagatattgtagctactcattcactagggtttctcagtgatgacaaggttaaaaatgataataatggtggtgttagttcgaaacctaaagagagagttaaggcgtctgttaaagctaatgggagtggaagtgatggtgagagaattataggtaatagactgagtgttagtatctctagggatgattcttctgatggtaaaaagccggtgtctgctctatttcgagctaaatctgcgaagtcgagtttgagtttggatgtaaagaaggaatctttggggaagctcaagacttcttcgggttctaagtctattccttcttcccctacgagttgttactcactgcctaattcttttgcaaagtttgctaatgggattaagcagcaacagactgtgaagccaaagttattggagaagggttctcctagaatggggttgtcagagaagggccggtctcttcttaaagcggagagtccgaaagttgggaaaaagcttcccatgattaagaattttgtgcaggggattgagtttggagctaaggcgttgaggaaaagctgggaagggaatttagatatcaggggttcagatagaacaaaatccagccttcccagacgtgatttaacccctgattcccggagtttagcagtaagctttttcaattgtatctttcttggctttatatttgcaaaagaaacatgtaaagtgtcatttcctattcatcagcacttgacttgaagctgagaccacttgtttgagagcattgttaaacttgttctattcattactatctgctgaatctaagtttgtattatactttcgtctgttttcctatcagtctcatgtttttccatctgaattcgtctgttacttcatacaatgttattagtgtttactgttttcgattttctgaatatagcttgtatatttttggttactaggctccacggagaagcacatcgagtgagaagttgccaagcaaacaggagagggctaatgtatttgcaagatcatcgaaggagcacaataagatacagtcaaccaagaaagtcgagccaactgcagtgttggacaccaaagataaaacgagtaggcctaaatctacatctgtcgagaagaaatctgttgcagagaatggattgcctgggaatttggtcaaagtctctgttaatggtaaaagattagcggcggccaatatccaatggagttcactccctccatctctttcgaggatgggacaggtatggccttgactgctcttggatccttatatgtgcttgcttcattaataggctttgaagcatttctagtgattaagaaaattcatcttcaaaacaagcagtttagaaattcgatcatccaaactaacatatttactctggtgattgaagagaacctcttagtatagcatatgcatcttatgttttggtctttgacatcgtgattaaatattaagacagcttattgagtcattgctgctatcaatatttgcaggaagtattgaggcatagagaagctgctcaagtagtcgcaatagaggccctgcaagaagcctctgcttccgagagcttacttcagtgcctcatgtgcgtaatatcttaaccaagttttattcaggccggctttggatgtttgagggacaaaacataaatgttttttgtatctgaatgttattgttactgccttggtggtttctgaactttgttctgcttttcctttttgtagtatgtactccgatcttttgtcaacggcgaaggaagatgatccattgccagtcgttgagcagttcttgaagctccattccggtttgaaaaacgtccaagtaataacagagtcattgtccaaattactctctttgatgtcctccccagataatgaagaaaacagatccgaggaagctataaaagcggcatcggaaaagcagaaattggcagcctcatgggtccaagctgcgttagtcactaacttatcgcccttctctgtctactccagcaaacaagccaaacttgctgcctccaggagcaaacccgtgatcatactcgagagcccgggtaataattcctctagtaaaacccgtgggaatattcaaaacaagccaacgattggatctaaactcgtagcacaaggaatgatccgtaaacacagggagaacagtagcagccagaaagccacctcggtagcagggtcagagtctccaccgttaaactgggtgaaagggaatggtctaaacgaggcaactgatctggcagagaagttgcaaatggtttcacaagattggtttttgggtttcgtagagagattcttagacgctgacgtgattacatcatccagtctcagtctgtctgataatgggcagattgcggggatgctgtctcagctgaagagtgtgaatgattggttagacgagattggatcgaaagaggatgaagaagggttacaagaagtctctaaggaaacaatcgatcgattacggaagaagatctacgagtatctgctcacacatgtggagtcagcagctgcagcacttggtggtggtggtggctcagtctcttctcctagacctaaaccaatcgaaaccaaagcaaagagataaatgatgatgaagaagcttctacttgttttttttttttcttgtatatatgaaaattggcggtcaatttcttctgtataattcaggcatcactaagaagcctaccgacgtgaaatgttggtattttttattcagtcagatactcactaaagagaacctattggttcgaaagatttcaacatattttttatccattaataacgatatctcttctctagcgattaaagattagaagatcagcaaaaacaaaaatatcattagaagacttagatccatcacaattctgtaattttacaaaaactatgacgattcatgattatgtggaaatagaggcgatcggtaaaagttgatttgtttatggtttatttgtaataataaaaaaactacaaggtcccaaaagaaaataataatcaccgaacaagtccctcccatcatcccatattccacatggactctttgaaatccaaggttttgccatttgaccacagatttgtgttattttcaaacacaaaatcaaccaattccgatgaatcagaaacctccgccgtacggttatggcggcgctggtggtggaggagtcggtccttcttccacttccaacaccacaatcatcgggacgttgagtgcacgcgccaagcagacgacgcaatcgatgatcacgacgctccgtccatggcgagagattctcgatctgtccgcgctctctctccctcgcgggtatgatgaagccatggcgcatctaaagcacaacatctcttatttccgtggaaattacgctctcgccgttctcgccattgttttcctcggccttatttaccatccgatgtctatgatcgctttcatcgtcgtcttcatcggatggattcttctctatttctctcgagacgcaaacgattcgattgtgatttcggggaaagaagtagatgacaagatcgtgctggttttactcagcttggtaacggttttggcattggtatatacagatgtgggcgaaaacgttctggtttcgctgatcattggtttgctcatcgtcggagctcacggcgcttttcgtaataccgatgatttgtttcttgatgaagaaagtgctcgccgtggtggcctggtgtctgccggttctggtaaccggccaccgtcgagttataccccaatttgagtaaaccggtttggagaattactcgtaatttcttgggtttttgattgaagaagctaagggaatcaatttagggctttgtattttggatttcccaaagattcttgtatttatattttggcgtgtgtgtttcattttgtttgaatgtatacaaattctgggaaaaaacaaattggtgttatggtattttatagaattgccaaaaacataatttccgatagaaaaagaaaagtatgcattaaccagatgaaatttcataatgaacaaaaccagtatgttaaattcaagaatcctttggtctacactcacagtagaatcataaactgatgcaatagaagaaaaacaaagttgggaataactactaactagtcttcttcaagattgatagaatctttgaacttagcatacaataccttcttcagcgctgccatttgtgttacaattgattccttctcttgctcgagtttctcaaggcttttgcaggtcgcttctttcatctcttctatctttgtttctacgtcgtccctcggcacatgagcaaacacttctcctatttgaaaacgcaccatctcctcatcagcaaggatcaactcgttccctgcatcctctagattttcacacttttcctgcataaatcaattgttttttaatcaagctagatgcagaaacacacagtagaatgctgttttaatccccctaatgaaacgattgaacaagacaagtatccacttattattgcaaagtcccacatctccctttttgtttcctacacatgctgaactatcaacaccattacaatatctaattacagtgatctgatataccctagcaggcttatattcaccaacgaaggagaaagttaagggagcagtgatatgtaagagtgcacggatggtataagcaggttacagtagattggtacaacctaaagagaatgtaaaatgagatatgagagtatagagattctcttgtggggttatctgaatgaagtaaaattacaatttacaacaatcaataaaatcaggaattatctcaaataatcttaatcatgatcctacactagaccaacaacacttatcatatactctcaggatcattgtaattagcttttgtatcgggttgtagcagtgctgatttcatttcatcaacaaggagttaatcagttagctgagagcaaaccgatgtgtagtagattcattatttggtgaattcattacgggattggatctaatcacagtattccaccacctaaacgatgcaacatagcgaattgaatccatgaataaaacctaatcttaaaaccctagaatcgtgtagaagaaaaaatcaaggatacataaaagagagaaccttggcggatttgatatcgtcatcgaggtcatggactctgttgttgagacggctgaagatattaatgttctgctggtcctcccatgtcacctccatctcagatccactcttactcccctgcaacatcatcatcaaccatccattagcatcaattgaagaagatgctaacaaaataaattactcctattcgagatgattttcttacttgctgctgcattttcgtcgcactctggggattcaggccaaatttcaatagaacgttgctgtgtgagagagagttgtgagtttctttcccgaccgatttttattagaggctaggcccaaccgagttattctggtacttcccggtataatggttttgataccaaattatgattgatttttggtcttttcggtcgagtttgtcccacttggcttggaattggttattttgcttatttcgttattgattcgtaaattttgtaacatactaacatgtttaattaactaaatgatacttgtactagtttagtggttataccatcttgttagttgcaagtgttagtaatatgtttcgaccaacaacaacaccaaaaatttctagaacaaaacctatatcaagtaagagttagttattccaacaaaaaccaccaaggtttgtttttggattctgtctccataatcaatcaagctccagaatctccccagggaattaacagagagatccctttaaaaatggcaaatggaaattctacaaaccctacttttaaacaacaccaaatgtgtggtagaagaaactcattgtttctgtgttttgtaatatcacaccattaaagttcaccagaaaacatatctccttctgtacattaataaaataaaccaaacagaaaaaacttcttaccccttttcttcttccgggatgaacattttttaaagggaatcagagttctgggattttcactaatctattcaagttcttctgtttttcctcgcttacatgagctaacttgtacaacaaggcacatcatcacaaaaatattctgccccttgttgataatcataaacgtgcctgcgatttcttatattaacaacagagaaagatggtgagggttggagaagcattgagtgtatcaacctcatcgtcgtcatctttctacgacagcgaagtagaagagcttcaaaagatgccattggaaccaccgaaagctaaggctaagaaacgtctctcgaagcaactctccatgttagagacccgtagagacatcgcatgggagcgtcgccgtcgccagatgctccatcaccttgagaagcataacgaaggaggagatgacttgacggacgaggacttgagtgagctcaaaggatctattgagttagggttcgggtttaacgaggagcaagggcaacatcttacaactacattgcctgcattggacctttacttcgctgtgactcgtcagatctcgccggtttctacaccaggcagtggtggatcttcttcatcctcccgtcctacttccctcggagaccgatcttcctcttttggtagtccaataagcgactctgattctttgaaggttatgtctccaggtaacatagcaacctaaactttttcgtcagattgatattttcataatatgattgtgttttgatgttatattctataaatttgcaggagatgatcctcaacaggttaaaacgagactgaggcattgggcacaagctgtggcatgttctgtgatacaatcttccaattaagcatagaagtgagagatgtacaagagtgggacatgaatgatactacacaaatttggttgagacaaaggaagtgttgtagaaattaaggaagcttaagacagattaattaaggagttggttaagacagaggaggacggattattgaagttcaaactaaaagaagaaataagaatgatgcatggtggtcttacatgttattattcttgaacccttttttttttcgccaaagacagtttttaattttttagatatcactactttaacagtaagaaaatattttagatattaggttttggcttctcttcctcttttaattgtcttttgtaagtttgtattatgcgtatcaaccttcttgttattttccaaattcgaggtcctaacaccaacaaagaaatatgagtttaacaaaggacattacgtataagtagtttataacgaagaaatgtacaacaagtttaacaaagttgcatgacttttgacatgctaaacaaaagtatcaaccaacctaataaaaaaaatcaaatgagaacttcagaacaaaacctacattcactcttcactcaaaactagaagaaaaatgcaaaataaacacaaagaatatgaaaacccataaggaaattatgaacaccaaacccaaaaatgaaatcgtaaagaattctgagattatcgtatacgaaaggggaaggcaatgaagacgatgctatacagtttctttaagcttcttgaatcttgaacttcttttagtttcctctacaatatcctctccacaaaggtgtctaacatattaaaaaaccagaacgacatatgaataataagatgtttgtacaaagagctataatttccgcaggtgaagttatctgaagaacaaaatcaacacaacaatcagggaagaggaaagaacatacctttgtgaagattgttactcaggacatcaacactcagtctgatcttgtcttttcatgctgagactccgcagagtttgcaaatgagaagctatttcctttacaaattgcacgccttcatttccatggccaagagaattcataacttgttctaggaagtataagtctcccttcagcctttctactctctcatgtagctcagaaacagattcttgtgctggtagattatcgtcatgagccttgccatttactctgttttcaatcttctccagacaactggtgatgtataatctctcttcgtcgaacccaactaaacaactctgtatcttgttgctcattccctcactaggggaatccatctcggtcactttttctgcaacatctagcttattcttcttctgaggggtctggtcccggaagtattcaatctcagcttctaaatcttgtattagtttttctctctcaacaagtaaatcattcagtctctgtattgcttccatatcgtactctgcttgctcctccatcatcctcaggttctgcaaagcctccatttggaatgacgccttctcttcctgcaacctcgttatcatagccattgcttgatttgtagcaaccgctgaagcgcttctttcttcctccaattctttatataaaccagtcagcagtttcctatcataatcaacctgtcttttcaaccgatcaccctcactttcaccctcgatttcagtcacagaaactccttccaacgataagttactctcgttcctttcaagcattctcttttgaagtagcagctgcatatcatgatctaggttctttgtctcttgatcgctactgttaacagaaatcttggggcttacatctctaggtgacaaaaactctatcccacgagaagctgatatttgagtaagaagtgctttaaggtcttcgctaactctagacgtatctttcttcatccaattctctatttgttgtcttccattactatcatagtgaccttcgtttcctacaacgatattgtatgcatctgcaagatccagtaattcacctgaatattggtttgtttctgctgccactgacattgagttgaaggaagaagattctgactcaagagctgcttctgtgtgagaagtgacgtcccgtggagccatttcagacaatgaagagatcctaagagatgtctctttcatttcctttttatctgatacacctgatatgaaaattcattttctttatcagaaacccatacctactagtgtataatttaagcactatatatctttaatttacagttcatagccatcatacatgcaaagctggagaagaaaacacataagagtcttgcatttaaatggaagtttaaacttacaattatcggttgaattttcaggcatggaatttggagatggtacaactatatattcagattccagagaggtaatatcagcttggtcagtgtccctctcctttgaaatctcaacagaggtttgatttgtagtgactgattcagaaacctcgtctagagatatatcatggattgacataagttcaattccctctaagacatcttcaggagtttcagcaacctctgatgttgaagtaacatcattgaggcaaataagctcagtttcttcccttaaggaggaatttgccggattttccataaaatcctgtgttaatgtaatattttggtggcgaaccagctcttctttctcctctataaaaactgtggaatgttccatggcgcgtgatggtgaagtaacatcattgaggcagataagctcagtctcctccactaagaaggtacttgcaggattttccttaaaatctggtgttaaagaactatcttggaagcgaatcggctcttcattctcctttaaaacaactgaagaatgtcccatggtgcgtgatgttgaagtaacatcattgacgcaaataagctcagtctcttccaatatggaggcatttgcagaattttccataaaatctggtgttaaagaaccaccatcttggaggcgaatcggctctactttatcctttaaaagaactgcagaatgttccacggcgcgtaatggtgaagtaacatcattgagacagataagctcagtctcctccaataaggaggcatttgcaggattttccttaaaatctggtgttacagaaatatcttggaggtgaatcagttcttctctttcctttagaataacttcagaatgttccatggcgcctgatgttgcagtaacatcactgagacaaataagctcagtctcctccatcaaggaggcatttgcaggattttccttaacatctggtgttgaggaaatatcttggaggcgaatcggctcttctttcacctttgcagctgcaaaatgtttcatggcgcgtgatgttaagaaaagattatctaatgaattgatctcttcctccttgaacaccttctctgatgtttcaggcacatcattaactggaataagcacaggaaatgaggaataagtcctccaattggtctcttgcaactgaacttcctctcggtcatttcgagtcacgaagggctccaaagggaaatcaaagtttagcagcttgtcggtagccaaatcataaggcaaggtgataatcggatgagtctgaagatccactatttgatacttatgatcctcatctttaaggacgacacattcatcttctgagaatacagcttctgattcagtatctgaatgaatcttgagctcagtgtacccaacatcaggcaaatgattaaagctgacactcttcttgggtgtagatggtttcccggttctcacatcaccaaccaaaccaatcttgggctcattgtacccaacaggtggcaaatggttaagtgaagattcttgctttggttcagtatctgaaaacacagcctctgattcagtatctgaatgaatctttagctcagtgtacccaacatcaggcaaatgattgaagctgacacttttcttgggcgcagactgcttcccggttcttattttaccaagcaaaccaatcttgggtagaatttcccgttcagccacctgagtagcagcggtttgaggcgtccacaactgattacaacatgtacaatctgtaagcttagagcaatttggatatttgcttcgatcactcttggatccgaagtgagaatcttcacccagtttaccaaccaacaatctgtaagtttcagcattggacttattggttgtagcaaacgagaaaagacaagtctcacacattccacggacatcaacaagcttgccgtgagcatgacagtaaaccaatgaagagatctctgatttgtgtttagagcaaataatatcccaatgagttttcttcaaatcttttgtcctcctgagaatatgatcaagatttgagcacatcagacatggagattgaagctcagagtaatctgcaaacctcgcgatcacgtaagagaatatggagttaacgaagagcatgaacatcagtagccactcattaaaggctaatgccaaagctctagtgaaactccgtgaacccatctgtaattttactgcagacgtttgtctagtagccaactctttgcagaaacataagatcaagaatcaatcaggcttcaaatctgcatcaatgtagatacacatcaaacaattagtaaagagtacaaaaatatgagaaaaatattgaatcaataacatcaagattctactcagaaaatataatgagactaaagttgataaagagatttgagataatgaaacaaacttgattcgtgcagaaaagacaactaatatccagaatccaatccgatttacaaatgatatttgcagatttgggacaaacagaagcaagaacagaaaagttgaccaaaacaagataaagcttacgtttttatttagccttcttaatagtgtttatctccagagtacaggaagatcaaatatttatctcaagtcagcaattgaagcaaaaataaattccaacaaagattttaaaccactctaaatcaaaagtttgccacaaaaaggaaaagagatctaaaaagaacaattgacagctcaacaaaatcagaattagaattgtgtgtagaagaaatactaaatggatcaatcatacgatcaagacccacaatattttatatgatccaactaaatataagcgctgttatagaaaaatctaaccttttgatcatgatgatcgccagagtaagtctcaattacagagtagaaagtgaaaatccaaaatctagcaaagttgtgatttttgagggagagcttcacagagaacattgatcccatttatatatttttaaaaaactcaaaaggcagacccagcaaggactgcacgtagtcttcacaactaaaatcacttaattttaaaattaataaaattctttgtgagagacattgaatgagagagatctattttattgaccaaaccagggaaaacaaaaagattaacataacagacttaaaaaaaagtcttaatattggtactactagtccttaaataacattttataattattagtcttcacaattaaatcacttagttttattttcctttccgaataattataaaatgttaggcaaaagattgaaaactaagatggtgagatgtggagagagacaggaaagtcggctactgattacaaaaacggctgccgaaagttgcaatttgagtgtgggaactattttttttatttcaaaaagaaaaataaaataaaatacaaaaattatattttttttattagagtagttgaatgaatataatcagatttgagtttttaattaactgtttttgatttgtattcaatttttgtatctgtttttgcctttttggacggaaaaaaatagtagaacccaccaaaagttttggctgtgttgtgtgcttccatcttctcttgttgctcatatttgacttgcatttgattgttaattattatttagattaggaaccgtaaacaatagctttatttggttgtccactgcttacattaccaagagctcaaacgtcataattaagggccatggatgtatttaataactttgcatgaagaatgataaacggaacaaggataatgtgtatatttattatattaacgccattttcaagtgatcgttacgtttggcttcatctctttcatttacacttatcaatccttaattagttatggaggtcctacatttctccattcattattgtttctcatttcttaaaatataaagatcacacatttttgtgtatgaataaagcttttaatacttctctcattcatcttgtttttatggactaaaaggcaacacgagttcccaaatatattaacgcatcccattaacgtttctcgaattgatgtgatttgcgagcaaaaactctcttagacctacaccattcttaagcatgagggtttaatgcatattagctttgaattgatattttcctgaatttgtagattcgacttggtagattctaaagatgaagtatagatatcatgtatttgtaaaagaaatttgaatagtattacaagtcttaaattggattttattcatgtaaatgggtagacaactttagattagttacaacttatgcagtgagcattttagctacttatatcttagagaaaccaaaaaacaacacatgatattatgtctttctggtttctttatttgtgtatataaaattagtagtctcatttataagattcacaaggataaagaaaaaataaaggagaaaatgtcacaattaaagcatattagagagctccatcaagtggctcatctcttccatttgacccccagtagtacttgtttcctccaaaagccatttctcaataaatgtcaatggtggtgtagcattatgatcatcatcatcctcatgatcaccatcttcatgatgaacatcatcaccgttgttattctctgaattctttataccctggtcatcatccccgttgattcctttgctatgaccctcttcccaagaaccttgaagctgctcgtatggaaactgatcgctgtgatgatcgatgaaattgtttgtccggttctgcattttgtgttccaagaaagtagtacttgtactactctttggagacgctctcatccaaccctcaagaaggcgggaaatgttttcggtgcttgaagcataggtagatctatgattaatggtgtttcttgtcgaagaagtttgcagcgcaatgttctctgatctgctcctctcatcactgtcagacttgttgagcttcttctttaaatgtgtgttccagtagttcttgatatcattgtccgttctttgtggtaggtatgaagctatggacgcccatcttaccacaaccatatgtaaacaaataagccagtttagggttcacatcatcaaaatatatacacaaaacattcaagtataaagagatgtagatccttttgtctgagattacttgttacccaataaggcttgcaagtgaatgatcattccttcttcatgaggagtaaagtttccacgtttaattccaggtctcagataatttgtccatctcagtctacaacttttgctgcatctcaataacccttttaaaagccaaattaagatacaaacatcaggacacatatacaaacaaagaaaagaaagacactagaagaaaacatgttgagaaaagataatgaccagtgttggtgggaactgatctccagtttccaggaccatgttcttgaatgtaagaaacaagaatgatatcttcttcaggagtccatggtcctttcttgatccctatcttgtcacagcatggaggcctacccatctttctctctctctcttcctctagatctctctgagtcttatgctctctttatagatgtgagaatatgtatgtatatgagttaaatgcaacatgtatgtacatatatgtgaaattaatgggtgacttaaagaagagggaagaacttttaaatctgctttttcttgacaacctcttttggatctgccaagctcacgagtcactctgccttttccattaactattttgcgtagtcaattaacgaagatatgttgatctccacacgaatatgtatatctcccttaagaaaacgttactggattatttatttagtgaacgatccatcaaatgttttttcaatcgaaatatttccataaaaggagctcgttaacatattgtagatgaatacatagtgtatcgattacaatattttgcttaatttggaacattcgttggtaattacttataaatatagtgataatcaactcataaatggaagaagagtcacaagctatgttacttacatttttgtgataatagttgtaattgtggtaagaaaataaataaagataaagtgtgggaagaaacacaattatttcattgaatttctccatgattaaagggaatcattcactgcaacttggacatcctcaagtttagaagaaaaaaagatattacattttgcttgactctttagatccatgtcttttgttttcaacttttcatatatcacgcatctctcgttgcctctgtttaactaatattcttacaacttataattataccaatatgtgaaaagacccattagttagatttgtgttctttgtgatatgatttccatgttgatgcttacaagttacaactttcattcatgtttttctttattttgtcatctacgtgaaggatgtgaatttgaaagggaaaaaaaaaatgaaccaaaccaaaccaaaatgtctaccctcttaaacgaaaattgaaacgaaaaatctgttattgttgttgtattttacgtataacaattagtagtgttagattctatttatgtaaaaccgaacttagtgcaaccaaaccaaactaaaccaaacaaatctacgtattcttaaaattgaattaacctaaaatcgaaataataaaccaggcaaataacccaatagtattgggccaatacccatcactaggccctagcccctgcctggtctatacgacaaaagaaaacgaaaaaaaaaagaagggaacgtaagaagagacaaatcaatccaacagcttcaaattagtaagagaagcagagaaacaaagcatatcatcataccatatgtccttgtgtccttgtgttaactaacaccaatgctatacagtctatcatattccatcttaaatgtgtcggagaaatcattcatcctctcccacaaagcaaacccaaacagacgaaatctaatccttttaccttctttgtctatatatcccttactgcacacttgatatgatatagacaccgagcgagcagtcaagtgcgcagaaagtgcccgataacataggcaatgaatgccacaacgcatacatacagcagagggaacccattgtgcacttctttcactatcttcttcgttctcagttccgcctgcatcatcatcaaaatacaagcttcgttattatgaaactgttttgattgtaggagaaagaaacagctatgttttctcactagcattctcaccagctcatgttgcaagctttgtctatgttgggagcttatagatcgctcctccattagcttcgaaatggttgaatcagcctgcaccagatttaaactctttagcacagttacatatagcacggaagttatggattttaaaatttgataagcagacctgttttaacttggattcaagagcatccactttcagcttcatctcctcaatgtctttaaccaacttaagttcatccaatcctctgacattctggccatctgttttctgcagctggacaacatctctctccttagatatctttggttcactgtcaacagctattccattagtaaacccttgatccctaggtagatccatggccttcttcatgggagcgtccaaattagttgttgccttaatcgcccttccatcatccgcatccttatgagacctaattggatcgaatccagtttcttttgccatcctcgatgaatcgtagctatctttagttgccttcaagtcattagcagtatatcgatcttccacaaaatccactgtggccatttttggtgtctttaactcctttgcattgtcggctgcctttaactcatcatgtccaaccatcctaggctcttttacaatctcaccctcctagaaaaataaattttgagaataaacaaataactacaagaaaatccctattgcacccaataactgtgattataagctaagctaaaatgaacttgctggaacataactacactcactgcttggcaaattactcttcatcttactaacaaatcataaaagttgttgcgaaaaggggtaaatactcttcttacatattgtggcggagctagggtctctgactggctatataaacgatccttgaggatggaatcttcaaatactgctccctgcttcggtgtattgattggagatagttcaggtgagtcagagggcggtacgagcgtgaccctgagtttgttctcctctatgtgtttgccttcggctttcgaaaactgccaagaataaatgagtgtacatatatacttgacagaccaaataactgaaattaatgataaagaaggtcaacaagtgttggaatgcttaccatgctagctgtgatgtcttcatcagttgtttccgcagatacagcagtactctggattaagaatttgtctttgcaaaccatatctggaggtggttctttaaaagcttgcataatgactgcataaataacatatacaactcaataacccaaagcattgactgaatttgaatttcaagaacccattcatcatcaaccagtttaaaattttgaatgctcaaacaaacccaaaaatgcaggttccacgtaatgagtaataacttgaactttaataattccatccggagcagataccttctctcttgaacaactacactaaactctaaaagcctaggatcttaaaacaatgtccaaacgctgtttaagtccaagggacaaaggacagatctatacatatattccagttcatttcccgccccatgtagacatcatgcaacagtttatcacatcggcctaagaacgtcggtgcaagaaattcaagcattgctgggaagaatataaaaagtaggcataccagtgaattcacaggttgatttaggtgcaacaacaccaacatttggacgaacacagtacttctttggtgatgtggttttaacctgtcaaaaaccacatctagtttaggtttgtatacagaaagaatactttttctcagaaattttataagatattcgaaatcctgaagccagaaagaaagagaaaaagtttgagaagaatcttctttagaccttaaatgcaacataatgatgggtagtattggttagctgtaccacgcaggaagtttgcttcttcaggtcaactacaaaagatgaaaccagttagtattacaaggataacaatgccaaggcaaagatattccttttacaacttccatattttattatagatcctcagaatcgatatgagaggtaagaaaccacatcacagaatgtcagcacatacaaatccagtagcaggaaagagttagaagattcctccaaacaacagccacattaacatcacatcaattcatcttacaggagaatagacccacaaacaatagcaccactatgatagaattctaacgaaatagtgagaattcagaaaactcggtattcataactggaacatgttggccactttgcttaaggaataacacaccctcgctatgaaatccacattttacaaaaaaataagaaactattaacgggaccacagtgtctactcactggaacttaaaaatgatcattttacaattgataagaatcagtccccttatatcttacctgcaaactgcaacgttcgtggttgaatatccaacagcggcatattcatgttgctgtgacaaaatgactcaagtatcaaacagctaccacttgcagcaggattctctccacccctatttcaacaaaaaaataataagagaaagatcagcccagaaccattcaagtatgaaactgtcgacactagagcgaaaaacaaactcagatctatactctatttgggacaatcataaacccgctctcccattgggaacatgacgaaatctaaccaaacagtcaacaatcagaaaagtttctctgttacactctttcgagtccggattctcgtcttccgtcaccataaacaaaccaccgcactaactcgtcgacgacgcgttctcaaatctgacgatacgaactcgcccgaagactcaaacgtgactatattttaccttaatgcgctcgttttttctcagcgatccgaccgacacaattttttgggcaacgcgctttcgactagccggaaaaccaaatcgtcctagtcccccagtgtgatctagttacgccaccacaggcctgatagtattaaaacaaaagggcgaaataaaacgacgacgtttacgaggagcgactcctcgggatccggtagccaatagtaaactcagatcacatagatcttcccgagccctagcgatttcgatttctaaagcagattctaaagacaaaaatcaggaaactcgaggaagaggaacctagtttcgaaacaaaaacaaaaaccagagaagaagatgatcaacgagaatgatgaaatcggaaggaaaccttaccgtctctccgacgaagaactaacggaacggagcttgagattgagcgacgaagaagcagcgatcgagagaaagagagaagtgcaaaaactaatcttagtgaaggccaagtatggaaatgtattaatgtgttcaaacacattaaaattgaatttttttttaagaaaaagtatggtactgagattcagagatggtgaatatctgttgtacctaacagcaatttagtaaactataatttctgacgactatttttcgatacttttgtaacaattatcgtaaaaaacaaaaaattaagtgagattacattcgacgttagatgccagaaataatatatatatgtgattgtgaatatgtacctttttttcttttttcaatgagtgtaatatgaatgctttgagaggattacacgcgtgattctgattcggatcaccaacttcttttgcttcccttttaatttctttcctatcttttgcttttcccattcatctctctcgctttccacaaaggcgagatttgaatacgtaatcctaattatactctcatagagatttggtaatttggcccaaaatatctttctactttgtaatatgtcgatgcatagaaaacataatcttattctaacattcacaaatctcctatatttccatattgaatctctcagtctggatcggtttgtaatctctgtccagctacctcttacgtttcaggtgtttctatgatttatccattggcttcattggctgcctataacttatatatcatgttgcaatctttgtgtgtgttgtgttggggagagcttatagccggccgctcctccattagcttccaaatggttgaatcagtctgtatcagatttaaactcagtgatagcacccacgttatgcatgatttttaagatttgataagcagactgtttttaacttcaattcaagagcatcatccactttcggcttaatatcctatattaatttctttaacaagctaaaatgaacataatgaaaataactacactcactgattggcaattactaatatctcaaaacattaagaagtattttttttttttttgggtgaaaagtcactgtctttttcttaaagccaaaatttatacggaacgacaaaacaaaaaatatgactaaaaacttcttaagcgcaatcactgaccatgcagcctattttagtttttaagtcttttatatacattggctgttatagtcgtaaaacaatcaggtatttgttatggagataacaatttgggaacgcataaatagtgcctctgatggttggaagtggaacaaaatcacaatatttttttctagtgtataaacaacatacaaatatcatgtcacctgcaaagagaataatatgccaaaattttgatataatacgcataacagagtttatatatcaacgttctagacttataggtgatcatccattatctttaacctcttgtagctagctaggttaattaggagatgcatgcatctagataggcatatatagtctaacattacaaatccatcaaaggttcccttcttcttctccaaagaaattagctacatacaaatttgacagactctcataaatatatatatatatgtttatagattatattattaaaaatacaaatgatattttctgtattttgttaaaattagttcttaagattttatgaaatttataattgagccaacgtcttagaaataattatacgacatacgtaatttaaattcaatgacgatgacttaaacttaatgttttacagtatttatccaatcaaattttaccacatcagcagagaagagtcaaacttaggaaaagtctatcttggattatcctgacgtggcttttttcaagtaagaaataaattaatgctaatcacgtacgtacctacccagcttttggacctcgtgggctatatagaaaacaagtaaccaaagagagacgaagcaaaaacattcagagagaaaattcagcatttttgatagctcaagcacttgattctttccaaaggggtttcctgaggtatgtttgctttcctttttggttttaatttgtttcaaatcttagatcgattcttcactttggattcttaaatcgattcttgtcctcgtctgtgctgatttcgaacttttccgattccaactccgccgaatctacgtatagatctttgaggaaatgtttttttcgatttatgatcggcggatctaccgattcctttgcttgttttctttggatgtatcacactcttctgaagatgccttgacctttttatgtgaactagtaagagttattatggcttagatcgttgaatatctggtatatgtgttcttataatgggattaggatctatgttttggtgcgtattaaagcttagttgagattgatgtttttgggttttcaaattctgtttcttgtctgttgagctaatttaatgttgtgtagaaccatttgtttttttctggatctttacttatttgtatatgtattggtttatgtttatgtttttacagatcacaaaggccaagtaacaatggcgaaaggagttgcagttttgaacagcagtgagggtgttacggggactatctttttcacccaggaaggcgatggtagttctttataagagtgctttataagatctttgaagcctatcttttttttccttcctctcaaatgattgagttctttgtttgggttttttgcaggtgtgaccactgtgagtggaacagtttctggccttaagcctggtcttcatggtttccatgtccatgctcttggtgacaccactaacggttgcatgtctactggtaactcttatgcatacctctctgcaaattttcaatggattagaaacttttggagcttatatttatgtttcgtattgggaactttaattatcgccaaaagtaactgaacttgttattaaattcctattttaggtccacatttcaaccccgatggtaaaacacacggtgcccctgaggatgctaatcgacatgctggtgatctaggaaacatcactgttggagatgatggtatgccttctcaacatttgtatccctcatctcaagcttatttagagctgttttgcatcaaatttcgctactctctcaaatttgattttgcagtcttagttgtatagtacagttgtcacctttgaccagcggtagtgttcatggatttacataaaagcttttgttttgcttttctcaggaactgccaccttcacaatcactgattgccaggtttatagctgtgtacctttttatgcttttttcctaatccaaacctgctgtagtgaaccaatctcttaagatacattttgtgttggcttaacagattcctcttactggaccaaactctattgttggtagggctgttgttgtccatgcagaccctgatgacctcggaaagggtaatgacctttgaccatttattttcttgagattttatttacccatattatgctaacagaatttaaaagttagccagtccgtttgagggcatccaatgtagaatgcttatgattcaacatccatcctaagaacagtttataacctagtgtcattggtgttttacatttcaggaggccatgaactcagcctggctactggaaacgcaggcggccgtgttgcttgcggtaagtaaaacaaaattacatttttctcacatctcctgtgaaaaccatgtatattctatttaatcttgatcattaccatcattgtcaccttagactccattgattctctggtaactcggggttcatcttggtttatctattgactattattatcttgcattttgggggtccaactgaatggtaaaattatcaaactgattgaccttttgtctatgacttcgcaggcatcattggtctccagggctaaagctgctacgtttccaaagaagagattgatgtaataaggaggtccaaccttagacctgggtttggtagttgtgtgtatcttctggtgtgtggctaaaaacctatgagcttagtgtggctcaaagcatttttaattcagacagaaaacagagaaaattccgtacttttattatttcatgaataaaaaagagttgatttactgttataagttcttaaaggtaacaagagtcctggatatggtacttcaatatgcgaatgtttttacaaacacaaacttctttgttcgttcaaaatctactgtcataacgttaactgagctaaccttcaaatgaaacttctccatcattacaatatctccgcttttctgttacatgtcattatgcaagtgattcatgctctcctgatttctttcttatcaacaaattcagactcggaaagtaaatcgattatacattatcattccttttggacaaaaatggagatacaagttaaaattgtgatatttgaaacgtttcttgatgagttgttatggttttaaatctcccggcaacagattcaagatacctgactgctccttaaccttgtttagaagaagcatcagaagtggaactcttgagagtgttctttgtgatcccaccattatcagctttttctgtcaaacccaaacaaatttcaatcaatgatcgatggaataaacaacattactcaacaccacatcagttgttctctcagtctcacctttgctcgtgtcaaagcaacgttgatcctatgccaatctccgagcagtgaagaagcagagctccttggtttctctcgcgatctcacaaaagataccaatatgcagtctttatctcttccctacaaaatgtgagctcatcaaacgttggttatcgagcacttgccaaatcaagatagtcatgaaaagaagaacggtaggtcctagaggcaaacctgatatttgtcaatagtatgtatctccacaggagttgtcggaatggcatgttgaatgaggctggcttgtgagttataaggagtaatgattccaatatctttactatccactccattgttaactagctcctctacaatctaagtaaagcagttagcccactttttcataagtttaaatgcatcttgcatacttaacagtacctcagctattatggaagcttcaactggattgttgatcgcattctgatccctagcttcaaaagcacgcagcatatctacaaaaacatatcatatagtctcgtgaaaactccagcccatatggcaaagcgctcatgtgaaaaaaaaagcaactagtaagtagccaaaaacctgtattaacaaatacaactgttcttgttggctccagaacctgatggaaacaaatataagttaagatgctaattagattattagtggacaacgcctacaccgagtcaatgtgcaacataacaaatattgtaaagcaagcgactggagccaagctgaaatgctttgtccctttgtctaattaaataaagcattgcatcaatatctgaaagtggtgttaagattttcataggctgtccaggccaaggctagttgcataatcaaatgcccaggtatccagagttttaagcagaaggaacatattatatacacagatctaggtttacacagatgtgataaaatgttcttagttgcttaaagatgcctctacttataaatgtttaagaacaacacactgacctttttaagccatggcgaagtagaactggaggtagaaagcacaagtgtggcatcagctacttcagcagaaccgcagcataatctgtctccatatatcaaggcatttgatagttccataatacctcgacacattcggtactgcacatagaagatgtctcaacaaagcagaaaggcatacctattaacaacacgtactaacatagtttcatcttagtagatacggcaacctggttttgtaacactgaaattgcctgaggatgggcttctgataacctgcgaaacaagcttattcccatcccattctctctagcctctgtactctgctttcatcaacacaacaatgatgctgaaactacaggaaaaaaacagaggtatgtcaaaaaaggtgtaaatgcttacctgcaccagtggcggtagttgatagtggtcaccaacaagtacaaaggtagatgcaaacagcaagggccctatcgaaacctgatcagtccaagaaaccgcgcatttattaatattattcacttcaaattcaactttgtcggctctaaatttcaatttttgtacataagataattttgtcaaataggggccactgggtaaattttttgtattacgcaagataaaaaatctgttatctaattccatagccattgtaagaactgcattttgactcaaactattgggaagaattgagagatcatacagggagggcaatctggccagcttcatcaataatgcatacatcaaatcgcctattcacaagcaaaggactattgattcccaaacatgtagaggccacaactttgacctggtccaactttttctttatgtcctcgacactgcacatattcatggctgtcacaaagataagtctcaaatacactgagaacacttagaagcaacgatagtaggaagaatatatagcaaacctgaaaagcaactttctcgaacttcttcgtgtacagcctcgtctctaccaatacgtagaaactcaattccctacaagtgtttttcaacagtatgtcatgtgtatgaaagtgttcctacatgtctaaaagtagagacttgaagaaatacatgtttttttcttcactttttctaaagaacaacacatgcagtttatcagttgattttccgataaattcttcctatccttttagagctgaatgaaaatttaattcagaaaaaaaaaaggttggctacgagataaggacctgtgcttttagtttgataagtagattatcaacagcagagtttgtgtacgatgcaagcagaatagatgagcctctgatcaacaaagctttcacagcatgaaccattgtggaggtttttcctgttccaggcattcctaatatcaaagcatagtcctttgcagtgagtatctgaaaataaagcaagaaagcaagtcttttatgagctctgtcaaagaacaaagagtgtccttcagacatgccctaagtatagcacgttcaacatgagatttgatggaaaataatcatgcaatgaccttaagtatagcttggcgctgatcattattcagactcttttctgaccaaatatatgatattgcaggatcctggctcagtatagatccattgtcaaatctaggaggctacagagacatggaaaaagaaacgaagagaaaacaaccatgtgaagaagggtataagaaacaaatgcatcatctcgtctaggagaaatctgaaaacagatgaacaagacaatctacctcgagatccacaatcattttcctgatgttatgtccattttgtacgaaaagctgcatgagattgaaccttgaacaatatgaagatcgtgaatcaatatcatgacagcccatgtaggtaggatcaataaatggaaaacaataaattacaaaatcacctcataaccgaaaatgatgtcatgaattcatccttgtaaattctccataactcatgagagagatttgatacctcagaagaaggttcgctccaaggaagacgtaatcgcttggataaagaaacctaaggattgacatagcaaaaggataatcccaaactctttagacataagaacatcaagatatattgtaccagacaaacatagctaaatctacagactgttaaaagaaaatccaggatgtatgtgcttactgatatatgtgtgcgactaatatctgctataatcccatttgcaacggtcaggtggctgacttctgtgcgaagaatctggaaatgaaaatttaaaccaacaaaaggggaacatcataaactaagagtgaaataaaaaatcgccagaaagaaaagctggtgcaactaaacttaatggtgaaactaaatttattggttcaaaacttcaaattaaccatgatataagaacaatcaagaaatattgtaccacacgatctccagttctaagtttgcaatccaggtcatcagttgcaaggtttccagtcctaatcatatcttcactggttactctttctctagattcagatgatttttgacgtacaaaacgatagatgaatctagtttctttatgagagttatgatgctgaaacccatttgtcacgtcaagaaccattgaagaaagataactagctgagtggctgccctttgaaccatgtggatgcgcaatatctttccgtagaagctgaaaacaaacatagacataagatcgccaagtaaggaaaaatccttaactttgtaccccagtaaacaatcaactttgtattcaaggctgacctgcatctctctaccttccaagtcaattagcctgtcccagtgtcggaggaaattgaaatgtaaagttgatagatgagaaacatgtgtgtcaaagacatcaccaagtccgctactctctgtgtttccaccatctgcctggggcaagcagacaagatgttttagaagcttcaaaagatgacggttcaacaccatgaagatggacgttcaacacctccccaaaaatgcttgaaaaatgtagtgtactctcaggaattacatgcaaaataactatgactaagaaaaagcttactataatataccgcaacaaataacaaaatggaaattcagtttcaggtgactagtatcaagaatgtgatttaaatcaacggttgattacttatttagcgagtggaatacatccatcaagtcagatcataacatgcatattaaaatgttaaccccatatgcttaaacatgtagaacctaataccctaaaatgtaaatatttgacttcgagcattattaatcatagaaacgagaaaataccttatgataaattgtgcaaacatccagatggcgacagttccggcatatgtttgggttctagcatcaaaataataaataatttaattatctaatattccctagagaaattgtcatcactggacatcagagcatacccgtaacatcggcggcagttgctgggttgttgacgccacaagaatgtcatttgcaagttcattgcgacgaataatcagacccaccaaatctgatcgttgaacagaaattccctttacaagtgaacaaagaaagcttagtcactccccaaatctcaagaccgaagaaaggaacacaaatcttgactgacctgggtctgatctgactgtagatagtacagaaggccattgtcaatatgcttcaggtacctgcaaagtggagaatgagatatatgaatgaaagtgtaaactgctgtccgttttccagcaaaaagaaaaaaagaaaggcagcacataagcacctctcagacataaggagcgtgtacaggatcacctgtgcagaatgctctattgatgactgcataacacaataaagaccaagcgcgtagtttttataagcttttggaactttcaaatttcaactgtatatctagatagatctccacacagacctgaccactaggagcttttccagatttaaactcaaggggcattatcttctcattcactgtgttcatgtcagattcaactatcactctgaccgaagcatcgatcatccctttgagaccatatttaggggcccatgacatctcctcaatatcaattacctgaggtaagcaatttgtttatatacataatagaagtctcattggaggagattgcttaataaacaacgattattctgcaatgatgtcaaatgaaatcccaagaagaagggagagagtaggaagagctctaacctctgataccttaacagctttcttcccaatggtagaaccaaaatcaacttttgatacttctgagtcctgtttataaacaacatgccacgaattaagatgtttctgcccatagagttgctagaaaggggactgacacagtaaaataaatataaagtgactgctaatacaagcatcttaatgtactttgtaattggatatctgtaggtgaaaggcagcataacagataatatgaaagtatgtgattaccaaacaagcacattcacgagaaaacaagtccaacacacattagagcataatgcagtctaatatgtacgtgcaacactacaaaaatatctgacgattccaaccagaagagtagccaaaacaattacgttcaagggaaacaatgatataacagccattagtaactaaagaaagaatcataaataggaaaatacaagtgtaccttcgaatatctgaaatgctcaatccaattcaacattttcgggatagctttaaataaagttgatctcacgtctccttcatgcactgtagagaacatatgatcaaataagaaaatgattaagtgtatttcattgggtcaactcgtagcattttggtattaaaagcaaaacaaaattctgaagtaatgtgaatcttaaaagcacatagaacaaacaggtatcatatctatttcaatttaaaattctaatattaataagaggtgtcctagctatattaactcaaaattctgatatgaataggaggtatcctagctatatgataactgcatgaaccttcaaataataggaacacataatgtagtaatcaacctccgcatgcatataagctctcaatacttttctcaatcactgtgcttgcatattcttgcaaaccatctacagatggagattcttgcgagagaccagcctggaaaacaaaggaaatggatagcacagatcagtacattgcaaaaaaatcaaacaaaaacactcattttccaatagaattc

SEQ ID NO: 22 - DNA, 110514 bp, Arabidopsis thaliana
gaattctccagtttcacctgtaagtctaaaagctgaaccttctttaattcacaatccatggtgtttgtttaaatacctgctcactttggttgttcttcaatcaacaccaacttaacgaaatcatgagacagactataaaatttgaagagtcttagaacgactaggtctcaccaacctctgtgtgcactaaaaatcgcctctccaagtgtttcagcaacataatctacctctgtcatgtgttatcatttcttcttctcttaacggtattacatattatgttttgcaggtgatatctggttgaaaatgaaaactggccactggctgtacccgaatcgtctcaagcttctcaggctccactgctaatagaatttgattccgatttgggattattatactggtcttcttgtatgggacgaccaatatgtctttctagttttagttgtgaacctggaattggtctgttattgtgtcattaaaaagccggaaactctgtctcggctgcataataaagttcatcagacattgtgttgggtgtggtgaggtttttccatacatatacatttacattacaactactggtgtcttttatgattatcttaaactaaacttgcagtgttaaaactaaacttgcttttgtttttggataagatcactctaaaacggtacaacccctgcctgtatcctaccaacagtaacaacacactacagctcataggccatagcaccagagttttgtgtaaacgaaatggcccagaataattgcaatttggtccgaaagtaaagtctattgcgactgggcctgttccctaaaatgtgatttgggctatagccggaatatcaaatagcgggtcaacccgaaacccgacccagtaattattctctcccctccgaaagcatcgataaatcctctggtttcctttgtccaacgagtccattttcgcgagcttccgtgtccaagagctcctcgaccatggcgtcttgtttacaagcatccatgaattctctgcttccacgctcttcttctttttctcctcatcctcctctatcttcgaattcatccgggagaagaaacttgaagacttttcgttacgcctttcgcgccaaagcctctgccaaaatccctatgcctccgataaatccaaaggatcctttcctctccacgctcgcttctattgccgcgaattctccggaaaagcttctcaatcggccggttaacgctgatgtgccgccatatcttgacatctttgactcccctcagctcatgtcttctcctgcacaggttaactattctcctccattttccgatcccgatacaatgatttgtatgcgctttgcgtttagttaagtcgtcaagtatccagcctctagttattgcacacagactgacttaattctgagagctccttgaatttgcaagagttactgtgagatgtgccagattgattacgcaacactgtgatttgatgagtttgatagtcgccacatcactttgatttcactgtttcaaatccgttgacggaatctattggttgaaattaggttgaaagatcagtggcttataacgagcaccgaccgagaactcctccaccagacttgccatctatgcttcttgacgggagaattgtttacattggaatgcctgtaagttatgtggattcttatggattttttggttgggactgcatagactgatgatgacatattttgctttcagcttgtgccggcagtgactgagctagttgtcgctgagctaatgtatcttcagtggctggatcccaaggaacccatttacatttacatcaactccacagggaccactcgtgatgatggagagacggtaagtttgaaaactttgtgaatcttttggaccatttctcttgttagttctaatttcagtgaataactcactaaacaggttggaatggaatcagaagggtttgcgatctatgactctttgatgcaacttaaaaacgaggtaatgttaaaatatgagttatcagcttgtgaaatgcaaacatgtaagtaataagttttgctagagattgcacaagctacttgatctgttaccgagataaacactttttcgtctccacggtatttttcatgtgagcatgttggttcttatttgtgcaggtacatacagtatgtgtgggagcagccataggtcaggcctgtctattactttctgcgggaaccaagggtaaacggtttatgatgccacatgccaaaggtatagacttcgactgcattctggccgcttctatggctcaccattgataatcagaacctctcatacgtttgattcattatgtcacagcgatgattcagcaaccacgtgtaccttcttctgggttgatgcctgccagtgatgtcctgattcgggccaaagaggtttgatgaatcgctctacacacttaatattctggaaatttaaatttgatcgagattttctctttctgctttgcttctacctactttcctatattatatctctgataatttggacagaaatttctcacttaagcatttggttcagaatttcatgacctaattaggtgaagaatctgagtttgattacttcatcttcctcattcctgttatgcaattgcaggtcattacaaatagggatatacttgtggaactactatcaaagcatactgggaatgtgagtgcgaaatattttcataactttgtggagaaatttgatagctgattaaaacattcttatatgtcatatagtccgtggagactgtagctaacgtaatgagaaggccatattacatggatgcaccaaaagctaaagaatttggagtcattgacagggtaagtttgggcactgtaattttttgatgttgcttttcatatgcacatactaaaagattaaaggttacatatcgtcaccaagcaaagtaacctttccagtcaagtttccctctcttctaccttttcctgatgtttgcctgtgcgtaatgatgaatttgttttcatacttttccaagttaaagctttaaagatggtctcataatcattggcagattctttggcgcggtcaagaaaagattattgcggacgtggttccttcagaggaattcgacaagaatgcagggattaaaagcgtagtatgagtctagtcttaagttttcttggcctaaatcatactgtaagtgacacgcgtaactctccattgctactctaggcatgaatccatcttattcatggaaatctctgatgaagaaatacaaatgcatctaacttacctgcaaatcattagaacgcacgcttgtatttacaatgatttgtattttgcttgaactctactcatttgcaggcgtcatggagaagaacaaatagactgaccaaaatcacattggccgcagactgccttgtttcaaatcacttggtaaatgtgaacatgcgattaggagaatcatacttaaaggatcttgaaatattatgataaaattgtaatgtgtttgttcgttagcaatagtaaatacaatcttcaactctcttcttcacccttccgatttgaatattgaacagtttcttacttgtttccatttggcttcacttcttttttggtcagcttttaagaaaactacatcatcaatttgaccagattgcttagcaataacttgattttaaaatagatataagatacattgtgaaaaaaataaaaaggatacaaaaccaaaaacgctccgatgccgggaatcgaacccgggtctcctgggtgaaagccagatatcctaaccgctggacgacatcggatttgttgttgggtattgactgtgataatatttaatacaatacatgtgttattaaattaaagctgtttcttcgcccaaaagccaaactctgtttcctatttatgtcttctgagatctctcgtagactcttacagtgattaactcaggctgctaagggagatggcaacggcgatggcggaggatacgagcttcgagggagaccaactagcttccatgactactgatgacatcggtagagcttctcgtctcttagccaacgagattcgcatcctcaaggtcaccaccctctctctcttctctctatatttttaatctgctggctacttggaactagtatatttcttcattccaagctcactattaccttaatttgattagcgacactttgattagttttgaagaagatggatgatgtctgagagcaacgataactcttgtttcatatcacactttttatcagtcaaagatatcgaaattcactcaaagtacttgtttttatagttagataattatagaatatgattagaagacatttatatttactggtcttttgctcattggatgaaattcaccagaattttttgatgtctttttctctcaaatacgttgatttgttgtaggaagaatcgcagaggacaaaccttgatttggaatcagtgaaggagaaaataaaggagaaccaggagaagattaagcttaacaaacagcttccttacttagttggcaatatcgttgaggtactttcactgactcttctcttggggtgtttcacattccttatatggggcttttggttttggtatgtataacattcctttttgttgagtgacacaattgtactatgcttttgattactagtagtgttagcctgatgaattccttgaatctttgccacagtagttcagacattttaccatcaaatttttttttgtgtaatgatggaattaggatttgatctattatccgtgctttctagattcttgagatgagtccagaggatgatgcagaggaagatggagcgaatatcgatctggactctcagaggaagggaaagtgtgtcgttctaaaaacatcaactcgtcaggtgaagttttagactcttatatcaccgttagagagattttcagaactagtggggaacaaactctgactactagtgtagtgtttgtataatgatctcatgggttaattatacttttcagaccatcttcctccctgttgttggacttgttgatccagatacattgaagcctggggacttagttggagttaacaaagatagttacttgattctggatactttaccttctgagtatgattcaagagtaaaagcaatggaggtcgacgaaaaacctactgaagactacaatgatatagggggactagaaaaacaggctagttgatgactctcctgtttcatgtttccttagtttttagtatctctggtacaatatttgatgttggtgactctcctgtttttgtaattaaacagatacaagaacttgttgaagccattgtgttgccaatgactcataaagagcagttcgaaaagttgggtatccgtccaccaaaaggtgtactcttgtatggtcctcctggaaccggaaagacgttgatggcccgagcttgtgcagcacagacaaatgcaactttcctcaaactagcagggccacaacttgttcaggtatgaaaactagagtaaacgtaactgattttgatcttgttcctgtgatattttttgaaccaaacggaaagtaactttttttagacttatgtatagatgttcatcggagatggagcaaaacttgtccgtgatgctttcctgcttgcaaaagagaaatccccttgtattatattcatagatgagattgacgcaatagggacaaagcgttttgataggtactctatctagagtcatgtcataactattttattttctttctgatgactaatgctgacttttaattggcttacagcgaagttagtggagaccgtgaggtacaaaggacaatgttggagctgctcaaccagcttgatggattcagcagcgatgatcgcattaaggttgttacccctcatattacccctgcaaatgtctatttatttagtgaaaggcatgaaaaactcataattttacaaacttaggttattgcagcgacaaatcgtgctgatatactagatcctgcccttatgcgttctggtcgtttggatcgtaaaatcgagtttccgcaccccactgaagaagctagaggcaggatcttacaggttctgtatcctttactgcatcttttcttttttctttctttatttctatgtcgttttaaagctaaaattagagagcttcatgcacttagacaagtcttgctgtgattttctatgtattccgcggataacttatcttgggtactgttttgtttttgcataatgttggcgatggggttacagatacattcaaggaaaatgaatgtgaatgcagacgtcaattttgaagagcttgctcggtcaacggatgatttcaatggagctcaactcaaagcagtgtgtgttgaagcgggtatgcttgccctgcgccgggatgcaactgaggtatgcatatatctttcgtcttagtggttgtaactttaggatgtggatgatatggaggaaatggtaaatgtgtgtgcaggtgaaccatgaggatttcaatgaaggtataattcaagtacaagccaagaagaaagcaagcttgaattactacgcctaagtcctcttttatgtacactcttctttctcctctttacattatagaaaacttcaagttgtagtctcaacttttgaatctagaaccccttcaaagtgtggttataattataatagatatcagcttgacatattttgcttattattttctaatgatggtctgatggatgaatagaatcgaaactagaaattttccttgtggaactcaaacttggtcgtagttttcctagagaaatcttgagccagtctctttaactctcctatgatgcatgtattaccacagtagaaaacccctaccaacaaaatagaaaaaggaaaatcagttacttactagaaagattctacaatagctatggaattgttgtaatagctagtgacataccaactcgttgattgacgtggttgactgcgacgtgcttgaagacactacgccaattgggtcgagcgaaatgggttcggacccgagtgcccgatacgatgtcaatgccgctcttggcgtggtgcaatgactgcaacatggtgattagtgctgacctcgcatctccttcctcatacacgctagtgcagtaattatgtagttcaatcatcccctcactatcatactcagctacctcgttcatgacctcactgaaccattccaatgatccttgctctcttgttacccaataaaaataagctcgttttgtggcaacatagttttttatgtgttggttagtgcctcgttcgatggaattctggttcttgatgttgttaaggacgtccctgattatgctgattaatggcgtcgctccgatccctagacctactagaagcaatacatcgtagttccggtaatcttgtgcgggtgcaccatatggaccatcgattaacagcctcggaaacctttccatgtaaaattcattagaaaaattgctcatgtttttaaatcatgattactcaaattataaatcaaaaactgtacctggttatattgttggcttgacctatgtcagctatgaagagcccactttgacttgttgagggaagttgacaaacctatggttttgtaattaaacaaatcaagtacatatatcattaattcacaaatgttactcttgaaaaatagtaaccttggaatataaggatttgagttgcgatgtccagtctccgagtgtgcggatatgaacgctgaggtaatcatccccggaagccgaagtaattgaaaacggatgcctacacaaaattgaaaataggttaataataaagttaaaatcttatgcttgtacaagttcagtggcattgtattgttgatataccattgtaatggtgagacgtcagaacagttaatatatatgtactgtccacttgtgtacttgaaacctttaggcttcgacatgtaaagtgaaagtacatttcctggatatactgccacctgaaaatcagtttgatgtcaatagaaattaaaaaagtgaaatatatccttgatttttgtctataataacaagaatgcatgtatattattgtgaacagatcatagaaataccttcaaaaccttgacagccttggcacctggtctaaatgcacgaatcaatcgttcaaatgcatatagtagtacgggaactgccagatacatccacgtctgtccaaaggtaataataacaaaggatgctttcatcaacaaaaattatcatatgatcttttcgtctgattttctgaacactccgtgattaatcaagacgcaagaaaaaatatatgtatacgtaccgtcttgtggtaccattcctttgagagataaacaaaatagccatgcacgatgagaagaacataaacgatgacaaacaaatggtgtgagtaccaaaatgcgttgaaaccagtcaatcgtttcaacgattttggtaggtttgcccggtttcgtctgaaccacgactgcgccaagacgtaggccactaacataagaaccaccatggtaacaccggtccacccgtctgtccctttcatgaaccatccataattttcaggcctctcgtctccgaaaaactttttcattggctcaaactctacattttttgcatgcagcaaacgcgggaaatcacatgccaggtgagatatagcgtgcaagcctattccaaccgcgatcccaaatgcaacaacctgcatggacataaagattaagcataaccaaattatattgttacaaaagtcgtatatctttttgtattcttctacaacaacaaaaaaaacatggattattggacaatgaaaattatataatgtgtatagatatgatatatattaatatacataatttaccttgtggaaattgatattgtcatcaaatggaacaacagacccaataagcttggacttggtccttagccaagtgatagtgttcctacaaacgggcaagagaatgagagccatgttgaatttcaaggtctctgcactgcctttggccacggtaacacagtagcccatcacctcgaacacggttttgcgtttatactggagaaatttccaagtgaagagagtgatgcaaatggatatccacaatgttaacacccaaatccttttccaattttccaagaagaagtatgatatattcatagcaaatcttttcaccgggtttcgatcttttgttggtatgagcttctggctcaacatcttgttgagtgcacgtttgttcgcggaagatggactgttatttgattggctaggaacttggagaagcaatgtttccaagttatgtaactgcaagtaaaccattgctcaactatattttcaaacacattgaaatatataacaaatacatttacaactgattttaaggatttaaccatgtttttaatagtgatgttaaacaagtgtaaccattagatagtagacaacgaacctcaatatatccgaggttgtcgcgatctagttcttccatgatcaaggcagcatattcatctacattttctttaatctttgatagcttgttagccgaagcacttaaagcaattatctataattcagccgaaacaacttagattgtaacatttttatattaggaccataacgaaattgagatcaatttaataaggtatacctcacctccttaacctcatctcctgtaatacgtccgtccaaatttttgtccacccttatatacataaacacaaagagataactaatcaacttaccatattttatgacaaatgataatcatgcattatacttgtcaaaatactataaataaatataaaatcatgcttacatatcaaaaaagatttgcagcctatcatcaaaactattgcctgtgatctgctcccagaattcaaacaattcagttttggtgattgacgatgacgtagtccctctccttcggaccaacgcctcaaaaagctcgttcacaaattcgctagattcaaccattcctatttagttgaaataattcttttaaaattcagttaaaaaaaaagtaataaaaaaacaaaactgtatatgagaaacaagttgagtattgcagtgaaattacagagagaaaaaaatgaaaccaaaaaaggtatattatttaaagtttttttgtttacctatgcaatgtccaaatttggatttagggagtttcccttcaacggccaacttatcaaacctcattgcaacctcatcccagcctctaccaacggcgtcgtttttggcaatgaacctcaaccctcgaagagcaaacatagcaccgaacgacttactacggtcgagccggcgtgaagcaaacgatagcgacttaaccatcgttttcagcctcccggaaagaaccgaacgaagtgtcgccttggccttcattgtgttgatggtttcgtctcgcacttcgagtgtgatctcgacgtagtcctcatcaggattgtctgaaccagtggctttgcatcgggaaatcttgtttgtctcaccttctgacgaagattccatttcttcctcccgcattcactacaattacattattcacgctgttttgtatactatgtaatttatataatgtcaaaaaagacggattataatgcccatattacccttctaacaaaaaataaaataaaataataatatccatattaccctttgacaatttcgagtataccatatgaattataacttagtattaaaatattgatttactccaacgacatattttaaaaatcaaatgatatatggtcaattatttagttttgaaagtgaattaatattagaagccaaaaacctagggccgccattagggttggtttgcctgttttgttgttatccaatatccaattcttattgtgcattgattccaatacaaatacaacactgagagtaattagaaaatggcatatttcttatatatatgtctgcgtgataaataaatggagtggttaagcattagtcatgttcttccaaatattacacctcaccgcatatgcagtagttttggcattacactaattcattaataacaaaagaaattatccttatgtaaattatgacgcaaatctttttattttattaatcggtacacgaaaaaaatcttttaataattcatgcatgtgataaaaacattgttaataatttaattttgattataatgataattgttttggataactatacatacatacgaagaagtcgtaaaacctttgaaagattttgcgatgacgatttaatgtcacgtgtctgcttgtgattgggtactttacgtgtgtaaaaagtaaggagcgcgccaacacaaaataacccattaagcttacgtgtcaagaagtgattggagaggacactctaccgaggctaaatacgaatcatactgaagcacatataaatagacgacgaacttcatactcttccaaataaactaacaaacgagatcgaagaagagttctcaacaacgaaaaatgatttttatcaaggaaaacacagcgaagatgacgaggaacaaagctattgcgtgtttggtttttctgactggtaaaattctcataaaacacacattttttggaatttgacgtttctcctatttatgctatagtgcttgattttttaatgaatattggagcagctttgatgtcaagtttggcaatagaaggcgaagagcagaaactggggacggtgatagggatcgatctagggactacatattcatgtgttggtgtctatcataacaaacatgtggaaatcatagcaaacgatcaaggaaacagaattacaccatcttgggttgcatttactgataccgaacgtctcatcggggaagctgctaagaatcaagcagccaagaacccggagcgaaccatcttcgacccgaaacgtctgattggaagaaagtaagtgtttagtaattagtgtcatagtgtctgtctagtccatatataatatatcttgagctttttgtttatgttttttgggtgttgtgttacagatttgatgatcctgatgtacaaagggatatcaaattcttgccatacaaggttgtgaacaaagatgggaagccttacattcaagtgaaggttaaaggtgaagagaaattgtttagccctgaggaaataagtgctatgatactaaccaagatgaaagaaacagctgaagctttcttgggaaagaagattaaagatgctgtgatcacggttccaggtatgtgttaatatactttaaacggatacggattagtctattcagaagtttttgagaagaaaccaaaacaccagtccgcaacggtttagtctgtttaaagtataagtgtgtagcaccttgaatgtattgataatgagaatgcttgtcttgcttcttggttgttttgtagcgtatttcaatgatgcgcagaggcaagccacaaaggatgcaggggcaatcgcggggcttaacgtggttcgtataatcaatgagccaacgggtgctgccatagcttatggtttagacaaaaaaggtggggagtcaaacattctcgtatatgatcttggtggtggaacattcgatgttagtatccttaccatagacaatggagtctttgaagtcttatccacaagtggagacactcaccttggtggagaagattttgaccacagagtgatggactatttcatcaaacttgtcaagaagaagtataacaaagacattagcaaggatcacaaagcccttggtaaacttaggcgtgaatgtgagcttgcgaaacgatctttgagcaaccagcaccaagtccgtgttgagattgagtcgctctttgatggagttgatttctctgagcctttaacgagagcaagattcgaggaactcaacatggatttgttcaagaagactatggagccagtgaagaaggctcttaaagatgcgggtttgaagaaatctgatatcgacgagattgttcttgttggaggaagcactcgaatcccaaaagttcagcagatgttaaaggatttcttcgacggcaaggaacccagcaaagggactaaccctgatgaggctgtggcctatggcgccgcggtccaaggtggagtattaagtggtgaaggtggagaagaaacacaaagtaagtgactcttttaactctctttatgacaatagttgcgaagtgtttttatcattgtagttgagttgcagaaaacttaactttattgaaaacagatattctactgcttgatgttgcgcctttgagtctcggtattgaaactgtcggaggcgtgatgacaaacattattccgaggaacacggtgatcccaacgaagaagtctcaggtgttcactacttaccaagatcagcaaactactgtgactatcaacgtctacgaaggcgagagaagcatgacgaaagataaccgcgagcttggaaaattcgatctcacaggcattcttcctgcacccaggtaaactttaagtcaatcttagctactaacacatttcggttttagttctgtttttggtttacttatgatacaagaaaccaatatttcaggggagtgccacagattgaggtgactttcgaagtggacgcaaatgggatcctgcaggtgaaagctgaagacaaagttgctaagacgtcacaatcgattacaataacgaacgataaaggtcgtttgacagaagaagagattgaggaaatgatcagagaagcagaggagtttgctgaggaagataagattatgaaggagaagattgatgcgaggaacaagcttgaaacgtatgtgtacaacatgaaaagtacagtggccgataaggagaagcttgcgaagaagataagtgatgaagataaagagaagatggaaggggttttgaaggaggctttggagtggttagaagagaatgtgaatgcagagaaggaagattatgatgagaaactgaaggaggtggagttggtttgtgacccggttattaagtcggtttacgagaaaaccgagggagagaatgaggacacgatggagatgatcacgatgagttatagaatcgtataattgaaggtcttttgagtcggttagctataggatttgcagctgttggttatttcatttttttcctgtaaaaaagaatggtgttgagctattttttataagaacaatgttccttttgtcatccctaattccctacaaaactatgtatggtacgcaggctttaactttaactaagctcaaagtaatcggaagcttttaacaattagtacaattatgtttagttgtttacaccttttgtgatgtacattatgcttagacaaattatatggaacttttctatggcatggctaatgcttaataaaggtgacaaagtcaacactatatttccaatgtttcattgcattctattcaacagccagagattggaaatatcataatgttacattcattagaagaaaataagtaaccggagacataaacacaagataaaacttgatctctcacgttcttcacatgattcatcaaacgaaaaacattagagcaattatcctaagaaattaaaacttgataacacagcaatcagaaatcgaaaccacccatgtcacccatgtcacccatgtcacccatatcagcgatgtcagaaaccgcttcaccaaccaacaacccacccaataaaccagctccaagcccaagtcctagtcccattccagctccagccttaccatgcttcttcggtttctgcggtttaccatgagcttgctgttgcgggtaaccgtatggaccctgtggtggataaccttgttgcgggtaaccatatggaccctgtggcggataacccgggtatccaccctgttgctgaggcggatatccagggtaacctccctgttgtgggtatgcaccaggtggcggataaccaccggttccagctggatatccagcctgctgcgggtatccataaacaccatcgtgcttatcgtcatgtccttgtggtggatatccggaagaaggacccgcgggaggagcagggtatgcagacggtgcaccgtgtccgggcgggtaagcggtgacgggctgatccatagtcttatgatccatagccgaagggaccggcgcgtgaggaccactcgaagatccataagtatacttttccccaaatttgaacgagaatttgagagatcctttcgccttcccgttaggcaacctcacggcgtaagtaaccgttttctcctcgtcacctttattctgatccaaaagctccttcaccggaacgctaacctcaccgacaggtttatcaccagcgatgggacgatccgccacgatctcgaaaacaagagtaagacgattgtcacgcgccgctgcgtcatcgacggtgagcttcatttgatgcttccatttaggtttggtgccgcaatctttatcaacctttgtcttctgcttcgtcctagcgtcgccgttgatggaaacgacggcgtacaagtcttgtttaccgatcaattgaacgtctttgagatcctccgcagatataatcgtcagatccaatgatctacactccatggttactcggatcgaaattgaatgaaataaacttgaaatttgctctgagaatgttttttatgatgaggaaaagaaaagtggagagggcaaaggatatatatgcatttatgataaagtcggtttaaggaacaaagagttttttttttacacacgggagggacacgcacgagattttttttgttaaggacgcggtttctttaaatgcaaatagcttttttccttctaatattagtttcttcttatctgaagtttaattatcttgctgtttttagtaaattattatttgaccatggttcaaataataaactcatgtgtatctaagagtttagtgataatggcaatgtaaacgttcaaagatatggaaattataaacgttttaaagaatgtctcaaatgataagaccatgatcaattcggtgttctccgtaagcctggttacttgacaacgtaatcaggtacgtaaaataggacaaagacacgccggagagttagacttattattgtttgatgttgatatcatgatatgtagtaatcatatcgcattttactctgctaggattggatatgatcaacatcactaacatattcgaaaaagaatatcaagtggacgagtacgaattctacaactttaccattcgaaagtttaccgtaaactctaaatgaaaatgttttaataaatttacattgaattacagtttaacaaaaccaactaatggtggtatatatgatggtaattagttgaagattagttgtcttcggaaaaaagttactaacttaaaacttggaaccatgcatgtattgcgataatgaatgagcatataaggtggaatcttttgaaatgtagaataatctcaagcatctttcttggtttcttcttcagtagtcaagagcaatacgcgtggaataacccatacgttttctatttttgcttattctcgaaggcgattggttctcattttctcgatcgaatcatccttttaattcaacgatagcctcacgtcgcgtggtcctgacgcactatccatattctttgccactttattctccttcacggaacatttaagttaaacgcaaatatacacgttagtccatatattggaggagaccatattcacaaattttgatatataacacaaaaaaagtttacctgatttttcttctagtacttgatctcatcactcaactacttgcaagtcttgaaactaatcatcaactcaccattcagaatttgtttagcaaaaaaatcactcaatgataactaaaaacccaacaaacatacacgatcatatttcaaacgacaccattgccaatgacttaaaagtttttgaccaatgaaaattttagcgttgagtattttgaatcacgttcagttgctcatcgttattttcagtaactacaaaatgaacacaatttaatcgttagtcgctgaaaattagaaaacgaatatgacatagtcattaatgttaattaccattagcaaatacgaaatgaacataatttacattagaaccaaataattctttctatgaaactatccgaaatccaaattccggatgcattacaagtcaacaggtttagaatcaaattactgtaaaacaaccttatcaaggacttttttttttgtgtttcatcaattggtaagtttactttaataaaattgcaatattaatatatttatatataattctttgacaacatatcaaaatattttaaatttgaaatttgtatacatatttcccttaacttttgtttgtttatatccatatttggtaactgtacaatggggatccacttttgaatcaaaaaacaccacactgaaacaaaaataaagaaaagaagaaaaacaagtgaacccatatccatgttctgtctgaatccgagtttacttcttcttagttacagaggaggaaaaaaggaaaacctaagcggaaagggaatatccaaaaaaaaaaaaaaaaaaaaaagacagaagtataagaaaagtatcctgaacatgataggtctctctcccatctataacctctgcaatttctctcgaccaaaaccctaatttcaggtttggggttttccttctttcactgtaagtacgagcaattattttcatatatatatgtacctatatatatatacacacttatatacttgttgatgagcctctcgaattccccaatcttaaacactcttcttcaattctacgttcgattttagcgatttcggagttctcttcttctgtcttcgaatttgtacgcacttattagttctatacatatatcgatcgatatagcatgtgtttctagagctcttaggttcagtgattgatcatgtgtgtgtgtgtgttcgttgaattgggggatttaacgggttttgcttacaaatattggattttgggattgtaatttggttgatctctctctcaaattcgagcaggagtgtataagctaccaatttagttttctttccctttagtgagtgctcaatttctgattttagtttgaaaatctagtgttttgacaatgcaggtcaattttgatgaaacttgtgattcagtgattagaatgaatgctaatgagcaaactcgatccgccaatggcattggcaatggcaatggtgagtctattcccgggattccagatgacttacggtgcaagagatcggatggtaaacagtggagatgcactgcaatgtccatggctgataagactgtttgtgagaagcactacatccaagcaaagaagcgggcggctaattctgctttcagggcgaaccagaagaaagcgaaaaggcgatcatcgttaggcgaaacagatacgtattcggaagggaagatggatgatttcgagttaccagtcaccagcattgaccactataataacggtcttgcctctgcttccaagagtaatggtagactagagaagagacataataaaagcctgatgcggtactcgcccgagacaccgatgatgaggagtttctctccacgtgttgcagtggatttgaatgatgacttgggtagagatgttgtaatgtttgaagagggctacagatcttataggacaccaccatctgttgctgttatggatccgacacgaaacagatcacaccaaagcaccagtcctatggtaagtttcttgtttctcattggttagacaaagaacttgtacacccatatgtgtttgtttgcttataaggattaaaagtaactggttttctgtgttgtaggaatactcagcagcaagcacagatgtgtctgcagagtctttgggggaaatctgccatcaatgccagagaaaagatagagagagaatcatttcttgcctcaaatgcaatcaaagagccttctgccacaattgtctatcggcaaggtgtgctttcttttcttttcattctgtttatatcagaattctataaacctttggtagaaagagttcgcggtactaatgatgtctcatgcattttaaggtactcggagatatcacttgaagaagtcgagaaagtttgccctgcatgtcgtggcttgtgtgattgcaaatcttgcctgcgttcagataatacaataaaggtgtggtctcgtgttatcataaagattcaaaccagtgctacctattttggggtttgaaatttaggaccatgagatgattatgactctttgtgaaaaattgcaggttcggatccgggaaatacccgttttggacaagttgcagtatctttatcgtctattatcagctgtcctaccagtcataaagcagatccatcttgaacaatgtatggaagttgaactagagaagaggcttcgtggtgagacgagtttttgtttacagtgactattgatgaattatatatactcgtaacattttttgcggttaacactagtttgttctactctatagaagttgagattgatcttgtcagggcaagattgaaagcagatgagcagatgtgctggtacttgtgatctatcttacatgcctttcttcttttgacttagtactgcaactatttcttgttggcactttgtattatcgtacatgactgaagttttgtttcttgcagcaacgtgtgtcggataccagttgttgactactaccgtcactgtccgaactgctcatatgacctttgcctgagatgctgtcaagatctacgggaagagtcttcagtgacgattagtgggactaaccaaaacgtacaagatagaaaaggagctcccaaactaaaactaaacttttcatacaagtttcctgagtgggaagccaacggtgatgggagcatcccttgccctcctaaggagtatggaggctgcggttcacattctttgaatcttgcccgcattttcaagatgaattgggttgcaaagcttgtgaaaaatgctgaggagattgttagtggctgcaaattatctgatcttctgaaccctgatatgtgtgattcaagattctgcaaatttgctgagagagaagagagcggtgacaactacgtgtacagcccgtcgcttgaaacgattaaaactgatggagtagctaagtttgagcaacaatgggcagagggtcggcttgttactgtgaaaatggtacttgatgactcatcttgctctagatgggatcctgagactatttggagggatatagacgagctttcggacgagaaactgagagaacatgatccattcttgaaggccattaattgcttggatggtttagaggtacatttcttcttatcttcttatcttcttcatattgtgaagtcacagattcagtaatgttcataacttgattcacaggttgatgtaagacttggggagtttacaagagcatataaagatggaaagaaccaagagacaggtcttccgctattgtggaagttaaaggactggccgagcccaagtgcttccgaggagttcattttctaccaaagacctgagtttatcagaagttttccgtttctcgagtacattcatccccggttaggccttctgaatgttgcagccaagttacctcattactcgctccaaaacgattcaggtccaaagatttatgtgtcttgtgggacgtaccaagaaatcagtgctggcgattcattgactggtattcactacaacatgcgtgacatggtacattactcagctcttggattataagtgatcacatttgtcttattttggttgataagggaaactggttatatgttaggtcaactgagattattgttaaaatatataatgattgagtcgttgaaactgttaatcaggtatacctattggtgcacacgtctgaagaaacaacattcgaaagggtgagaaaaacaaaacctgttccagaggaacctgaccagaagatgagcgaaaatgagtcacttcttagccctgagcagaaattaagggacggagagttacatgatctatcacttggtgaagccagtatggagaagaatgaacctgagttggcgttgactgtgaatccagagaacttaacggaaaacggtgacaacatggaatcttcttgcacatcttcatgtgcaggaggagcccagtgggatgtctttcgacgccaagacgtcccaaagttgtccgggtatttgcagagaacattccagaagcctgataatatccagactgattttgtaagccgtacctgctaattcaaataaatgaagtgtgtaaagtcttgtatgtggaatgattgagtttcctagtttgtttactctggtttcaggtgtcacgcccgttgtatgaaggattgttcttaaatgaacaccacaagagacaactaagagacgagtttggtaggaaaaacaaacattctattccctattctatttccaaacacttaatcgcttggaaacctgagggatgactcttgctattgtttcaggagttgagccatggacatttgagcaacatcgtggtgaggctatcttcattccggctggatgtccgttccaaatcactaatcttcaggtaaatttatttcgttgcaacattattccattaagtttcttttcccttgagctaaactaaacttttttcccatgtatacaattctcagtcgaatattcaggtggcacttgacttcttgtgccctgaaagcgttggagagtcagcaagactagctgaagaaatccggtgtttaccaaacgaccacgaggcaaaacttcagattctagaggtaacaaatctttgattctgccttcccttagaacaaaccattaaccatctcagtgccttcacttctaactcttggaaatggtttgggttcttaacatcagattggaaagatatcattatacgcagctagctcagccattaaagaggttcagaaactggtcttggatccaaagtaagtaaaaaagtattgacaccaaagctaatataaagagtatgaagtgaatttgaactgacaatttttgaaatttggttccttcgttatggctgcaaaaggtttggagcagagcttggatttgaagactctaacttaaccaaagcagtctctcacaacttagacgaggcaaccaagcggccgcagcaaaacagctgcacttaaatcagtcaagatttgtatagtagtataaaaatcattgttgtgactttagtttagacgactactactactattcaggatttgtaatgtatctatgactgtgtatatcatgcttcatatagtatattcataaccatcattattccacataattttttctactactagaccatatgaaagttacttcaacgaactcctaagcaaaccaataatagaaacattacttctgtctaataatggaagtaataagaataacaaaggaataaaaccctttgtgttaatatcgctcttctgtacacacttattcttcagcatacagccaggccaatcttctcacatcccgcgatcaaaactttcagacttaagtccgttgagctccttagccacgcctgaatggaagcttcaatacaatcggtggaagtttacggtattcagttagaaccggccttgactcctgtacttgatccagagccttactctcagttcttgcttcattgagaagatagctaggctttgaatcctctatttgatccaagggcttacttgttggtgatttctttgtaaaactgcttctatcttctcctctgtgctccaagtctgcactcccatttctgttacatgctttagctgagcgctttttcttcgttgaactttcatgttttctcggttctggtttagttgtgcttttcattctcttggttataagaaagtcggattccagagcttccagagcccgagtggtcaatggtcgctttcttgtgctctgtcttctaggaccatctgtcttaatttgttggttgtgttgttgttcagatgaacccatttcttgagaagttcccagatcattggaaggagatctattgtttgagcctgaaatggaaggaagctcaaatacttgtttttgttccagatcactggaagctcgttttttgtccaactctgacactgaacagatcccatttgtttttggttctgccgaaatgagttcatgggcagttcttattttctctggtgaacagttcttgtcgacaccagtgttggaatttaatccgcttggttcaatcgctgtcgtttcttgaatctcaacaagcgaagaagatagcccagttccagtcttttttgattgatcagactttaagttcatatgctcaaccaacggcacaatctctttgtcctgattcatctcttcacaagtgctagtttgttgttggaccacacatatactttgctgctctgattcaagacaaatagtcatttttgtgtcattatcacctggtaaatgtttggacactggactctctctggaaatgcaagcactgagccgtctgcgtttcaaatatggtgcagaatctacagcataataattagtttctgctcgaggggtagaccgaggcttaataaccctctttgatggatccttagccttctctaaagtcttctcttcctttataccagaatcagcccctacatgaccccttcttgtgtcatcacttggtaaacatctccatctcctaaacccagataatttttcgcagtggtccacactcgtatcaacaatcgtgaaccgcattgggtcatccacatggttcttggcatccagaggcctcacttgagacttttccacattctgactgtccagagaatttttaagcacagaagaatctttagcttctagacgagcctttggctcagaaactactaaacactctgcattcagattccgtaaatcacacaactttcctccagtagccaaactagtgtccacaacagtgaatttcattcccagagttccacggttagaacatggagacctgaggtaacggtgtcttagactatcagacggggaagactcttcatctgactggtcagaaggattctctgcagccactcctcctgtttcattctcaagaagttcaggctctgacacaacctttgttagaatatcactgacggaatcaaagtaatgatctcctttgacaagctcttgtcttgaaaactttttcacgccagggacaatgaaaacaatgtagtccttagatttgaaatagcctcggtcctcgggctgctgtgaacgccatcctctggctagcaaacgcggccatacagcgccccagaatatatcattgcaacgggctttgctcagacgagaacagccagttaactgatttattatgccagccgatgtgagggaattgtaatccccttctccagggaccaaagaagattttgaagaaacagtgaaccatggtttggtcttcattggggttgatgtaggaaccgtgagatcttctttttctttaccaatcgccacagcgtctaccagaagcctgagacccacaagattcttcactgcgcttacgtatttctctagagtgatagtaccttcagcaaatgactttgagacctgcgaatagtaagatcaatgaaaaaacatatatacagtggtaaagcattccgcattaggatgtgaaagagactcacatccacaagcatctgtttctgaggttcatcaggaatagaaggcatcaaacgggttaacaactgttgttgcctccaacctgaatagagctttcttccatatacacatttgcggttgcgcttctttcgggattcagaccaagtgtggtactttgcagaattgtagaacttcccatagtaaaacaacatgatctctcctattcctttgttctccatgaaattattcatctgagtaaagttcttcccaaatgtgtacagaccaagaacaaagctagcaacctccaaatcgtcccaagaactggaaggtatcgcaggaacagcctcaagattcagtctttgcttcttggtttccgaattcttgtcactctttcctctgatcttggcagagcaacggccttttttagctcttaaagatttcaaagattggttcatgtcaacattgccatctccatttccttgtcctattccaactttgtctatccacattacttggacaggtagaccgacgagaaaagaacatgtagaatcatccaaagcaacaggattggaaagaaacacagcgcgcttggatgcagacatcataagaggaatgtcgacctgaaattcatctccaacacgaggctcaacttgtggatctccgcagggaaactcgtcatcataggagtcttcttcgataacagctgttgtttcttccataagattattttccccatccatcagaagaaccatcctcaacgtagtgaaacctgaacaagcaaaaaagaactgcattttcaacatcattggatctcaaacctgaaaatgtaaactttcaagaacccaaaaatgtggtaaactcagaatgtaataaatcaaacagcaaaggcaaatcagtcctactttcctggcaaacaagatctaactactaagaagcaaaaacacaaagataaaagacccaacttcgaaattcactaccctaagtatgaaagatacaaacaaaccgcaaggagctcaaataaatacattgtccagagcaacacgacgggctaaagtataaagctcagatatttaagaccacggtaccaaactgaagattcaactacctcagatcgtgaaagaagttgttgagggataataccaaatacattcgattcaatcaaaagacttgatcattgaaacaaacacagacacgggaattaaagcagagtccacaaaagcacgaagacgaggacaaagataaaatctagtgttttcagagccaaattccgtagaaccactgacccagattcataatcagacctgatcaaagcaaagcccataagcatcgatcccaaacatgaacaggttgtatgtaattctcaatgatctcgtacaggattaacccaaaggacgaacatatgacaatggtatgcaagaaaagcaggaaaagtcgaaatctttacgcaagagacaaaaacgtggaaacacaaattctaaaacaaaagcatctccgattgttagttctctcgatatctagacatagagcagtagcgttgcgagacaagaaaccccagaaagaggaaagcaaacccgaaaacatgaattgccaaacacggcaaaaggagatagatttgataacctgagttagtttatgagatgtctcaactttgcaatgttagagattgtggcactgtgggaatctggagttggcaacaggaacaaagacaacgaagaattgttcgtgtttgtggatagagagaaagagcactggtcgctctttcaacacgaagtcttcgagaggagaatgaggcacataaaaggagagcaaaatatgagagagtcgcaatataaagatctttttttttctttctatatgcacactttggagattttcattggctattttaagggtttattagagtgtttttattgttttcaattcttaagtgttcaatgttaagaaatattctaaagtcgtggacgtgttttgtgttctcctcattattccattcgatgtgctactactaggttttttttcttttctttttacgctaattgatgatatagtttcatgctaaatttcaatcaatattaacataatatgatgtttaaaaaggttataaaagatttacactattatttaatatatattcaaactatttaagggaaacttcgctaaatggaaatgttcgtaattgtagtcaaataattttaaattttgctaaattactatataatcatataatgtaaccaatcagtttatgatgaacttatctcattttttgatgaactctcgtatgatgtaaatataaatccatattagattttttttataaaaaaaactagcgtcatgtttaaattatataggtagcagtaaaaccatccaaaattacataggtactaaaaaccatcaacttttttactatttcataataactatataaactatagatcactcaatttagtttagtttctttaatttgaagtgctgtattttttataatttcagtttttttttttttttttgagcaaagatacttttagttttcttttgccaaaatacttacttcgaaaaagtgtaagataaataaagcaagtagttcaccttaagccaaggtaaacaacagtcgatggatttcgtggcttcaaagttcataatgggctaaaaatagaaggacccatggacgtagaaaaactgaaacaaacttatatatatcagaaaacagaaagcccataaggccatcaaatcaggtcgtctgtcttcttctttctttttgatcatgcatgtggtcttcattacttgaaagactgaaaacatgttcagtcaaatgaaagttagtaatctcataattaaacgtttgtaaaactgtatcaaaccatttgccaaataatgttttagtaaaaaataaacaaatttgatcgtcccaatctttgactcagccggcttgtaataaattaaacaaactttgttgaaaaaattggttttttgatatcagatgggaaagatagcttctaacgcagctagctcagccttcatagaggttcagaatctggtcttggatccaaagtaagccaaaactaatctaaagagtgtgaaatgaatttgaactgacaatttggttcctatgttatttggctgcaaaagatttggagcagggcttggttttgaggactctaacttaaccaaagccgtctctcacaagtcacaacttaaacaagcgaccgcagcaaatgagctgcacataaatcagtcaagatttgtatagtagtttaaaaatcattctcgtgactttagtttatactactactatctactactattcgggaggatttgtatgtatctagatcgactctttgtatatcatgcttggttatattcataacaatcattatttcaacttcatatttctgaataatagaccatatgaaaagctacttcaaataactccaaagcaaaccaataatagaaacattacttctgcctaattatggaaataataagcataaaagaggaataaaaaatcctttgtgtaaaacatttctcttctgtacacatttatgcttcaggaagaccaatcttctcacatccagcgatcaaaactttcagacttaagtccaatcttctccttagccacgcctgaacggaagcttcaatacaatcgggggaagcttacggtattcagttaggaccggccttgactcctgtattctatctagagtcttactctcagttcttgcttcattgagaagatagcgaggctttgtatcctctatttgatccaagggcttacttgttggtgctttccatataaaaatgtttctatcttctcttctgtgctccaagtctgcactcccatttctgttacacgctttagctgagcgttttttcttcgttgaactttcacgctttctcggttctggtttagtcgtgcttttcattctcttggttgtaagaaagtcggattccatagcttccagagcccgagtggtcaatggtctctttcttgtgctctgtcttctaggaccatctgtattattctgttggccgtgttgttgttcagatgaacccagctcttgagtagttcccagatcattggaagaagatctattgtttaagcctgaaatggaaggaagctcaagtgcttgcttttgttccagatcattggaagctcgttttttgtccgactttgacactgaacaaagcccatttggtttttgttcatgggatgtacttattttctctggagaacagttcttgtctacaccagtgttggaatttaacccgcttggttcaatctctgtcgtttcttgaatctcaacaagcaaagatgatggcccagttccagtcttttttgattgatcagactttaatttcatatgctcaaccaacggcacagtctctttatcctgattcatctcttcacaagtgctagtttgttgttggaccacacatatactttgctgctctgattcaagacaaacagtcatttttgtgtcatcatcacctggtatatgtttggacactggactttctctggaaatgcaagcactgagccgtctgcgtttcaaatatggtgcagaatttacagcatgataattagtttctgctcgaggggtagaccgatgcttaataaccctctttgatggatccttaaccttctccaaagtcttctcttcctttataccagaatcagcccctacatgacccctttttgtttcatcacttggtaaatatctccatctcctaaacccagatgatttttcgcagtggtctacactcgtatcaataatcgtgaatcgcattgggtcatccacttggttcttggcatccagaggcctcacttgcgacttttccacattctgactgtccagagaatttttaagcacaggagaatctttaacttctagacgaacgtttggctcagaaactactagacactctgcattcagattccgtaaatcacacaactttcctccagtagccaaactagtgtccacaacagtgaatttcattcccagagttccacggttagaacatggagacctgaggtaacggtgtcttagactatcagacgggacagactcttcatctgacttgtcagaagaaagctctgcagcaactcctcctgtttcattctcaagaagttcaggctctgacacaacctttgttagaatatcactgacggaatcaaagtagtgatctcctttgacaagctcctgtcttgaaaactttttcacgccagggacaatgaaaacaatgtaatccttagatttgaaatagccacggtcctctggctgctgtgaatgccatcctctggctagcaaacgcggccatacagcgccccagaatatatcattgcaacgggctttgctcagacgagaacagccagttaactgatttattatgccagccgatgtgagggaattgtaatccccttctccagggaccaaagaagattttgaagaaacagtgaaccatggtttggtcttcattggtgttgatgtaggaaccgtgagatcttctttttctttaccaatcgccacagcgtctaccagaagcctgagacccacaagattcttcactgcacttacgtatttctctagagtgatagtaccttcagcaaatgactttgagacctgcgaatagtaagatcaatgaaaaaacaaatatacagtggttaagcattccgcattaggatgtgaaagagactcacatccacaagtatctgtttctgaggttcatcaggaatagaaggcatcaaacgggttaacaattgttgttgcctccaacctgaatagagcgttcttccaaatacacatttgcggttgcgcttctttcgggattcagaccaactgtggtactttgcagaattgtagaacttcccatagtaaaacaacatgatctctcctattcctttgttctccatgaaattcttcacctgagtaaagttcttcccaaatgtatacagaccaagaacaaagctagccacctccaaatcttcccaagaactggacggtatcacaggaacagcctcaagattcgatctttgcttcttggtttccgaattcttgtcactctttcctctgatcttggcagagcaacggctttttttggctcttaaagacttcaaggactggttcatgtcaacattgtcatctccatttccttgccctcttctatgtttgtctatccacatgacttggacaggtagtccgatgagaaaagaatatgacgaatcatccaaagcaacaggagtcgaaagaaacacagcacgcttggttgcagacatcataggaggaatgtcgacctgaaattcatctccaacacgaggctcaacttgtggatctccgcagggaaactcatcatcataggaatcttcttcggtaacagctgttgtttcttccataagattattctcggcacccatcagaagaaccatcctcaacgtagtgaaacctgaacaagcacaaaagaactgcattttcaacatcataggaatctcaaactgctgaaaaaatgtaacctttcaagaacataaaaactgtgaacatcatctaaatcaaacagcaaagggaaatcaatcctagtttccttgcaaatagatactactaagaagcaaaaacacgaagataaaagacccaacttggaaattcactaccctaagtatgaacattgaaattaactatgaaagatacaaacaaaaccgcaaggagctcaaatacatacattgtacagagcaacacgacggggtaaagtaataaagctcagatatttaagatcacggtaccaaactgaagattcaactacctcagatcgtgaaagaagttgttgagggataccaaatacattcgattcaatcaaaagacttgatcattgaaacaaacacagacacaggaattaaagcaaaacccacaaaagcacgaagcctaggaaagagataaaatctagtattttcagagccaagttccgtagaacaactgacccagattcataatcagacctgatcaaagcaaaacccataggcatcgatcccgaacatgaaaaagttgtatgtaattctcaatgatctcgtaaaggattaaccaagagacgaacatatgacaatggtaagcaagaaaagcaggaaaagtcgaaatctttacgcaagagacaaaaacatggaacacacaaattctaaaacaaaagttgggtacttgatatcaaaagcatccccgattgttagttctctcgatttctagtaaagcagtagcgttgcgacacaagaaaccccagaaagaggaaagcaaacccgaaaacatgaattgccaaacacggcaaaaggagatagatttgataacctgagttagtttatgagatgtctcaactttgcaatgttagagattgtggcactttgagaatctggagttggcaacaggaacaaagacaacgaagaattgttcgtgtttgtggatagagagaaagagcactggtcgctctttcaacacgaagtcttcgagaggagaatgaggcacataaaaggagagaaatattatgagagagtcgcaatataaagatcttttttttttatatgcactttggagattttcattggctattttaagggttttattagagtgtttttattgttttcagttttaacttttaagtgttcaaagttataaaaaaaaaatatactttgaagttgtggacgtgttttgtgttctccattatttgattcggtgtgttactactaggtttttctttttctttttacgataattgatgatatcgtttcatgctacaatttcaatcaatattaaaatgatataaatttttaagaaaacagttataatactttttaatgtgtatgatgaagagacccaagataatatatattgaactctcatatgctagactagaagtagaatttacatccaaaatatggcatacgatcaaacaatatgttgtacttttgccaaaataattcaaaaaagtgttggataaaacacttaaagccgaggtggatgaatggaagcctttaagccaaggttaaaaaaacagtcgatggacttcaaagttaatattgggctaaaaattgaaggacccattgacgaagaaaaagtgaaacaaacttaatatcagaaaacagaaagcccatatggttcttctatcatttcaaggcatgcaaaccgtaaaattgttttcagtttgggatccgacttggaatttggaaaagagaataataaacccaccaatacactatgaaatgagaataataaaatactccatgggttacaaaagacagcattggcgaattattaattatcatgtttaagcatacaatataattagcaagcaaaaaataggagaccgttaacaactttccaattgaagtgtgatgcaattgataaattaagggcaaaaagtgtgatgcttttcacaaagaaataaaactttacatacactttttttctaattggttgtgaatggttaagtcaactcagtttcgaagtatgtagaacatctttttaaatcgcataatccggtttttaattaatgacgtattctaggtttttttttttaagtgcgtatattctaagttcttacgtaaatatatgtctttaaaaagattataatgattagttaagcctctctataccatgaataaagtgcagaatgtaaaggaaatgctctaagaactccaaaaaaaaaaaaaaagaagaagaaggaaatgcctgaaactttccatctttccgttaatagactagcaagaactcgaacaaaatgtgtgttcacacatcttctacgatattttttcccaaacgaaaggtttatcattttccccaaaaattaggatacatattcgactagagacgttcacctacgatcaccaattcattaggaattcttgattatacaaaatattataaaatcattatatttagacaatccaaatccaaatccacaagatacaaaatcgtgatagtttgacgtttcataatgcctcatgtggcttacaatatgcttagggtttgaacccatatctaaaatgcacatgctcttagtatataaaccaatgacttggccaatatagacccattgaatatttgtattggttaacttctaacgacgaaatttctcaatattttgtttttagctattgccttttatatagatttggtgaatttttgcgcagtattgctaataattaaataagtatttatttttaaaacatattaaaaccaaaggtcaaatgcatgcgagtggccgtactggattatgcggattacgtgcctcgaatttcatattttctataatacaattaaggttttgacattccataagccaaccattgcttcatcaagaataatttcttttaccaaagtagctacgctctaatcaaaattaaagttaagatttaattttagatattaatttagtattaacttgtcatatacagtactgtacgtagatatccgtatgtattagacggattgatgatgcatatggatcaaagctaagccacaatcaccaaacaggtataaacgattctgctatagcttatataagcttaattcacatacatatatacagagagaatcttagacatatattatatatatagtatgtaataaattaagagtaggttcaagtagtacatctactcatcatacacatacacaccctatataatctatatatagagagagggagggtcatataggacaacttgtataaaaaggttataagagaagcgagagctgatagattcactgaaacaaaagagaaaaatgacagacgaagatagattgttgccaatagccaatgtagggagacttatgaagcaaatcctaccatcaaatgcaaagatctcaaaagaagcaaaacaaacagttcaagaatgtgcaacagagttcataagctttgttacatgcgaagcatcagagaagtgccacagggagaatcggaagacggtgaatggagacgacatctggtgggctctcagcactctcggcctcgataactatgctgacgccgtgggtaggcatcttcacaagtaccgtgaagccgagagagaaagaactgagcacaacaaaggtagcaatgatagtgggaatgagaaagaaaccaacactagaagtgatgtacagaaccaatcgacaaaatttattagagttgttgagaagggaagcagctcctcggcccgttgaactagacatctaagttctgaattatttactatgaagccaagaaagatctgtagagagaccagaaggattcaataatgtcaatgttgaatcattaatacaatgtacatgtttgtaattgatttctaaacatgagtttctacatacatatatataaatctatgatatttcttcttgcaagcaaataacgtgtaatttagacttagaatattggtcggttcgaacaataggaagaggagaagatagcagaaacaaggtactagcaagatgattttggttttctttttccttttggtatatatatcaccgcataggtcgatccaaggctttccataaacataataggccaaaaaataagagctttttgtatatcttaccgcatatatccattgatggatctgttacagtggctagaacaatgatattttttaatccccatatgcctaatggccttctggagcctgaggctagtgttaaccaaaataaaggagcattgggacttgaccatttaaaatgaaatcctaaagaagtcagaaagtaattagttcacattaaaggagaaggaagcttagaaagttgacacttgccagattttatttcacatgtaagtagattggtctctacaaaacttaagaacaagaaaaaaaaaaaatccaactaagttaaagtcaatatttcttcttttgccaaaaaaaaaaaaaaaaacagctaatagaactaagaacaaccaataggggagatgataaggttttttttttagtttatcgtaaaactaaagatgtcaaaagggtctagggtttgaatagagagagtaataggttcagaaaaaaaaaacaaccccgagactatgaggaccacaaccttatgggcacactaaacctaaaattttatatgaatgtttcaagatttgtatatcttatgacatgctcgctttatggttatctgcaaatggggtagttttatatcatcaaataaataagaaagttagaaacaattcatgaaagaaagatgcagcctatagtttatgtagagctttcttgggaccacttctcaactatcttatgttcttgctctaatcaactaagattgaacaagtaacatatataagagattagttcaaagagacaaaagctgaaatcacaaacatcaagatctttatttatcaataactataccaagatagtaagtaacatcccatagtacattttaaactattagtataccaatgtagtaacacgcaatgttttgctatgtactaatattaaccttaacaatgttatatctgacatctatgtacttaatgattctagggataaatgtttgtttccattggctcaaaccatggaatcgcggcattgagctcctgcacaggcaggcagcgatgcctcgggaaccatgagcgcgaatattttaaggtaacaaccagtacaacccacatctgatgtacccattgcgaaggacaaagagaaagatgaagaggacaggtccatgtgaaatataatagcttattatgttgattttacttacaaccattaaggttgcagcatggaccaagaaatataatagctttatgatgattttaggcaagttgctgaacttgattcctatgaaaaatgagatgcacgcatgtcaaaagttcttcaagtgaaagaaaagtgctatttgataccatcttagttttctctcttcagttattaactatttgtagtagtggactattcgggaacaactcatttctaatgaaattttaaagcttggcattatgtaagaacacatatatatttcagattaggttttcgtttgactgacgagaaacaaaataaagaatgtgcaagaaaaattggtatacaaattatttaactatttttacaaaactgtgtaatcttccaaacctaatttcaatgatattatacttctggtgacgtgaacgttctcgtaaaacaaaaaacaaaaatcatcgaaattatacttacggacaaagagttatggactatctattttggaaggagaaaaagagaaccatcagaaattgcctacaagagaaccatcaatgataaactcagattttgacttttgtacccgaaagagaaagaaccatcaatgaaactgcttgcgcgttagtctcccaatatttttcccagctttgatgtttccttaaattcctttttgggcaaggttacaaagaactaggctatgctatattgtataatctaagcttttcactttgattgatttcatatcaaaaaaaaaaagaaagaaagaaggagcatatgtgatgtaattggagagttgtttagactaagagaaaaatgtattcagtggaggctaaagaaattcttctcgaaatctgatgcaaaacccataactgaaagaaaagaagaagaaagaactctttgaattagttcccgagccaaagatcatatacataaccagaattacgacgaaggagttacggatgtttaggacgagagccaaagatgttctaacaatatgtaaccaaatgaagactttccaaatattaaaaagagcccttatgagataaaaaaaaaaaactttgttggcctgtttttcaatgcccaaatatagcgatcaagattttgagatgaaagttatgaccattaaaggagtatatatatccaattgtccatactagccagcgaccgtgaatgctgcccaataaccaacaagccaaaatgaccattgtttacaaatgtctttctcatttgctgttttccgacagatagagtaagtgtatatatagaatagtactgaaagagagggccgggggacttatatacgttttgaggaaaaagataaacaacattagagtaagagcgagatatatacacttatataaagtcatgtctataagaaagttcaaatccaacttaaaaatatatactcacaacaaataaaagttacatcacttcgattatttagagtttataaaactaattagaaaccgaactctttttttcttcaaggtcgtgttttggttttaggcttttagccctaatttacaggtctttctaaggctaaatctactataaaatgtaattgcatgcctagggttcaaacatgaagtctcctctccctcaaataatgtcaacttggaagacaacacgattgtctccctgtattacatgtctaccgagaatagatgtacaatgtaatttcatggattatgtttaacccgataataaattggtgtgggatgtaatgatttattttctttaatttaagaaattataagagttgacacaataaaaattagagaaaaaaaaaacatggcttttctttttactttatttatttaccctgcttcaaaacacaagagaataagagaaaagtgtattttgaaacgtttttgaatgttagtttggttttgtttgatttatagtactgtttaacatcagaaaagacaaatgagtttaaaaaaataataccaaaaaaagaatttactagatacaattttaaagtggaaatatttttaataacttggatcctcgtctaatttattcataacatttatgtgatatattatatatataggaaatgatttattagatagttgactaaaactatatattagatgctattatttgcataattcatatagttatttattatgaaaaaagagaagaataatcagttatgtaaaagtagaattttttttttttttttaaatgttatcggaaaaactgtatacagtaataaaaaagagaaaaaaaaaaaaaaccatatctttgtcgatggattaaaaacaacattttcattacgcagcgcttcttcgccctcagattcttcttcaccttgaaagaccattaacatcattccttgcccagatccaaacaatgccatctccactctctctatttagggttctctccaacttttcaaatccctaattcttgctccctcccttcaatcaattccgatcatcatcgaggtctctctactccccgaatttaaagatcagagccgcgacttcctctgccttcttttcctcggaatttttcagctacgttttccaggtggtgtgtattgtcaatcagttgacctttgcttttgtagccagatcgttcgtgctttgagtttagggctcttttacaaggtttcgtgttggtggaatttctctacctaggtttgggggaagagttcagtaatttcgttgtagatcgtgatttgggcttttagggtttcggtttactggttgctggaatttatggtagcgttattgaattcggactctctgcatgtgtaagcgttgaagtttgaagtttcaccgggttttgtttcttctgctgaagagtcgagattattttacgcattaagaatcgattcagaaggtttttaggaattagtttctgtggattgtaactatataactactgggaggggatgtttggttctacattggatagcagccgtggaaacagcgctgcctcagggcagcttcttactccgacacgcttcgtgtggccttatggaggtagaagagtcttcctaagcggatctttcaccaggtgagatgactgagcttgaactaggatagtttactttatatttcagttaagctatttatcggggtttgtgtagagtatgtgctctgtatagtatctatcggggttttgcagtccatggactgatttctgaaatgggcatttgaacaggtggacagagcatgtgccaatgtcaccgctcgagggctgccctactgtttttcaagtcatttgcaacttgacgccaggatatcatcaggttaataatcttgtactcgacctgtatcatggcaaattctttgttaattaatccctgcagaagcatttatgtccttgtagtgatttagcgatgtccataattgtgcttcatttagtctctggatacttaacctatgcaatgagaatcttatatacctctgtcatatttgtatgactgtggctgaaaattgcaaatttccttgctaattgatcaaaatttgactttatacatcaccatccacataacaaaagttggggtcttcatgctgtgtgatacctaaatcacttcttttaataaaggctacagtgtgtgtatagagattcatatattttggcagttggatgtactatatataacaagattttaattattacaatgtgagatgcttaagaagccactaatgttacatttatgttatttcattctcatgcagtataagttttttgttgatggggaatggcggcacgatgagcaccaaccatttgtaagcggaaatggtggagtagtgaatacaatatttataactgggccagatatggttcctgctggttttagcccagagacactgggccggtcgaatatggatgtggatgatgtcttcctgcgaacggtaaggaatctgacctttccttttccaaaatgcagtgtttattctcgctgcttgatggttcaggtttcccgagttgcttccagtttggtttctttaattttgatccgtggttggtatccttcagattatttttaactgtttgtcattagttcaagtataattgattttagaccattttatcttaatgtataaagcaggattccttaagttccattaaattgtctctgagactacattcaaattgagtttctgactgctttcacatggtgattatattgtaggctgacccgtcccaggaagctgttcctaggatgtcgggggttgatttggagctttctcgtcaccgcatatcggttttattgtcaacccgcactgcatatgagctgctcccagaatcgggcaaggtttggtttctttttctttttgcttgatcattgataatttctgtcttcatgtcctatagattatcagttaagaataacctttggcttcttactcggaaattgtctaaggtgattggaaattttacaggttattgcattggatgttaatttgccagtgaagcaagcattccatatactctatgagcaggtttactttatttgccaattacccttgtgtcagcttctgttcttgttaggatgttcatctctctgtctctcaccgtcatataaacattctaatattgttgcatccagacccggaaagggaaggaagtgaaacttaagtgaacaacattcgtctaattatacttcgagattgtttggctttctggtttttgctaattccagatgctttcagggaatccctttggctcctctttgggactttggaaaaggccaatttgttggagttcttggtccactagacttcattctaatactgagagaggttggcttctattaaaactgttctttgctagagcattccatcgagttactattgtatattcttagaatttccaagacggaagtctggatatctcataaatcacatagttttaaatgttttactagcttctcagtatgaaatttcactcttgagtataatagcaaatttgtaaaattgcagcttggaactcatggatcaaacttgacagaggaagagcttgagacgcacacaatagcagcctggaaagaggggaaggctcatattagccggcaatatgatggaagtgggagaccatatcctaggccacttgttcaggtgagattttcacagttgatttgtatcgctgttactactaactttcttctgtttgcgtaatctctgaacatagccttatcctagaactttctattgcatgttatattgaaaagagctagtagtatttctctcttgctattaatggttttatatatggctatcaggttggaccctatgataatctgaaagacgttgccctgaaaattttgcaaaacaaggtggcagctgttccggttatatattcttctttgcaggatggttcatatccgcagttactgcatcttgcttcgctatcaggcatattaaaatgtaaggtcccttcatttgtgaataagacactgataagcgcgccaatttggcatttctcactttttaattcatgacgtgcatatgattctgctatttccaaaattttcccacttcttcatttctccaaattctgtgaagggatgggatctttaggagggagggaaattagaaactaaagttgcaattgactttaccaaactttttacacagttttccctgttaataattcctttcgaaatttatgcctttatcagacacttaagctctaaattaagcataatcttccaggtatatgcagatactttagacattcgtctagctctttacctatccttcagcaacccatttgttcaattcccctgggtacgtgggtccctagaatcggagaatcaagtagcaaacctctcgctacattgagacctcacgcctctttgggttctgcgctcgcattattagttcaaggtaatcctttttcttatcttgttgcagcaacatcttattcaaagctcatctgcaactcagactatcaacctctacattacaatcagattttcagttttaaatattttgtctagatggtaatataatcaagtagctgaacacatgggtatactcaagtcaatgcagaccaacaaaccaactttagatgttacgaccacttttattatttttatacagatgtaattgctgcaacatgagtaaactaacgaggtttaaaaacatagaaacatttttgtcaatcttaaagcagatatatttatagaatttctcgtgatcttttccctggttcctcatagatggaaatgaatgaatgagtcatgcttaatttatgtttcctggttattacagctgaagtcagttcaattcccgtagtggatgacaacgactcgcttattgacatatactctcgaaggtaaacctctatccatcaatcgacatgatgtcttatgcattccatctttgacgtccttgtgttctgatgatatttgtaattggccagtgatataactgctctggctaaagacaaggcatacgcacagattcatcttgatgacatgacagttcaccaggtaaacctctcatcagaaaccaagatccatcacatgtctcatcaaattacgagttttacttaaatgtaacctgcctatctatcatggaaattgcctcgtttctgatttatttgaacatacatctttacaagaatgaaagaagagatgaaacgttataataaagtggaggataatgtgtttgtgggttttcaggcgctacagttggggcaagatgcgagcccgccttatggaatcttcaacgggcagagatgtcacatgtgcttgcgctcagactctcttgtgaaagtgatggagcggttggcgaatccaggtacacactatctcctatatacaatcttcagctttgttgcttgacacaggaacatcagatgagatgtaactggggtttgggtttgtgtatataaaacacaacaggtgtaaggaggctggtgatagtggaagcagggagcaaacgtgttgaaggtatcatttcactgagcgatgttttccaattcctgctcggtctttgactcccacagcaaaacaacctccccaacctctttttctcatttcccctcaatcaaaactacccaacaatttgcttctttttttttttttttttttttcttcttgcaaggaatttgtaaatttgctacgaacctctttcatcattgttttcttattatttttgttgttttagttgaacgggtttccattcttgtgaagatattggctaccggaatcttttactagtagcttccctcagctttttcttccctctttttttttccatttttttttggttttgagtttttcacttcatcgactcgaaaagcaacacagcatgagaaggccgtagaagtgtaggacaatgcactggttgacaaagatgaattgtcaccagcgagaataagccttatggttgaagtttgcaagtaatgattaatacaattacaatcataacgaatcataaccttaagtacaataacaagtaaaaaagtacaatgacaagtaatattcagtaatggttaatcgagtgatttgatcatagcattatcgatttctttcggatttttcaatagctcttaaaatatatcaataaaagtaatacaaaattcaatcaaatctagtgacactaaaaaaaaataaaaaaatctaatgtcatttaaaaaatatttgagcaaaaaaaataaaatctaatgtcattaaaaataagtgttaaataattgatgacataataagtgatagagaaaaatgtatttactctatttacttatttaggcttatccagacaataaacgttttcgtttttccagtccaacaagtttcttcatcaactctctcaactgttttcgacataaacattccagaagctgagatcagatactaaaatggcggagatcgggaagacggtgttagatttcggctggatagcggcgagatccacggaggtcgatgtcaacggcgttcagctcactaccaccaatcctccggccatcagttccgaatctcggtggatggaagccgccgtacctggaacgtaagtaatagtgttcactttcctcttcgaaaatttgaagctattaataatcaaagtaagaacaattgtttaagtatttgattttgttcgaatgtgtctgtcaagtttggattttgccttgataactaataattaattttcttcttcttatgaatcagcttttatttatgtaaatacctctaattgtttcatgcatgaatgagagattttactgatataggatcttaattgtgaacagtgtattgggcacattggtgaaaaacaaagcaattccggatcctttttatggacttgaaaatgaagcgatcacagatattgccgattccggaagggactactacactttctggttcttcactaaattccaatgtcaaagggtgggccaccctcaccctctctctctcttggtcgaaattgctatttttcttgtgtcttcttttcatattttgttttgacggttttgcagttattgaatcaatacgtgcatttgaatttccgtgccatcaactactctgcacaagtgtttgtaaatggccacaagacagagcttcccaaagggatgtttcgcagacatacacttgacgtcactgatattctccatcctgagagcaatttacttgctcttattgttcatcccccagatcatcctgggactatacctcccgagggaggccaaggtggtgatcatgaggtacacctcctccctccttctctctctcttggaagtttatatcactcttctttctttgcgttgtgattggactatccatgacagattggaaaagatgtagctgcacagtatgtgcaaggttgggactggatttgtccaataaggttatttttttgttacaagatttagcttatcgtatagtttaaggcatttctctctgacaacattttttcttctagggaccggaatactggcatatgggatgaagtgtcaatatctgtcaccggggttcgtttagttggtttacattgttttccagagatgatatcaatcaatattctccacggaacgtttatagtcatcttcttactgaatgttataaattgcttttattgcagcctgtaagaataattgatccccatttggtctcaaccttctttgacgattacaagagagcttacttgcatgtgactgctgaactggaaaacaaaagcacatggaatactgaatgttctgtgaatattcaaataacagccgaactcgaaaacggtgtctgtttagtagagcatcttcagacagagaatgttttgatccctgctcaaggacgtattcagcacacatttaaaccagtgagtggtattgttatcgtatattacttgttacgacttaaattacttatggctctgaatctgtgatggtggtattgtttatcctagaaactaatgaaatattgaattaacagctctatttctataaacctgaattgtggtggcccaacgggatgggaaagcaaaacctttatgacatcttgatcactgttgttgtgaatgaattcggagaatctgattcgtggatgcagccatttggattccgaaagattgagagtgttattgatagtgttactggtggaaggtaaactttttatatttcagtttcagtttggcttgtgtagaatgattctgtggaggctctacaacttgtttttgttaattttccaggctgttcaagatcaacggagagccgatcttcatccgtggtggcaattggatactatcagatggactgttacgtctctctaaagaacgttacagaaccgacataaaattccatgcagatatgaacatgaacatgatccgttgctggggcggtgggttggctgaaaggccagagttttatcacttttgtgatatctacggcttgttggtatgaatcttaagttattcgctatcacccttcttccaaaattcattgccatttctgaagtataccttatttattctcaggtgtggcaagagttttggatcactggcgatgttgatggaagaggtgttccagtatcaaatccgaatggaccactagaccatgaattattcctcttatgtgctcgtgatactgtcaaacttctgagaaaccatccaagcctggctctttgggtgggtggaaatgaacaagttccgccaaaagacataaatgaggctctaaagcaagaccttaggcttcattcttattttgaaacccaattgttatcagacaaagattcagatcctagtgtttatcttgacggtactagagtttatattcaaggatctatgtgggacggctttgcagatggaaaggggaacttcactgacggcccttatgagattcaataccctgaagatttttttaaagacacatattacaagtatgggttcaatccggaggtcggctcggttggaatgccagttgcagagacgataagagcgacaatgcctccagaaggttggacgattcctctgttcaaaaagggtttggacgggtttattaaagaagtgccaaatcgaatgtgggattatcacaagtacattccatattctaatcctggaaaagtgcatgaccagattctgatgtacggtactccagagaatctcgatgacttctgcttgaaggtaaatttgggatcttaaccgttttagcctttactggtgttgtcttaccctggtgcataaatgttacttttccccttaacttaataatgcaatgtctatgttcgattaataaaagaaacttgagatcataagtgatatattatgacttggtttttcctctgtaacaggctcaactggtaaactacattcagtacagagctctattcgagggttggagttcgcaaatgtggacgaagtacacgggtgtcttgatctggaagaaccaaaatccatggactggtctcagaggtcaattctacgatcatcttctcgaccaaacagccagtttctatggctgccgttccgctgcagagccagtccatgtacaattgaacctggcaagttactttgttgaggtcagtgtgattagttactctctctctctctgacaatcactgtgtacgaaggtctctcgaaattagattcttgatctaaataagaagtgtataaaagtctaataaattatgtaaataatacatggaatcatgtcctttgaccccccgcacaggttgtaaacacgacttctaaagagctgtcggatgtggcaatagaggcatcagtatgggacctagacgggaactgcccatactataaagtgtttaaaattgtctctgccccaccaaagaaagttgtgaaaatatcggaattcaagtatccgaaagcagcaaacccaaagcatgtatatttccttcttctcaaactgtacactgtctcagacaaagcagttatatcccggaacttctactggctgcatctgcctggaaaaaattacacactcttggagccgtacaggaagaagcaaatacctctcaagatcacttgcaatgcagttatggtgggttcaagatatgagctggaggtcaatgttcataacacatctagagctaacttagccaaaaacgttgtccaggaagacgaaaaacgtgatctggggttgctccagaaactctttagtagatgtgttgtttctgcagatagcaaccgtggtttgaaagtagtggaaatgaagggatcggattcaggagttgctttcttccttcgtttctcagttcacaatgcagagacagagaaacaagatacgaggattctaccagtacactactcagacaactatttctcactagttccaggtgaatcaatgtcttttaagatctcatttgcagctcctacaggcatgaagaagtctcctcgtgttatgcttcagggctggaactaccctgataggtttagtgtttttggttgagactattcatgtttcatgtttgttacataactgcctgtaatctcgaacctttcaataaatgaaacttgcacaggttttagcaatttgtagcgcacttaaatatgcacccgacactcacattacacacatctaataccttcaacaaccagttcagaatcatatattcagaccaaacctcgtgtctacttttcatcacagcaagataagagttacagatatatatactagttgagcaatcaaaaatcaaaaagccggagactttttgtgcaagtcattttcctggtgatgcaaacctcgacttctctctctgtcggctcatgcctctgtctcttggggatgatcccaaccctgcttggcgcatgatttctgcaataacataaaccacaagtcaacttaccaagcttacaaaaagtggatgctacaatgtcatgtttctcaacattacatgattgcatgttaacagtggtcaatgcaaagcgccgaattctaaattctaaatatgtaaaacttaaagagaatctttgacatttttttgctagattaataagagtgacataccttgtcgctttctttccagttcttgatcaagctcttccttccacttcttctctatctctgacaaagcaacactgcaaagccaaaaccagccaattcaagcagattcaggaatgaaacaagaagcctagactaagtgacagatttaaatcgttgctggtcaatagctaggctgaatttaaactctacacgtttggagttgggtgatcatagcttaagataagcatgaatgggacttatttctgtcttcttgattcctaccgagtttctaaaagaggaaattaaggaaatgtctaaatccttaaaacttaaatcccaattatcgcagccactaaccactggcttaattcctgcttagtgtcaacaacgagacccctccagtctgtgacccgtgctgatacaccatcctgtgaagcttcatcacctccattgttaatattcaattcacgactacctccacttcctgggctcttggaacaactagttgcgtctgttgctcttgaaggtgaaccaccaagagggccccgactcggtgacctgctttttggaggcagtttcaggaaaccacgagcagtgtcctctcttttactgttacttaaattactctccatacaactgggagagaatgtgatcaaactattgtagaattcttcatagagaggagtctgtaacttctttagatctgcagcctgagacaaatacatattcactgccatgttagtgatttacgtagaaaatgcagtgaggacaatgaataatgtagtataatgtgcatgagggaccttctcatctaagaaagctttaatttttgactcggtcagctcatcatcatcctctgagtatgaaggttggtcacattccatgctcattgtagactctttctctccattaccaggactttcgtcaaatttggacttcaaagcaatggacatatcacttatgtcatcacagctctgtacacatagattttataagtaatgcttacaaaacaaattgaaacatgatccaaacaagagttgagacttgatcagccattggaattctaaatgagaaatcatatgtatgctaccttcttcagatgacaatctttttcaagggtagaactcatttctccgtcaaatgtcaagaaattctcatcatctatcaaacacatatcgtcttcatcacctccattatcattttgttgccataaatttttgttttggattgatttcacaggatctacaagtgaataattcaaactgccaaagttacacatgtcacctacatcgtcgcaagtagaatctggactgaaacaaaggaaacagacaataaaccatcaaaatctttcataaacccacaaaataatcttagaaattttggtttcagccagatattcagaacttacgtgctcttggtgttatttatctgtaacggtagtggagtgctaagattgttctggaaaataacaaaaataattttatcaagatggcttcaagaaaaagttatatgatattcataagacggttaacatccacccaccaggacagaaccaagatcagtagaagcagactccttgtgtttccccataacaaaaggatgctgcgaataaaacaaaatcaggaattttactcaaacctttccaatttaatattgcgggcatcactcaaactatttatacttcacctttagtagctcagatgcggttggccgcagatttggtaccctgtcaagacggatccaatgattcagcaattccaaagacaagacacaatagtagtgaaggaagttactattaaaagttccaaactaatgttgctgaagcaaagtagcttactcctgcagacacttgagcagaaaatcttttgcatcagaggagagagtatcaggtattggaggatgtgattttgttgttcctatgaagaagatagcagcaacctgaaaagaaagtatgtccacttgtaattaagaagcaaaattattcacgaaaaaatatcaccagaaatacgaacaaattacctctttatactgctgactccaaggagccttcccagtcaccatttcaataactgtacagccgacgctccatatgtcagcagagctgagaacaatagccacaggtttgtgagaaatcaaaaatatgggacataagtcaccaggactacaattaatagccacaattgtatgagtatcagttacaaaacatctaattttgcatttacgagcacgcttggtttcttacaagctatgtccagtttgaagaataacttccggagccatccaatatggtgtccctttcatagattttgcaccagtcatcgtagcctagagatgaaatcaagtcaatcacattaaatcactctgaaggatatgttatactagaccaactaagaaataagagaatacacagaacagaatgcttcctgcaatatactttgtagaaaacaaattattttttgacttaccaactcagctacttgtttggatgcaccaaaatcagcaagcttaatgcatcctttattatccacaaggatattagccccctgagaaaacatagaaacatatagtctcatgggtaaggactcgagattgtaagcacttataaagtatggagaaaaattgttaccttaatgtctctgtgcataattgcatgattgtgcaggtactccaaccctaaaagcagttgccttgtgtatgtccggacaacctaattcaatcgttctcaccacttaagcaatgcacacattgtaagagattgaacaaaaaaaaatccaagcatgacttactgattcaggaaaaggtccaaatttctccaagagcgatgatatcgatccaccgggaacaaactcgagaaggatattcagggtatcatcttccctcactgtacccaaatatctctaaggccagaaaataaaaaatacctgagttagatagataacacaaggaagtgttgaatccgtatgcattgagaaggagacaataccaacagttacttacaactatattaggatgggagagatttttaagaagcttaacttcttcttcaagctcctgaatatgagcctacttagcaccaacacagataacaaactcaatgaagtacaaaaatcaatggaaattgaaagagggaaaactcgatgaaatggattgtttatgaacctgagtcttttccttggaagcaaaattggctgcaatcagaacctgagtagaacaaagcttttgaagttcagtacacatgccagagaattaggtcattcaaaattaagtcccaattagcttcaaatccacagcaatcagaaaaacaaaccctaaattacctgtttgacggcgagaagctccccggagtcaagattcatacccatgtacaccgtaccaaacgcgccgcgaccaattaactgacctttcctccacgaaatcggaggtgccatgtctacagtgttagcaggaggaggaggcgagaaggagggtttgataaaaatcttcgatttgcggatgcaagaggtgatcttatcggcgagaacaccgggaaacggaggctggttctcctggttatcgtcgtcggaagaaggacggaaaacaagcgatcgacgaacggagccgaagaaatcttgcatttgaacgattgagggaagaatgcgtttcactgttactctaattttgattcatcggtcggcacaaaagtgttaacgagtgagagggaaaaaaggcatcgaaattatatttttgaaaagagaaaattactttacttaaattacgcatattattattccaaataaaagtatggttattagtctttgtaaaaaactaaaaatactttcactcgaacgaaatatatatcataactacgtataatgtttttccttcataatccacaattacctgttagaaattaaattccctttcaaaatctttacgtaaagaaaaaaaaaaaattaagtctcttgttgaataagcgagtttgatgactcttctcattgacttagacggttcttcttcctaggatcttttattctaattttccaatgattttcaggaaaaccattgagcttagccattttcctccacttctcaacgttcttctccatcttaagattcaaaccacaataacctttcagcttcttaggcatcttgtcgtacactttccaccatctcgcatgcaccgactcgcttgcatacacacgtcgcgttttcaagtcccagttacaatcgtagtctctgtaacatcgccatggttttagtcccaagtagtgtatgccctctaaattttctggaagattgcgcgctttatcatgcctgctttcatcaccaaagtatttcatcgtatttaaacgttttgataacctatgccaccacacgaaatattcgttcagaaatccttggtctcccccgttgtatgacccgatcttgaatgatttaagcatcaaatcctcgaataaacaagctgatggctccagaacctgaagaaaaccagactttcttatataaaacatatggaaaattcgataaaataaaatagtaagaaatggattgataaggcaatatctttagaaacttaaaaaagtcaacatattcaaatcaaacaatctattgttaaagatatttgttagttagatgcattaccatgactcctgagttgaacaagactttgttattgccagcggcagaaagttgaggataggagaaaaggtaatcaatattcttgacgatgatgaagtctgcgtctataaacactagtttgtcgtaatctgtcacttgccacacacgtaacttactgtagttccactcattgtaagaacgcttcttggaaaaaggactacgaattctctccactcgccgtagtttccagccagcaaggcttaggccaatgagagagatgttggttatagagtcatcgtggaggagaatcatgtccttggttgatccagattgccttatgctttgtgctaaggctattgctccgcatacgtatacctccgatgagtgtagtaacgtcacgtaagcgacacgttgggcagtaaatgatgataatgtagttttttcggatgtgagatttctgttcttgtcttgtatccatgcttctccttgacctttaacaacgaataagaaatagttagcgaaacattggaattttttaactatgcattatgtcatcatgcatgcgacaataaataaataaataaatgaagaaaacatattgacctatgaataataaagccaaaattacctagcggagcaatctgacatgaaccaggaggcatgagaagcttctgcttcaacctcgtaagatcaggcctatagacccaatagtcccccacgcgcttcacgcgctcatcacacctaaagatctcatgcataggcccacaagatccgatgaagacaacgtacacagtccgatcaacattcctccgaccactctccaccacaagattcgctgccgccagattcacctgtagcctgaaaacgtctcttaaccctctcttctccgagaaaccatcgcacgggactttgacaacgacgacgtccacgtcagcttcggaaccttccatcttagggagagggacttctggacaactaggaatgtgccacgtgtgatcctcgtcgatccaaaccgggaataaactcgtccatgtcagattgttcggaagaggatcgagcgacacgtggacattctccaagatcgacgtcccgcttgcctcgtagctctctcgctcgttctctgcgatgttgagaagacccactcggatctttttctcatccggaagatagtttctaatgagtcggagccatatcggagtccgtttaaccggttccggcaaagaataacgaatctcaactatcgaaggagaagcgatcatggggttgagcagaaacagaggtttaaagtttaagagcaaacccaaaaacgacaatgatattagtataagataaaacataaaaaatctcgtactcgaacttttgcttttggcccccattttcccccaactctctctctctctatgctcttagcgatgtctataagatacatgtaatgtgtacgtgaatttttcataatctcatatacatcaacgtatatgtgcgaattcatgggtgtatgattgaagaaggatcttgagatgcatggacgcacgttggcgtagaagtcaattcgttaggtgagtctacgaataattgtgtaataaacttccatgcgcaagttaggcgcctgttttgtgttgtaattaagaattagtttgaacaacaggtacaggtgtatcggatatatatcaaattggtgaccaagcttgtgattgttttgtttttaaatagcgatatcaaacattaaacaaacattggtagttcatttatgcttttataacatattttgttggctatagctacgtgaatttgttgtcgttaacgtggacgaaatcattcaaatcgcattttaaattatttattgttaattagtcggttgataaatctatatcaatcgctataaggtgatgatcaggtatggcccatacaagctgattattgggttaattattataaaagttataaaagttgtagaagcaaacaaaaattgctttcaaattttatcataaaaattattactattttatagtttttgactcttgaaattctgctgtttgttttttcgttggataatttttttaagtagatcaaacataatttgaaataggaaaaacaacaaattaaatgatttattaatctatgtgctgaaactctaaacaatatataaaatgaaacataaagaatttatagtatacatatatgtgttaacataatcgtcaatggtaagtatttgagttagtgttaagacgcaggtcacaatctattatatataacatgagagttattttattttgtcaaaacataatttattttgactaacaattgtatcgatccaaaacaaaaaatctaacaaaatatccataatttagatgacaaattgaaatgcaacttttttgtatgaaacatataaaaccatccaagatataattattagacaaaagattagttaaatagatttattaagaaattgaattgaatgtaagataacattcccggtaaaagaaataaaataaaattacatagaaaatataaatttggtattttgccaatataacttgatgacatcgcctgctttaagatttcttgcatctctaagttctccccacccacgtccgataaaataacctctttggctttgtctaagatttacccaataggaattggtattgtctagaatttctacttgaatacccattcgaggtactggaactcccgtgcttcttactatgttctcaaccttatctcttggtaaaatcaatttattatcatgagaacaatcggtctctgatagggtttttactatcatcatattcggatccattttactaagtttttgagtttcttctagatataactaagaatggtttagaaaaatgaaatattgagaagtttgaagagttcaatgcatatattttatatacagttcttggtcaaaattatgttcagtttatgtttatctgaacaatattaattttattaaatacaactctctaaatttagcaaatatagatatatattgtaagttagcaattaattttctaaatttacaactttttgttttaaaagtaaatttacaaattttttttttttaatcatatattcttactatgctataattatatttacaataaccttatttttagtcctttttgaagaagtattcctacatatttaaagctaaaactattataatatctaagaaacataaactctattaatattataaaaaattatctttcacaagacctctttgacatctaatatttctttagtttttacaataactcctattatttttgacattaatatttgaactttcaaaatcactattaataacaagaaatctagttaatattaagttgtcattaatattataatatctaagaaacataaactctattatattataaaaattatcttttcacaagacctctttgacatctaatatttctttagtttttacaataactcctattattattgacattaatattttgaactttaaaaatcactattaagaacaagaaatctagttaatattaagttgtcattaatacttcgctaaaagacaaatagtacaattgtccaacatatacaacaatttatttaatacattgttgggtttgggacaagaaaaccattcagatatgctacgatgacataataaacagaaagcaaaatagatatgctcaaagtgcattaagtttatgacatgtcaatcaaataaatgcagcaagggaatccacaagactcagaagaaaaccgtctgagccatacttagctaccaatgataccgaaaccggaagattttcgtgtagccccaatggtatgctcacctatcatgggaaaaaaacaccggaagatcagaccagttcttaacagactccacaagaaggaagattgatgttgttattacctgacagaatccagaaacgcctgcgatcgacaacaagctgaaggctctgctgcggaaagattcaagtgcagccacattagcttggagatgcggtggaggacctggtaccgttggaatcaccaacacacccttctcctacaaaatttggtatgatttacataaaaccggtctactggtaagtgtttcaaactgaaatttggagaaaaaggaataagttagttgtaccccgagcaaagttgaaagagccgttatcagttcagatttcacggaccggcaatggtcgatcttctcgtcggatgttctgatagcttcctcaattcgttctgatattccaggaccaaactctggcttcaccgacgagatccatgcaccgtggtttatcttgaattcatgtctaaactttggttatgcctatgtaatatattagaaatcgatagaatgtaaaatgagaaaaatgttgtacctttgtaacaatctcattgaactcgatagggccatgagagacggaatgcagaactcttgttgtgtagtgacatcgtcacttgtcatgaaatgtttaaggcttggaacattctgtccaatgtactctccaagattcaccttctttactacagtgttgccttgatacagaacaaaatcattaagtaacaaaatcatcaaggaataatctctgacaacaagttcttgtgatgctttttacctccaaacgatttttccacggatccaaccagaggctgcaccaagagatcatgcggtacactacacagcttgaagcagtcatccgcgataatcagttgagatggttcgatggggttcaagtgatgctgctgcaggagaacgcaacctacacgtttcaaagtggctgtgtcccgagcaaaccatcctaaagacaatgttggatccatcaatatcaagattcagtttaaccattaacatctcggattttagttttcgttaccaactgtgtcgaagctctgagccattggagtaagtccgacagtggaaactgcaccgtgggatggccggaaaccgaaaatcccacagtaagatgctggaactcgtacactccctccggtatcagttcctgattgatcaaaaaccaattagacagggaagaaaaatactttatgatcagtagtatggttacaacttttggcaatttttcttcagctcaccaatagaaaaatccacaagacgagcagctacagctacggctgagccactcgatgatcccccaggcactctatcgaaagcaatcgggtttctcggagtcccataatgcgcattttctccgtttatactgcatattaagtaagaacatgctcagaaaaaacgtaacaaacctagtcatattttagttctagcctctgttatgacatatcctgtttcttaaaacatgaactcctaaaccagaaaagatgtgaaattgaacctgtaagccatttcatccataatggtaatacccaaagctgtggcaccagcttctaagagagatgaaactactggagctgtagaagtagctgccgagtgtgtccttaaccaatccgggttaccaaaaccggtaacgcgtccttccacatcaaaactgatcaaaccaagcaataagctcaaaaattgattgacaagaaagtatagaagaaactctgtaagtagttggatatcttacatgtctttaatggcgaaagtaagaccctgtagagaaggaggcgacgaggaagtagaagttggagagattgtaactttctcaatgaaagctccaaaatcattattggtcgccattgatgcagctccctttctgagaaggtagatgacgaccaagtaacgcttcttgtagataaaagctatcacattattaacgcggctacagtggccaagtcattttctattttgtcttttccttaatattattgtccttttgttttaaatatccaatgagatacattttgtggataataacttaatatgtgtgataaagacacagaaattaacattcaaataaaaaaacttttgtcaaaagcacacttgtttcttacagtttatacattcttctttctggttcatccctaaatttctcgtttagaaaaggatcgatagacataaacactttagattcttctacaacacccaatttgacaattctgatatgttcttttcattttcttgtctaaggtctccctcctttcacctggacgagactagaacgctgcagggagaaaagcgaatacactatcacatttttacttcaataagataagaataccaaaactgacatagtaccaaactgagacgatactgaaataagttatacaaaggttaccattattcgaaaacagaaacaaaaccccaagactacaaggtaggcctaaaagaagctggaagactcacagtttcttgctaattttcctggtcaggttggtcaggtgcctgttgttgccacattggttgacccatataaggattaggtggatacgcaccaccgggattacccataaccattcccggatttcctattggagcagttcctgcaggcaagtatccatacgggtaaccagcagcagcagcttccgggacagtgcccctcggaatacttcccaagacttcatctcggagatcctcccggggaacaatatccacaaggaaatcaaaaatatcggttctagtcacagcagcagcaatatcgttcttctgcaacgtccgcctcttattctcctcagtgtggttccacgacctgagtgtcagctccaggatgaacatctcacaggcccttgcaaacacgacaggcgcctcagccgagatcatacggacatcttcatccgctttcatgattttcttgattctcgcaaggggaaggctgtggttcttgaaatcggtagtcttctcaatctctttgaattggttctcccaaaatgcttgaagctgctgtgccagctgttgctgctgctgctgctgatggatctggtggaacgccagctggcctggttgtgccgcacctcctgctacagtagcagcagtggtgctcatcgggttggtttggtatgggtttgtgccatagttcatagctccagactgtccatggtcttgttgatccattcactaccagaataaaaaaacagaactttgggattcattctaagctcttaagaaacatctgaccagaattttaaagaaatgtgaaggagataaggttgctaacaaacaatttacataaataagaatctgctgaatttactttatatatggtctaatctgtaattctagattaaccttgaagatctaaacagcaataagtatgaaaattgagcttcgaattaaaagacaatacatcaacctacttattccaacccataaatttgataaggaaaacaggaaaatatcgaaagggattgcctttaatttccttcaaaatagacagaacaaagaatctgctaacacagaacaactagaattgttcctacaacaccaagcatattattttatcatgtgaattccacaatatataagtaagaacaagtcaaattgaaaaaaagaatctgcaaacgagagtgacctgtggaaaggagaatctgaaggggaagagactggttgatcctcttggtgggtagagagagttttaagatctggtttttttgtgttaatttgttgtgattttattagggttttgctgctttacccttttttcgactttaacaatgaggaggaatttagaaagacaaggggaagtaagtggaaagagctttaaaagctgggtgtcgtgtcaaccattgggcttatgtcaagattcttctgctcttgtcagatcatgatttgttttatctcttacattaattaattcatttttattatcttcttaggatttaattggcaacctttaattatcttctttggaggttcaaatttcacaagtagttttgttgtatcacaacatatttggcattcacagagaatcaaatcacataaaaaagaaccagaatcaacattttgttctgctctaatacacattctaggatcaatgaagtatttctcattaatatcaaaagaatacaaatgtgtggtttatacatatataacagacccaaaaaaacaagaccagtacaatcaatggaaaagtaaaccagatgggggagtcaaaatcttctcccaaagcacatatattttaccatcacctatctaccaaactttactaatctggctcggacgatcacaagaactttttgtgggattcgaagattactggtctggcggtggccatcagctgagctcaaaattttggcaattcccttctagacaacaaaaattcctaaacaatgaaccctggttgaccctagattattcaatgtgcagacttcacgcatatgatcaggttgaaacgctggcgatgatcaaactaacaaatgtgaaagcaacatacagtccaacaagacagatcccccagaatctcggaactcggaatctagaccaggttattaccaacagagatcccattagactaagcaacaagaagacgaaagctatcacaatacctacatggaatccaagtttgtaagcgtctggatatacattagctgtttgcatcaccaaggccgatccaagtccaacaagcatgttaaacattggacctgcaaaacaaccggccatagccattgctggtctacctgcctttgcaactgccacgtcagcaactaggtcaccaaccgagtttccccaagcaagaacggttaggccaaggagcgccggaggcagtttaaggagggttccaagcgcagccaagcagttaaggagctcaccagcaattgttgatatccagaaaacactcattatgaaagctacaacaatgaccggcagttgctcggtttttggtggttgtttttctactgtgaagtggaggaacgctagggaagacgtcatgaagaggacaacaagccaaagcgggagatgggtgtttggaaagaggaatgaaattgggtggtttagttgtacaaaagagttgcaagtgtataaaagggcaaaagggcagaaaacaatgttggcagagcgataaaacctagaccattccgaaggagaaggttttgggatggtaaggttcaaaagaactgatacaggagtttcccacatcctcgagatctgcaatcacagcagcaaaagcagaatcagacaaccttcactaaacttatttcaaacttaaatgcagtctaacagaaaaaatatagtaacctggataagatccaaacaggtaaactcctttagagtcgaattcaccaaaggaatacatatcatagagagacttgattaacgagtcttgaccagttcccaatcctaaaccctacgaaattctctcaaactcattttgcccaacttctttctaacatgttagctctctagctaaccgatctaacgattgctcctgagctgtcaacacagctacaatccagttgaaaacgcctaagcaagtgaaaatgctcattcactagactaacacagagacttatcataaccttagagtacactaagaagaaaacaggaagcaaattaaaacctttaaacgcataatctaaactaaacaatatcggagttcacaattggtagctgaatatgatactaccataaaattccagcattatgatcgataaacaaagctcaaagatgagtgaagaagaatttaccgttccataaagccgaaaaattcctgaaaattgatgttctttctctgctttataactcccaagagaacctgcggcaatctcacaatcctgaagtctcaacaaatccttctcttcctcactgatacttttccctttctcaacattggtaccaaaatccatccagaagacgaaaccaacgaagaatatataaaacccaacgaaccctatagcttgccacacaaatatctcaccactcaagtacacatagaacaagaacaaagcagcaatcaaataaaaaagcacatctctgacaaatgacgcagcatccaccggaaacggcgctgcatagatcgcaacgaacccaactacaaaggcagagacgaaagttccagcggataagatagctccgaatccggttcgatactgaccaccacgcaaggcggcaacagaggcaaagacatcaggtgcgccattacctaaggctaaaagagtcacagcagccatgcttggagagagattgagacgatcggcgagctttgtagtgacggtggagaaatgagtctgagcggttttaatgagtatgtaaaagtgaagaagaatgagaagagacaatattgggatcgagaagaataggttttcgttgaagatacagtaatggagggagaaatagttgatgacgccgccattatcgtgggatctagaggagacacaagaggatttgggattaacgattgagctactgttcgtagtgatttgggagtcatcgagaagagaacgaagaggatgatccgggaaagtgggaatggtggttgtagtgaggaagaagaagatgagaatggagattagggttaaacacagagctgagtttccaattgttgaagaagaaatcaattccatgccattcagattcaggtttcaaaatctaacaacagccaaaccaagtttttagttttagagatttcagcatctgattcgctgatactgttatagcatctgatttgagtatcgctgagagatctgattgtcccatgttaaaaataaaaaagtttctttttttcaatgtgaaccaaaataagtcaattagtcattgattttcataaacttggtaatttaataatgtttacacgaattcctttgtaatcatttcctcattttcaagacaaagatacgtcatttacgctaatctgctcagaatttttaaaaataataacgtttataaaggggcgttccgagaattgaactcgggacctctcgcaccctaagcgagaatcataccactagaccaaacgccctttttgtttaccatatcatcttaaattttaataaatttatacaccaatgggtaaaccagaataaaccgatatccaaatgtgaatttcaattcgatcttggataacaaactcggtatttaacaaaaccaacaaacaaatgaaataaatattataaactttcaatacgcaaaacaaagtatagcgatataaatttagtggtcattcttcatcatcagtgacatctaacaaatcaaaatactcattgagatgcaatgaacaagaatcgtttgatgttgttacacgacacccatcaacacgatccttttgatcatcaatcatatctttagacatgccccaatccaacatctcttcttcactgtggtgtatcgcgaaagtgtactctccgctcgcacccaactccatcactctgaactcgcagttcccaaagttattcaaccgctcgaactctgccaccgtccacttgaaccattttgttagaaacactcgagatgtcagtccgtgggacacaatcactaggtttagttcacttgatggatccacttgatgcctgttcatgtccacgtctctccacatagactccagaaaacctttgaaattaggtgagacattgatcgatcgatgttatataacatccatgatttaacatccatgaaatttcttaataaatgaaaatttggacattgatctcactttacatatactagtgttactagataagttgaacactgatcaaaaataaaaacttcttttttttttgtgaaatataaaatgttgaatgtccctacagtaattttatttaaagatacagcctaagattctacaaactaattctatctaaattagtctacatctacaactttcaccagttgcacaattttggttccgtaaaatgatttttcttaatacttagtttattatacgtggaatacttccccaaaaaaatcaacaaattcgaaaaccaatcaaactatacgtcttcttttctcatgtcaaaagtcctgaaagtagacttgaccaatataaaacttataatttgaatttcactagttttcttatattaaaaaggttatataattcaacgatgttattttaatgcaagtatccatatcaataatcgtattcatgtctactataataaaataatgaacttactagaaacacgatcgtagacgtcggcggcggattcaccttcgggaaaacgatagaaaaatctaccgaaacgttccctcgtctccttcacaactctcatcctctcttccacttgaaaattcccaaaatcttgttctctgatcctacactcttccctcactcctatcacgcgcttcctcgagaatccttttcctacttccctcaaagtcgtcctcgttctctcgtaaggcgacacgtagaagtacacgcgccaattctctccacacgcaccgccgctttgggttgatatgagggctctcattttcttcccggcctcacgcgcttgcgctcttccttcttccgttagagggatcttgtgatcgggtgtggtcgcgtaagcccctgcgtcgatgttaccggctgactcaccgtgacgcattagtatgatgcgttttgggagcatcttcttctcattcaccatctttctctctctctttttctctttgtcgtgtaaagtaaatttgattttatagtggagagatcgatgattattatgtcttgtcaaaattgagagcctaccatacgagaccacgttctcaagagacgactctgtttaagatcccactctatttcacattatgcaaaatgagaaaatgggttttaggctagctaaataaaactcctttcactttatggttggcaagttgtatttgtatgtggaacttggtttaatgaaaaaaagctaaatgaaatttatgattctttaatttgtttattaaaatgcttttcttgtagaatcatgtttacgaaagacacaactaacctttccttacgattttacatgcagaatcacgttttaaaacgcaaaatcactgactttcatattatcaatcaaatctagtgatttttttctcaccttaaactataggagagtcctctaaacatgaaattgcaattgttttcttaccatctttttgtatttaactttttatgtataaacttcttcaacaacatttttgcatataactaaccaaaacatacatttttcccaaacgaggaatatacaaatttttactgtttcaaatttcccatccaaaatttgatacgcacacggatcacattcaaactcacaccaaataacaacaatcgacttatatatatgatcatttacccaaaaagaaaaagaaaaatgatattattgcacagagttgttgagcagtgcttgtatttcttcaagtgatcggccttttgtctcaggtaccaaaaagtatataaatacgatcgaactggcggagaccattgagaagatgaggaacattcctttaaaaagtaaacaatataacacaatcaattatccaataacagaatcataatagtaataatgagaattataataacatgtttatattctaggtatttacctgatgcattccattctagcataaaattgaaagtgtatgtgataatccaaccaaataaccaattggttacagtaactaaggtcccagctgacactttcacattcatcggaaatatctgcaagcaaaataaaattttattagattctgttgttgctgtttttgtatatagctccaaattcacatttctggttgaaacttgggtctaactaaccccactatgctataaattttggtcatatatagttcacacatcgttagtaacatttcttagacaaatatcttaataaaaacatgaaatattaatgttggtatacctcagccattataatccatggtagtcctcccattcccatggcaaatgacacaatgtgacccaagacgccgatgcaagtgaagatgggagtgagttctggaagaatgccaaacgactgcataacatttaacaaaattttgaagagataattagctagaaaaaggtacatatttatattaacaatgttgttaagaaattttattcacattaaatcctgtttcaatatacgtacgcatgtgtatatgtagaattaaaattacctggaaaccgtaagaaacacttaagagcaaagcactcaaacccattgcagaacaagaagcctgtttaaatttatataaaaattagcttgtctttagtctcatgaagaaagtcataactaataatacaattgattgaataaaaatattataatctaaccattaggagcgttctcctccccattttatcgactaggactgttgccagcattgcttttggaacctaaacatagtcaaataatttttttcaattttcatattggaatttctttagtgaatttaaagtatatttttcttcttattattgaaaatttaccataattgtggctattacggatgtgccaatagcacttggaaatcctgaaaataaaaaattataagttaaattttttaaatggattgaactcaaaatatttattggattgaactgaaagatgaaatattcatattatcaattaaaatacctcctttgttgaagaggctactagcataataggtaacaccggagctcccacacaattgttgcaaaaacattaaaccaactccgatctgaatacaaatatatatgtaagaattatttaaaatgttttcatgtttaaaaactaattcgaaagcaattgaacaatcatatttgttttaacacaaccgctattcaatataattgtttgcattagttcaaaatacttacaattaacggatatgcgtatcgtctctgaaacaattcagacatcttagtttcaccaccgttttctgtcatgtcaatggtatcctgaaaaaaaaagaaatcaattttttcaaaaaaaaaaacaataaatattgaaaacccaacattagtaaataatagatagaatatattaaaatgaacactaaattttgcatactctaattgtgtttgcttcacgagaaatatcgacgtcagatcccctaaggcgttgcaacgaagatcggcattctttatcacgacctaacttcgcctgtcatatataacagtatatatgaagaagcaccaacaaatatttacaaatgcttgaaccaagtttcaaaatatttaccggcttttgattggttataatcatagaaaccaatactatatttgcaaatatttaaataaataaaaacttaccagccatcttggagattcggggatgaaaaataaacaaaagacgtggaacacacatggcaccaatcctgcaaacatacaaacatcatgttaaattgaccggttcgaattacattacatctatcatttaaaaaaatatattttagattacaatctctaaacagaatcataccgactactgttagtagtctccatggaataaaattgccaatgatgaagaagagtgaaattccgcaattttgcatcaactgttcacattttaacaaaaaaaaaagcatgttatataacgaaaatttaatacatgtgttttaaaaataacagtaaagtaaattaaatagaaatttacgtacctgattggcgaacacaaacgatcctcggacatgtttaggtgcaatttcggctatatacaccggaatctacatgaaacacaactttttatcagtaattctcttattttagtacagaaatttgtgtgatgagaatgaatttggaaaaagaggaattaccacgtagctaaatataccaacgccgattccaagtaacaatcttccacagtccagccacattgcattcttcaaaatattaaaataaaaatatttttttaagaaaacacagaaattaataaaaggataatataaataaattgtgacaagtcagcaaaaggacaaacgacaagtagtttagacaaaaaacctgagccaatgctacacaaagccagcctgtgatacagaagaattcgcaaaacaacatcgtctgtttcagaaaaagtgggaaaaatggttaaagtaaaaaccggttcgagtcaaaccaaaccatgagacagcatttgggtttggttcacaaaaatcataaaccgaaacttgtattaatcttcttacccgttttcttcccaagacatcagcgactttaccgctgaatactgcaccgatcaagcctcctaatgtcaagatcgacccgaacattgagtactgtaaaatcaattaaatacggtcaatatagaagtaattacatgttgaagtaactaaagattattgattacatacttctgcaacggagagagataaatctttggtaatccctgcttgtgcacccgatgaaaaaccaacctacaaaaccgagaaattaagccggttcagtaaattcaccttcaaattcagagtcaaaccgaaactcggaagatattgaaaatcggttggtatgaaccgagattgaatcaagaaaagaagaagactcacgccacaaccggtacagaaggagcctgatacggcaacaaaggtgctgaggaaaacagaggcggtaacacgacattcaccatcgtcgttttgaggtttcttgacctctcgcggagacttcctcgataaaccggattctaagaaagcgtcttcgttagggaactttctctcacgtatgcttaagctcttcctgagtaaccctttttccatgctcttttgtctctccattccaaaaagtctcctcctgcttctttcttctcttttcttttttctttttcttttcttggggtttctctgttttggaaagcagatataagaaaagtgggtaaagaagagttgtgaggaacttcgaagtttctgagcagctcgaacttatgcaacttgaggattggatgtttttgtcaactggtctctggacactttgatattttataatttacacgtcatattttttttgtttttttgaacaaaatcataaaaacttttctaaatcttgtttttcgctcaatttttaatattcagtggacttggtcgtggtcttggacgcttgggcaaatcaaactgtgttcgcttattattttgtgtagaaacacaagtagcattttattaaatattattagagatttagaataggtcgtcccgcgtatatatatatgataaaacggctcaataatcaaaacgtctttattttaatcttaggtttgtcttgtttagaaatttagatccagtcacccatgcacagtcaacttgattatggatctgattttttatcatagataaattagatagtaatcatctttgcttttacgtttacgaatatatgtgtgtatagttgttatcttcaattattttatttaaaattaaatatgactattttcgagccaaatataaattgatatgtttatttatatatgtattatattaacttgaaagaaataaaatttatcgtccttatcaattatttgatggtttgaaaagtcgctcttggtcgaccacccttcgtttttctgaattgatatatttgaatttgactattctccatgcatgtgcatccaaggatccacacctatgaagttgatccatttattagtatctaaatgaatattaaagtgattaatatcccgccatatttgactatacgtatatatatctaaccagtaatttatatttgcaaaactgttctatacatggattatctgttctactggtcagaaatgcaataaacagtagagtgaagaagtcgaacggaaggttcatggtatagcggcatgaaagattatacatgtctttttcatcacttgtctgtaaaagagaaaaatgagacccacacctttttgtcctagattactttattgctactaagggcagaaacattaatctaagaaagttaagcaaatcatgagatacctaaatgtttcttctgattgatttcctgatgtaaggatttaattactggatgaaatctgaagcatggtttgtacagactcagtccgtttacatgcggttccttctagctatttcactcatttatatgaagtcaaaacctattgcttttagtggttatactttacatgtatcttgtatgtgaaaaataataactttgattatgttatattatttttcaagatttaactaggtccatacaaaattttgagaaacaaatacgaaaattacaaaatgtcatctgccgtttgcaaaatagaaaaaaaaaaaaaaaaactattttaagaatattaaaaggctcttgagtattgaaaacattgccggcccaatagaaatcaagtcattgaacaaagtttgttttggacctttctgtcacaactctgcaagaatataaaacaatttcatatcccaaaatcaaagttcgggtttgcctcattttcttaccaacgtctaaaaagatttggacttcccagccccaacatttataggcccatcattgaatacctaatcaatggtttgtgtaaataacttttttttttttttttttgtcatcgtgttaataacttaatatccttgatgtatcacttactctaatttatttatttttcacttactctaattaaaatttgtatagttcatattgtagacaattacaaacaaaaataattatatttacattgaaaaaccctcttttatgcttcagtcttagcttcgttttttttagtttgattttcatcatcaattgaattttatctcaatgaactagttttgttagttcgtatgaaatcgcatttaacttgggttattcttcaaacttctcctaaaaatggaacgtaagtaacatagtggaatgtaagaaaaataaaataatggagttaaggtttttacttaatcccttatttttatcatccacgaaatatttacatatgaaaagaagcatagaccaatcaacgattaggaccgtccgacattgtgtagtcgattagcgatttctagaatcactttccaattttaaaatagaagtaaatcgacgaaagtaaggaaaaaaaaaaaaaaaaaaaagagaaaacgtaaatcatgagagcatttccacatgatctctttgttcctttctgattaatgaaaaatactaaagtgattccacaaatcatgtctgatacgtgcaagttgtcaactaagatattttagttcgcaatcagatttaaagaacatctttatggatagcacttgcaatatatttactaaatgactaaaaattcaatagttttaacgaacaaagaaaaaaaaagtcaagataattgaaatatcagaaaggtggttaaacaattaaaggattgatctttatgatgtatgcaaatagatcaacagatgcacgtaacctaccacaaatctggttggcacagcgatagcttaattacgtctagggagagaattagaaaacctcattttcggaaccttaaaaggaaataaattgtctttattctttactaacttttagagaggataagaattaacctagttttatttgttgccctatcactatccgtatctgaaaaccctatgctatcgagaaaatataaaaaagaacaatgatttttgaaaaggaaatatctcacaaatcaattcaacttttaggaatgaggccggaaatgtggaacacatacagaacaaataagtccgaaagtagaaactgtgggtctacaggtttcagagaactggtagattgattaatagcattagcaactagtaaaagtaaaaaaaaaaaatgttaaatatacaatgaaagcaaaaagccaataccttaaagttcaattttatatttcttttttttgggtgtaaaactgggactatactatacatacattgggctaatttactgagacagagagatatctaaaccttatgttcaagtgatctctttctcaattgcacatcaaatgaggtaacaattacaacaaaaaactataaacctccccccaattgtaatctaagaaaaaatgaataactttaaacaagtcaaacttgatctcattgtagaaaatctgtaagagaagcttgtatatcttccaatgttcttcctttagtttcgggtaccatcgcataaataaagactatacccgcaccacatatagtaaagaagatcaagaacgttcctgaaacagattaatatatttcaaaaattaaatcagattaaagatctaatttttttttgagagtttaatgactctatagtatattatatagtagtatgtatttatacctgatgcgttccactctagcatgaagttgtaggcgaaagcaacaatccaaccaaaggaccagttggctaaggtaaccagagtcccagcagaaactttaacattcattgggaatatctgcaaaataaaaaatgtaacattttttagagctggaaaaaatatatatatgtcggtttttgaggagttaatgttaatgttcatgtttgtttacctcagacatgatgatccatggtaagcctcccatgcctacggcaaatgaagagatgaaaccctgtaatatgatgtcaaattcagatcaagttatacaagagctatactttaagttgcttgtttattatgtctaagaaatgactttaaacgtaccactacaccgatacatgtgaaaatcggagtgagctcatcaagcatgccatatgactgtccaagaacaaaagtagaaaaattttagtataactggtaagaatctccaataaacagcagcaaaaaaagtttgtatatatctttggttagaaagcgaatcgttaatgttaattacccgaaagcagaaggaaaaactgaggagcaagctgaaaaagcacattccaccggtagaggcctgtaaataaagatcattcatctgttaaaagatatatgctaaattttgttgcttcatttgatatttgaccaaaagatcagatagcaaaatcttaccaatagaagtggtcttcgtcccattttctcaaccaaaatcagacccaatagagcttttggtatctacaaaagcagaacacatgagcataagtgtacttcttggcaagatttttcacgaataaatgaaactacgtacaaagacataccatgatcactgcaagaatcattgagccaatgctgcttggaaaccctgccattagtaagaaaatatttgttactcccaaatgaagacagtaaattatcgtaacatgcgaaacagagtttgtttatctatttacctcctttatcaaatacgctaccgacatagtacataagtcctgagcttccagagagttgttgtagaagcattagtcccacaccaatctgaacaaaatgtcacaaacttcagagagtaagtataacggtacaagagaaaatcaactttttttgtcacaaaacgtttgagaataaacttacaacaacagatggagcatatcttctctgaaacaaatccataacccgcgattttggtccttcatcaaacaagatcatggtttcctatagttgacatttccaatgatttgttcattagtcatgttttattgaaaacaacacaatttaaaaacagagagatgtgtgaaaagttgcaatactttgatagtgttggcttcttcagagatatctgcatcatctccgcgaagactttgcaatgaagctctacattctttttcatgtccccattttccctatacaccattgtaaaccatattgagttttacttcacactttttttaaaaaagatcaaaacttaaaaagggctaaacgtaccagtagtctaggggactctggaataaagaacaaagtcacaacttgcaacgcacatggaatgagacctgagagacagaaaccgataaacttaaatcacttcttgatgaaaatttcataactaacctgctagaaagaaaaaaaggattaggaagaagcttaccgattaaggccaagttacgccaatgaacaaaatttccaatgacgtagaataaagacaatccacaactctgcatcagctgtaacgacatttgaacaaattttaagaacattagtataatatatatcttttttattttatggttataagaatttattctctaattattctttagtttacctgattagcaaatacaaacgctcctcgaacatgttttggtgttatttctgcaatgtaaactggtatctgaaggcaacagagttaacacaaagtcagtaaaaataaataagtatataatacacaaaataaatggaaaaaaagaaagtaaaagaattattaccacatagcttaataaaccaactgcaaatcctgtggatagtcttccaatatcaagccacatggagtcttttgctaatgctactgcaacccaaccgaagatgcagaaaatttgagcaaaccacatagtctgtttaagagaaaaattcatcagtacatgatcttgaaacatatgtttgtatgaatttcaaattgtcaggaaatttaccccttttcgacccatgagatctgcaactttcccgctgaagatggcaccaatcattcctccaaaagtcatgattgaaccaaacatggagtactgaagtagtaaacaaaaacaaaaaaacagagtaatttaagcaaaactagcactttttgagtaaagattcaagaaaagagagagggttgcttcttacttgtgcaacagagagacctaaatcatttatgatccctgtttgagcaactgatgaataacctgcctgtaaaatccaaccccaaactttcaaatcacagagcaaaacaaacagagaaattgttttaaaaaaaagatgagtgatttgatgactaaccgcacaaccgaagcagaaagagccacaaacagaaacgaaagtactgaaaagtacaacagcagtgatacgacattcgttgatgtcgttttggttcttcctcagtagcaaaccagcttccaagtttcttgagttctccgacatcgtcatctttaacttctccacggagaaagaacagagagagttttgttgaaagggttctgaagttatatttacgaataaatatttgcttttttgtcttccataagaggactgagtttaaagctgatttatattccttgattaatggaggaggaaaggcagaggtcagcttccccaatcttttcttttgtgtcacgtttctgttggggttttattcaattttatatacacgtattttgttttttaatttgaaattgtatcttcttctgttttccttatttaaatttttaaatattgtgtaatttgtaattggactggcgtatgaattttttgttgtcaatacgtatgatatttatttttgtttactttttttttttcttggccgacaggcgaatgatatttatttaaaagttttgcctttttgaaagaatatttatttaaagttatgtgattcatcatcatctttatgaaattgtgttttgtgtcttagtggatgctttgattattttatgctagttgttatccactctttatttattgggtaattttgaaggtggtccctataccgaatcaaaaccgtaattgggtgaaattttgtgatgaattttatgtaagtgaatgtctagatacatttatgaatccgttttacataaaccagtttagtgttaaccggtctaattaagtttttcttttctttttttgtttaagctttggttttgtctttttggtctgttttttttttatatataaccaaacaatgtaactattttgttctcaaaataaaataaaaataaacaataaacacatgccacatgttctaccgttatctaaagatcaggatatcctagctactatattcttatccatggagcaaaccagataaaaaaagtttttttttttgtgtgtgtgtctttttgttatggtccagttcaataaccaataaccatttgttagtcatatttgattcagatttttttcccaaactattccttagacaatctgacgtcattactaaacaaaaatcatcctcaataatttaaaacactgaaatatccgataattatttaatattttaattctaatttaaaacactaaatattattattttttgaattaatgaatcgagccaaattaatcatctatttagaatcgtctagagcgtatacgtactattttggttttaatagaagtgtgatcatttgagaaaatccaatgtatttttttccaaaaaaatattatttaattacccatagtcaagattaattataaataatatacaacagaattttgtcaatgtaaagctaatttgtttattaactcgagtataaaatgtcaaacattatattgaaaaacgagttcttaaataatctggataagagtaaaatacaatatttcttacgtgaataaccaacttacaaatattatactacctacgtagttaatcaattcatcacaaattgatatgagttgtcacacttgctatagtttccatgcaataaatagtaaacgcgttgatcgtggtttgtttgaagtttacataaaaaaaaaaaagtcgtgcacgttagctattgcgttagagaaaatgatacaactcaacattccttgtaagcaaatctagaaactactacatatccatttttcaaatgtcttacgttcaatcaacggtttcccctcacacttcttcatatattttgacatttttgtcaatatctaatttgatacgacagacttttctctttctagttgcggacacaaggaatcatcaacaacctttgaattttcccggcaaaaaaggtatttgttgtcctatctcattctatcaataaaaaggaaaaaagatcaaaggcagttttaggcgtttaaacaaaataaaagatgctgccaaaaagaaaaacaaaaacacgatttaggaatgcttaaagaagagagagagcgatgttcatttttgtagccttaccaatgttacgaggctccacctcgatagagcaacattacattcactaaaatcaaggaagtacaaagagtaatcaacgttattcgtcactatcacaaattttatgctgcatgtagaggtaacaggttgaacgcacgttatacaaatggttggttcattttttctttgaaagaattgatatgatggattaaaaaacaaatttacctaaaaaaaatgaggttatcgctctacaattgtcgttcaccattcaacacttttactggaggacgacgtattacatacttacgatgtcaattacatcaaaaatatcaaccataattattaggcttgttccttgaccaaaaaataaataaattatttggcttgtttttctatactagctatttttttttttgctaaacaaaatatactagctaattacttataaagttagtgagctctttatcaaacatttaaacaaagattatataaacaataaataccaacttagatgagttttttgtttttgtgtagcagaaaaaataaaaataaaatgaataatcttggtttagctggcgggaaagtaggtttgtagcagaccaattttgatttttgagagacgcttacgtgtggtgggtctgttgatcctcgaacgccgtgtttttgcttcacatgatcgtaacaataacgcttatgcatgtaatctaatacatcagccgataacatgggacatttgctcccctagatccttccaagaaccgcccatgtatatgaatatatcagctgtctatatggtctcaagtcttaaccttcttctaccaaaaataataaacatttttaaaccctactaaatggttttcatatgttcattttattgttcccttcccgtcaccgcatccaccttgcttggtttccgaaccagtgcccctcttcgctgttagaaaatgggttcaggtttaccataattttgattattatatttgaactagctccttatcaagctcctgatttaatctgatttgtatattcaaatctttaatccgattgataatcgaatcaacacatgctcagagatgtattaacttgtattttgtttatatttggtcttaaaataagagaaaaatgcagtagcaacaatgagaaaggtgattcatcattgatattgggacaaaaaaagttagtgactcgtatctttaagtatcatgatgttgggattctttaatgtcttatgtctagcctccttttactgactcattttaagatttgcaagttttagtccattagttccatgtgacacaaataaaagtgggtactccaataataaggtgccaggaaatgggtgaacatatcaattattatattggcctaaacttctacgtccttttcggagtgaatggtctatttttgcttcctacgagtttgtattaaactaagttgccttccgtaagtagtaccggtatctttatattcgtggattttcaaatcaatttttattaggcatgtttttggcactaacaaagttgagctggtgtaagtttgacttcaaattattgtgtatttggatttggatttagaaaaacttaattaacattggacagaaataactgaatcaaatgtaaatacaacttttcagtttttcatggtatttggaggattaatggttctttaactagttaaattttgagtattgaaaaaaaaaaagaagttaaattcaagtaatagaacaaaaacaatcaaaatcgatcctgtctgtaaactattaactttgaatgttgttaatcggagagactaagaaaaaaaaaaatataaatgaaagttctattttttataacaaaaatcgctaaacttacatatataaactaaaattcatgtgatacaaaatatactgaaattactgttaaaattttctccttgttttctttgatttcagaaaaccaagcaaaatctaaagtgataatcatattaacaaattagtcactgatttgagattctatgatgttcaagtttgtaagaacggcgcaaagaatgtattgggaatgggaagagataggaaaaatccaggaatcttgaaaataattctgaaatttgtctagtaattaaattatgaaatataatagaaaataattataacttttgctctatatggacaacttttccaataaaccacatagccacagtagttatggtaaactagacaattattaaaaactactcgataatatgatgtttgtgaaggctgcttagaggagaatcgagtgattttggatcgtgaaagaatcaacttccttggacagaatcttgtacagcaataccaacacatcttgttttgtagtcggaattacgtgtatgtgatcacactaactaaactaaacattttttatttggatagagatgaagtgctactatgggtctgttgtatgaaatctgacttatttgttaaaatataaagaaattttacaatcatgggaatattgtacaaaagtgatatagtgttacaaacaagtggagcttgatataatatttgttgtagaaaaaagtgagttgagtattatgtacttgtttaattggaataaatagcgtggtacattggatccgttctctctccttcatatgtccaatatgcgatatgtatatattaatacatgaccacgatgttgtctatacattcatgatcttttgatcgtctttatatattgattttccctcaaatactttactatactataccattatagaataaatgagctttgatatttaagaaagtctagtaaatgagtttacttttcatttcaattggttcacgtttttagtatgatgatcaccgtacctaccaaagcgacttcgatctatatttgagttattaggttaggattttaatctggttgatgaattctacctatgaaactgatccgatatactgatcggtacatcatttaaagatcgagtccattggaatacatattctaattaatgacatacacgtaaaaaaaaggtgaaaatgatattgaagacgagtcacgcatacatagttggaatattacggattattttaactgttaaagttttcataaccacaaaatcaagtacattaacatgcattggtttcaggtccgaaaaaattatgagcagatgtccaatattatttttacctaagaaagacattaaaaacgtaacttttaaggttactaaaaaacaaacaaaaaaacgttacttttatggttacaatatatgatgatgactcgatgagtttccaacttgttaaagaaggtgaggaagactaatgaatccatttatttacaattatataaaagtacaccactttttgtaagaatcgaaaagtaaataactggcggtaaaatcggtcataagcctaaaaaaaagtttagatttagagctctacaaacattagggccaacatagacggacttgattgataaacgacaaatattaaaacaatggattttaaaagagattttgctatatgataaatgagggaacagcgaaaatatttggaaattcattccaaacttgtgaggacaaaacaggatcggaacggtatcttcattaatgtcaggataaggactaggacccctgatatgggcatattctagctttctttttatcttgtctgtagacaaagttatcatgttgatcgggggagttgtgtggcctatcgttcgttccgatataaaaggattttgtatgatccttaaagtcatccataaaatcgattgatcaagaaaacgttgacgtataggagaatcaacctaactaatcgcgggaactagaagaagactcttcgcatttgaatgcgtcttgatattgctttctttattacttgcataccaaacataactctctccataccctaggctagcaacattcttgcattagcgtttgcgaatggtttcatttggaaatgacgatgactttaatgattgacctatgcattcatatcctgttctcttgtcggtatattaatattccttcaataatttccctagcttataaaaatactagtaaaaagaatgagctttgatgttctaaaagaaaactaataaatgagtttattattttttatttcagtagttcacgtgtttagtatgatgagcagcgtacctaccgatgcacgacttggatcaactctattaagttaggtttaggtttttaatttggttgagtaattcttactattgtactgatccgatctgatcggtacacaaatcaaaatcaactttgtagtacatgtgttcgactgactcacatatcagaaaaatgataaatgtcattgtagacaatgaagcaatactaatgtagtgtattgtggttgcggcttcgttatgcgttttttcttcaagttttgttatttcgtgaaaatcaacaactttctcattcttccgcataaaccaaatacatatcaatcaatgaacaaaagccactagtgaagctaaaaagtttctcggagcagaagaaagcgaactgaacctgctatattgtgatagtaaatcggccaaaagataccctaatgtttcacatgaagtaaatctcacgaatacgctacatcaagaacttagccccatatatgtacccgaagactaaagctgtaagtaccaaaaaaagaaaggccttagttatatactgttactacttactactgactgattgtgttagtgaccgtgtgctacaatctctaagccatcagatatcaccatgtctcaggaggcattgaccaaaacgaccctgaatacccaagaccctctgccactggcaacgaactggtacccgcttgtgtttcgttattactaacgggatagcttgggtgccctataaatgcttgaatttcatctgctccatcataagatgttgaaagaggcgcaggaggtgtttgagcttgtggatgaactggacgggtaggatgaatgatcatatggtcatatcccgtaccaggtgctacgctgcctcgcatccggctttgtgggcgccaattctcagtgttagcaggagtcaaattcatgaactctcgtgatgagaactgtcccattgcaccaccaggattcagtatttggtctgtggtccctccgtagctgacaggtaaagtttggggatgtgtaatggaagatggcattggtctttggtcaggggtccctccgtagttgacaggtgaagttcggggatgtgtaatggaagatgacattggtctttggtgggcgtaccctccgtacgtggcaggtaaagtttggagatttgtaatggaagatggcattggtctttgatcggcgttccctccgtagttaagtaatgtttggagatgtgtaatggaatatggcgtcgatctatggtcagtattccccctgtagttgacaggtaaagtttgaggatgtgcaatggaagatggtatcggtctttggttagtatttcctccgtagttaacaggtaaagtttgaggatgtgcaatggaagacggcatccatctttggtcagcgttctctccgtagttgacatgaaaagtttgaggatgtgcaatgtaagatggcactggtctttgctgtgcaggggacgggctctgattctgcaaacatataagaaaaaacttcagagttggtaatggtaatgtagcttcaccagatatttacgcatacgaacaaaaaacaactctatggtaatggttgacaaacctgcattgaataatgatgatgcgaaagaggtgcaggtggaaattgagtttgaacacgtccatagatgtggttccatctcgccatcaaatcagaagttcttccttcacaatttccaagggacgtaacatgtgagccttgaaactgagaagactgagcagccggcattgatgtgccaaagtttgccgcattagtagctaatatatcttgtggagatggggttggtgagaatgtcataggtaaggcttggcttgctggtgaatctcgggtgtttattacttgtggtaagttcacgaattgttgaccatcaaaggcattcaaagttcgtggcagctgtggtagtgtgttggttgaagtatgagactggttaagcatagtataatctgaagcaggcctatgtgtgtcatttgacggaccctgaatctcagataaacaaggattatgttcttcgacttgggtggatgtttccatttcattctcatctctggcaggattcttaacagtaggccccaagttgatgaaactatttgggtctccatggtcatgagtggtttctggcacaagttccacgtcctcatcattttccgtctcaaccatccaggttccatcagcagagataaccacatctgcagcattacgtcccacttcttctagaatctgtggatattagccaagattgtttattcaatctaagacttaaaaagatgtattcactaagcaacaaaaataagctacttgcctttctcagtttttgatctacacggatatcagtatagcaaacagactgattacaatgcgggcagcgccatgatgtcgtcttgtgttcatgttgacataattccagaaatcaaaacactacagcagaaagaaacatataaaacagagatgagggaaatatttcaatagattctaaatttgccaaaacttatctcttttactagcaatcttcataatcaagcatgtcacacatttatatcgtattaacttacaaaaatcatactttgagaagacatattatggcaacagcgaagaaaaccagagcctagaaattcatgtattaatggaatagttcttttcataatgatttaagtaatgaaaacaagaaacatcctatccttacttatgcttaacagaaaatgcatcacctgaagatgtttacagacatgacccttcacaggaagtttgatacgcgttcggctgttataattgtgatgattaaatcttaaaaggttgaggtaactgtgaaagcaatttcttgagatataaagcaacataggaaaaacatccttagatacctgataggacaactgagagatatcctcgatggcccctcaattatgtcacaatctacagacaaattggaaaagacaaataatgtttgatctggagttctcggaatacgattatatgaatacatacgactaaatgatctaatgacttcatatgtggaaatgcaataaacttctaagtcatagtttcttctcttagtcactaaacactcttggatatacctgagtttgatccaacgacttcaggatgaacataatctttcagtaacggtttgttgggcagtggtatgacatccatgaaagcaatagcaatcaagtaactacctatagcaaatgggtatctgtccattattactgaatatgaggagaggaactaaagatatcttcattgaacagaaacctccaaaacagcctattgcttgtagaagatttgccccaaggtttagcagggcagtaacattagttggaagctgcggcccagactcctgaaaagaaattacaataaacaattacttgcatcagagtacgtagtaagtacttccaaaacatatccaagaaacaatgaaatccacaaaccattgagatgttaactctcttgtcaatgccctttccattcaacaaaaagctgtaattttcatatgtaaatcaatatggctaaatacaaaaactgcttcacaaacatccggcggaaaaaataaagcaatccaaccacacctgactccttgtggatgtacaatacaattagatctgcttatgtcctctgtccgaacaacaaataatccctgaagagcacaaaattccgtaactatattgagcataagaagcaggtacataaacaaagattcgaaacgaaaaaatgctgaagtgacacgacgagcaaagctgaaaggtatagctttgaaagtatattcatgcatcttctaatctaattgcatttaaaacatatatgcaggagaaaccacatatgcacaatactatataagcgaccaaaaaaattcaaattgacaacgcaaaatctggtatcaagacacattcataacttaaattccaatacatacaactttctgtttgggagaatgtggcatcttctttgaaatatggaagtccttcatcatcatctttgattctggctgcgagaaggaaacaaagctgactaaaacacacattaaaaagaaaggtgctaagaactgaataatatataaagtcaccttagcttcaaaagaaacaagaatatgccccagcttcacacatggatagaacctacagatagaaaagtaggagattgaaacaaaccaaggttttgatttttagttaactagtattatttagagtagcagactggtaaccttgctagtttgaaataaatgaatgaaaacacatgaaaagcctacctctcaatgacctgcgatattagagtgacgggactatttacacaagaggtgacattttcaggacagctgaaaccattccacatctgaacaagaataaaaacatcattattcacagaaatcagattactctctaatcaccacattcggctggaacaaaacataccaagtctatgatagccaacaattcttgagtctctctctccgggaaccatccaagctgacaagcactctatgagagaaacacaaattcagtgttacatatccaaatcagcaaatttctgccgaaattgacttgagctggagttgctaattctaactcttttaccttgactgagatcatcagcgccattaccaccgccctggtttgataatcatcacatttacgtcggcacacctacaccaagtaacacacataaacaagagcactaagattaaactaaaagcaccttgaaaaatcgaaacttttacaagacaaaaaaatataaacaaacattattgaggattaaagcgagctcttgaatattccctggaacttcatttctcccaatagccgcatcgatttcactgcattcaccaaatccaggagtaaagttttcagtgaagctcgaagaaacccagaaataaagaatttttttaggttaaaacaaagatgaattcaacggaaacttaaaagagagattttttacttagcgagagagatgcaggaagcttgaaactccttggtgttgaattcagcacgaaacccaaacctagcagacgtaattagaagaagaatgtttagttgaacccatttttatatagaaactataactgtattaaacaattaatttgatattacttaaaaactaagtaagaaaatcaatagtcaaatgatagagacagcttgcttgatatttatgcaaatgagaagaaaaaaagacctagaagtcgccggaataaccattcttctccttctccgagaagttttccgggggagataatgattataaaccgacccacgacaaacacagccgcttgagagtagcttgtcgccttttatacttggcagtttacttgtttctttattttacaactcggtccttcagattctgatagtttttactaagtccccttctactttctactgtagtctttttgattctttttctcccactcgtttttgttgtaggcatttatgattggacaagttaaaggcatttatgattggacaagttaaaggcatttatgattggacaattcataattttaattaatcataacagaacgttaatctctctacattagcctgcctgcgacggctcatctcccttactttaacgtttacactttaatatgtgtcactctaatcaagattagagctcacaaatcacagttttcaaatattaaatcctataggtaaaatcatagccattattactatttaatcaaagtgagagaaaacgcttatttaaccaaacattaatatacggttaaaaagactattcttttcttttctttttgacagcggttaaaaagactattcaagagacttaacattacgtataatccatacttagattttacgaaagtcggactaatgatgtttgaatctcttcgagtgttcggcctttcgtctcaggcaccaatgtccatatgaatacgatcgtcaccagagaaactccagaaaatatgaaatatgttcctataaatccaacaaaccaaaattaactatataaattattcgcttatgtttactaaatagttgagcagttatatttgatgtgtggaatcttaccggaagcgctccactgtatcatgaaattaaaactatagatgataatccaattaaaaaaccaatttgacatcgttacaaggctaccggcggtgattttcacattcaccggaaatatctgccaaattttgaaaatcaattatgaaatttcatatcaaaaaacttaatttatttgttaagtttagtttaaaagataagtaaacaaatacctcagacattataacccatggtaatccacctaggccaatgccaaaggatgagacataaccctggttaacatatatgacttggttgattagtgctctggtttttataaaccggttggtccattggttgaatttattaatagactgaaagtaagtttggcatttacgtaccactaaaccgacgattaacataacggaacataacttctgaaattcaccattcttctgctcaccgaggaaaacataattaaataatactcttttatttttctaaaggaagcaatttagttactacgattaagtagttaagttttgctaaacctgaaggtagtatgaaaggccaataaaaaatgagcatatgcacattccgatagaagaaatctgcaaaataaaaaacaataatgataatcaaatctgaaaaatattatttagctaaggaaatcagtaatgaattttatagtgaaatgataaccataagaagtggtcggcgtccccatcggtcaacggttaacatgacaactatagattgcggtatctttacaaaagaaaaaagttgtgattaaatcataaagatgaaatattcaaagacaaatagatgataaagagtaacaaagagaataatgtaccagaatcactgcgaggatggttgttcctatgtcgcttggaaaacctaattacacaaaacagtataattaaaaatcatgagatggtattggctgttgactacaaacatattaaaccagctgtgacatgcgcttgatttgtttggtttaccggctttgtcgaaaattcgagcagcataagcacttatcgccgcactcccacaaaattgttgcaagagcattaaacccaatccaatctaaccattttcaacgaaactaataaacaaaaaaataacatatatatagttgcacaaatatttactttatataaaagatgattggtgtaatgatgttagatgagtcttacgattaacgaatgtgcgtttccgatatggaacaagtctcttattccactttgagactcttttctggatatttccactgtttcctgtttcatatatattttggtgttaattctttttttcatactattaaactgttaaattgttttcatataacatgttttcttagacaaagaagaatactacttactctgatttcagcagcttcctttagaatatcactattttctccccttagttttttcaacgaaacttcaagctcttgatcttgaccatacatcgcctaattaagagaggaacattaatatgtaaatcgtgcttatagtactataccagtaaattaattataaaatagtaataaaacaactgaaagtgttaaacataccagccatctaggagattcaggaataaaaaataaacatatcacttggaaagcacttgggattgcacctagtcgatcgtagattgaatatcaagaattagtctaggaatatgactcaagtacaaatcttattattaagatagttcagatgagaaaaatatggttacttaaaagagctaatgttcgccaatggaaaaagtttccggtgaagaacatgagtgaaatcccaagacattgtagaagctgcaagttcaaacgcaagatgacaataaatattttgcttatgaatttattgaaagatattactataagttatttgatattgtgtctctatttgttatttacctgattggaataagaaaatcctccacgaaatgttttgggtgtaatttctgctatatacacaggaacctatttattttataaataaaatggagtaatacgacattaacactctaataaaggactagaaattttgtctaaatgaaaaggggagagaaagttaattaccacataactaatgagaccaaccccaaaccccaagaagagtcgtccagtattaagcattataatatcctacacataatcacagtaaataacatgttaactttttaacacaaaatttgagtagataaatatatagaaagttttaaacagggagatttggagaaacaaacatgtgcaaacgctacagcgagccaaccaaaaatacagcaaacatctgagatccacattgtctgagatatcaacagacgaataaatcaaaacgcataaagaatgacgtcatcatagaagatccaaaaaaattcaaaagataaaccggaaccggtccaacagtaataactaattacctgtcgacgaccaacgagagcagagattttaccgctgaacacggcggtaatcattcctcctaatgtcattaccgaagtgaaaaacgaatactggccaacatagaagtagaccattcaaaccgggttactggtctggtttattgaaccggtttgagagtcttaaaagaaaaaaatgattttgatctatatgatgaacattgaacacaggtgggcttacatctgcaacggaaagtcccagttcttccatgattttggactgagcaggcgacgaatatgacatctacaaagtatgttatagttatgaaaattatgcacgaagaaattaggattctaaaactgtaatatccaaaatcagtggatagcaaattgagagagaaaggaagagatctcacggcgcagccataacagaaggatccagcgacaacgacggatgtgctgagaagaagaccagaagtgaaggaagaagcttcttcttcttgcttattcagaagatgtgattcgagtctttcagattccatcttctttctttgattcttatccttaactttgaatagtctcttcaagcttttatttggccatgcctcattggtcgttgtcacatttgactaatcttttattaatttgctcattcagtattttgtaatgcgatttagaaaattgagttgcaagatccaattagtagtaaccaagttttaagtggggtgtgaattttttttacaaaagtacataatcatatgatatggttataaatattggtacataatcatattatacgtttaaaaaatattgttagaataataccacatacagtatattgattattcttttttctgtcaacaaaatatattgacaaaatttatcaaagtaaaaaaattcggaaatccatatcccccccctccaaatcggataatacatgacttataaatgtaacataaaagaacaatgtctggcattgtggagtaaagaatcaactttggatttatgaaagttggcctagtgattgttgaatatcttcaagtgttcggcctttcgtctcaggcaccaaagtccatacaaatacgaatgacatcagagaaactccagcaaatatgaaatatgttcctgcaaattccaataaaacaaaataactatataatcattctctttaatttcatatctaagttattatataatgaaaatattaattcgaggggacattcctaacataaaattctctaatcttcccgttttagtatttttaataatttaaaagatatatttaccatgatttgattatacataaccctatactctttaaacaattttaagagctggttgtttgtttatttatttattttcattttattgtaataattattaaatactgtcgaaataaagcatttttgtgttagatgtgtaatattctgaagaaacaaaaatgtcaaattaatggatagaaatttaccgaaagcactccattgcatcatgaaattaaaactgaaaatgataatccaactgaaaaaccagtttgacactgttacaagactaccggcggtaattttcacattcaccggaaacacctgccatagataatgaataaattgttgtccaaaaaaaaaaaaagataatgattacattatgaaatatttctagtttaaaataaaaaaaaaaacaaatacctcagacataataacccatggtagtccacctagaccaatgccaaaggataagacataaccctggtatatagtatgacttggttgattagtgttgtggtttcaacaaagtaatatatgaattaaaccaaaaatagtaattgactgaaacaagattggcattcacgtaccactaaaccgacgattaagataggggaacaaaactcttgaaaatcaccatggttctgcttgtgggggataaataatatttagtctataataaccaaaaatcaaacgaagttacaaagaataaaatagttaagatgactaaacctgaagatagtaagagaggccaattaaaaatgaacatatgcacagaccgatagaagagctctgcaaaaaaagtttcaaaccacaaataaaatatttatctagggaaatcaattacgcaaattatatataacgaaggtaatgaaatgattaccatcaaaagtggtcggcgtccacatcggtcgacggcaaacatgacaataatagattgcggtacctaaaaacaagaataagttgtagtgaaaatgtgaaatactatattttcgattataaaatgttaaatactaaaaagacaatgttttgatttaccaaaataactgcaaggatggatgttcctatgtcgcttggaaaacctaaatacccaagacaatatattcaaaaatcgtgagatgaaatgcgatacaaaatcaaacaagatatgacatgccaatgatttttttttttttttttttttttaaatcatggtttaccggctgtgtcgaaaatacgagcagcataagcacttatcgccgaactcccacaaaattgttgcaagagcattaggcccaatccaatctaatcgttttcaacgaattaataaacaaacaaaaacaaattaatctttatttatttcactaaacaagttaaaacatttttttccgttaggacttgggagtatttcattcatacgtataggcagaatgttagatctacatacgcataaatacatgtctatctgtttattaagttgatcatcaataggtcacaaaactagataagaactcgatctcttctaaattatttgtataaatgataggtatttgatgagacttacgattaacggatgtgcgtttttcatattgaacaaatcttttagtccacttcgagattctcttctagaggtttccactgtttcctgtttcacattttaaaccgaattaatagttaaccaaaatacgtatatgttagccaaagtagtagtagtattttcggaacaaacaataatactctgatttcagctgcttcttcgagaatatcaccattttctcctcttagcctcttcaaagtaacctcaagctctcgttctctaccatacatagcctaagatgaacattaatatgtagactgtaccttttaaatataatattaccaattaaacaaataaaaaacaaactttaagtgtgtgaattaccagccatctaggtgattcaggaataaaaaataaacatatcatttggataccacatgggattgcacctagtcatagattgaaaatcaagaataagttaaataatgtgaattaagtacacacattataattttttatgatttgagatatagttcatttagagaaaaaatatagttacttaaaagagctaatgttctccaatgaaaaaagtttccggtgaagaacatgagcgatatcccaaaactttgtagaagctgcaagttcaaacgcaagataacaataataaattaaatattctgaaattataagctgtttgatataatttgtttcattcttacttgattggaaaaagagaatcctccacgaaatgctttgggcgtaatttctgctatatatacaggaacctatttgttttgatcaaatcaaatggtgtaaaacgaaattactatatcaacactttataaaagtaacaaataatttgttttcaaaacagatgataaagttaattaccacataactaatgagaccaaccccaaaccccaagaagcctcgaccaatatttaacagcattttatccttgaaaataaaccacagcaaatgaaatgttaactttattaaaaaatactaaacttgtgaaaaataaatttaaaagatggagatttggagaaacaaacatgtgcaaaggctacagcgagccaaccaaagatgcagaaaacatccgcgatccacattgtctgcgatcaaagagatgaacaaatcataacgtgtatattacgtcatcttagaaggtcctacaatatcaaaaacaaaaaaaaaaaaacagtggcataataacatttgaatacgaaacaaaatttaattacctgtcgacgaccaataactgcagcaatttttccactaaacgcggccgtaatcattcctcccaatgtcattaccgatgtgaaaaacgaatactggccaaaatataaatagaccattattttagtaaattaggagtaataattgattatcgatgtaaaaaataaaattagttattgatttggtcacacacatggatgacttacatctgcaacggaaagtcccagttcttccatgattttggactgagcaggcgatgaatatgacatcttcaaattatgatagtgcacaaaattaggccacaagttgacatcaactcaaaatcacataatattcaaataacaattttgagacaaaacagctattgaacaattaccaaattcaaaacagattttgattaaaaaaataaaaattccaatctgaggcatgttagttgagatccatgaggaacactagaaaaccaaatgaaagaaaaggaaagagtgatgatgaaatctcacagcgcagccataaacgaaagagccagtgacagcgacggaggtactaagaagaagaccacaagtgatggaagaagagcttcttgcttcttcttgattattcaccagaggtgttttcatacttccagattccatcttcttttgttccttctcctaattgcttttccctgtatttctctgttctttaatagtcttcactcttgaagcttgtatttggcagtgactcattggtcgtgtcccatgtgaacaactgttatagatatttgttgactatatatagtaagataatagaaatctctttatgtcggctatcgtataaattattgatttattcttgttgcttgatcaataaaggttacatcatagaactaaaatcatatgaaaccgaatcgatcaaccctggccatcttttaaataaccatcaatacattgggatgatcaatccacaataaatgtattgatgtaaattaaaaatatgaacttgtaacagatcaagattcagggtctaaaattatagaaagcttaataatggaggactatttcactaaaatcacttttcgtttgtacattattttcaaaaagtaaaaggagatgtacgaaccatagatcacataataattgaaagggtagatgatctgccacgttggcaatccgtgtgatctaaagtctaacaaatcacaatcaatcttagtagcctatacatatagagaagagcaaaaccctaaagcccactcatcttctcaattcccagatcatctacaatagtcatttctcttcgatttcttcaaactctcatcaaatcgtttatctgttctaaatttcgaagaagacgatgagtacaggcgcaggaagcggaacaaccaaaggtggcagaggaaagccaaaggccaccaaatccgtctctcgatcatctaaagccggtcttcaattccccgtcggaagaatcgctagattcctcaaatccggtaaatacgccgagcgtgtcggtgccggagctccggtctatctctccgctgttctcgagtacctcgccgccgaggtaatttatttttcttgtcttccaatttggttttcaatttcgatttggtcacatctgaattggatcttgtactgatttgattttgatttggtttgggttgataggtgttggagctggcgggaaacgcagcaagggataacaagaagacacgtatagtaccaagacacattcagcttgcagtgaggaacgatgaagagttaagcaaacttctgggaagtgtgacgattgcgaatggaggagttttgccaaatattcatcagactcttttgccatccaaggttggcaagaacaaaggagatattggatctgcttctcaggagttctgaggttcttagacttcttagttcagttctcttgtttggattcggaacttgtaaaatagaccctgatggtgttttttggggatcaaattaggttttaaagctaagtatatttggcttttgcctaagtatgtttaattagtgaatgatatgatatttcggaacgaatcatgtatcaatggaactgaattaatcgatatatcaacccagaaacattttgaaacacaaactatgcatacttgattctttattgcagatacatgcaactcatggagcctaatactaaacattgctttgatcatgtttcaatttaaccagactcattttttaattcacccagggagtaaaactcattaggttttgggcctaactgcctcagtcatggtaatcctgaattaacttcactaagttaccctcatctgttggttcgcacctgaattagctcgctaaattaccttcatctgcagttttttttgcttaccaagaatcgagttcttgaaaattgttataataaagataagcgcagaacacttaacaaaatggggatgtagctcaaatggtagagcgctcgctttgcatgcgagaggcacggggttcgatcccccgcatctccaatctaatttttccaaaaatattaattgcctaattttgaaatcatgtgtcaattgagaatcccatgtttttttttgttttccttcgttaataatgcaaagctcaacagcgtctatctgaaagacggcaaataatttaacattttcatatattaccaacgtatctactttgatgcgtcagaccgtcagtggtttatatcatgttattgtgatgcaaacaagctaaaatatatatacatttcgcaaattctgttctgttttttgtttctttctttctaacaaaccttacggtttaaatccaacctaagtaaattgagaacatgatgataactatggtaataaggtgacaccaaaataattctatgcaagaaaaaacagagactagactatgctgctgaactcaaattgctggagctccgatcggattaatctttctcgaacggacataggtcagaaactggccgggaagttcttctagaagtgcctgcaccaccgacactagtccacctgcaaccccaccaaattaaacatttactaccaatccaaaacgcatctaaacactttacactatccgttgtacataaggaatttaaaactcactatggatgtctttcatagggacaaattgaacgatgtcccgtgtagctattcgaccagtagaactctctaaccgccgaccattatcagcatcaagcatctgaaatatttacaaggtcaagtcactgcatgtttactatttgcaaagagacagatataaaacctaacttgacaaaacaaaacttgtacctccatttgtttgaagtctgtgtttcccacaccgacgataagaactgacaacgggagatcagaagctctcactaatgcatctactgtacccgccatgtctgtaaggactccatcctgttcacacatccattttttttgtcattgaagctatagatttactagtaacagatgcacattcgatctgaactgggccaaagtcattacgtatctgaatgttcagtctcttaccgtaatgatgagcagaacaaagtacttgggactgttttgtgagagtgactgtgaagcagtatgagcagccttgtcgaccacattgctaaatagagttggtcctgctagagaaacattgcgaagagcactcgcataagctaccatgattccttcaactccaacaacctgaaaacgaaaagagaatatgaagcaatgtgaaacttaacatgcagttttgagaatgcaatgtttcatggttttcaaataatggacaccagtatgcacacaatatcagctccaataataaagggagataacagtttctgtctcgtaagttacctcgtcgccatatgatgctccattcaagttaaaagcatgggacacagaaccatccgatgttcttcctccaaacccccaggcaggaaaccgcttatcagaatcataaaactggatgacctctcctacttccataatagcctggaaaaaaacagaagccaaattatgtttatacatacaatagatcaagggaatcacgacactgaaagaaaaattaatgagacgatggttttatactgagaataagcatatagttaaatggccaaatctatgctatttcattagccgctgtgagagaactaaccattctagtccaagcaatgtattggtattgaggatacagatcacaaacaaaagaaacgaaggggtaacaatagtacctgttgatatgagtttaatctgcctgatggatcaatgtagtgcaaagaacttggagttcggggatcgccatttgaagctgaaagacagaccatcaatcttaatgatcaaggtttctaagtaaagataagatatatatgaagtagaagaaggtgaatcaccagtgaagtcaactgcaaccatgaaattaagttcaaagccactggatatgtaatcaagaaaactgtactggactttctccacataacgatccacaatgagctggcctttcagaacctacagaaacccaataaaatcttaacgaaaatagatgaaaataactgtattaagatttcaatcaagtggtacgactaggcaccttgtttctaccgtgacttagagatggatagacaaagtttgcagcctctttctggagacaaagtctctccaattctgctacagatttctctgtctttctgcaaggttcagtataattgtcagtaacaaaaatcaaaaatggtgagacccggtagaatgttaaaggttaacatgttacccaataagttcatgattcccactggtgttaaaatctaagcactcgataaccaatggggtgtcctgcataaacaaaacaatcaatttaacataatgattatttcaaatgtatacattgaattacagtgaaacaactagcttactttgcttccaaattgttgcatagtcaagcacacaggcctccacatggggttgaggttgttgtccacgacctcagtccgacaaattgggactgcagcacttgtctcaacaactcttgatattcttaagaaaggatcctagaaagagaaaataagataacaagttaaagcttctgcaagaaatcataatattgttacctagaaggacaagaatgcataagtttgtacgtacactcttagagaacaagtccttgttatccaaattgacacagcgaaaattaatctcagcgacagttttagaagcaactgtttcttcagcttggatagagagtgttcccaaatttctattcacaccagctctaacgttgccagtaagagttaatgtcagtgtccggttttgtcttgtcataatctggtgattgaaagaggaatgtaaattgtaagtattagatatgtcgtacacaaagagcagtaacactgactaatggccaaacaacaatgaagccatcacaagtagcagtgtctgattactgaataaatttacctcggacagaacacatgtgccttctcccaagaaatcctgatcctttagctttaatgtctgcaaagttatacagtatattgaaaccacttttgatgtgtagcatttattatcgatatgcaaacttcttgatgttactatcaatgaaaatattaccttcactggcacattatgatatctggtatcaacatcatacacgtgaaaactgaaaagaaaaagattcatacaagtttaaacatgagttcaacatgtgcaatttatcagaaaagaatagttaacagttgcatacactaatgtctggacagcttcaaactgaaaagagactgttatcttctcaatccacttaggattcaagttgttaagtatgacttcagtacggccaatttcctcaagtctcccatcctttttcctcaaatacatgacagccatcggatcactctacaataaatcgaaaactcatcagcttcacatgtaactaaagtaaatggctttaaatctcatacgaccatgtccaaaaagtttaatctagtagtaatattagagatgattcaattctaggaataccttagacgttatgtcacagtccaacaagtttgaagccgacaaagttaactgcaaaacacaattgcacaatgttaaacacaacttaaaggtaaacctgtgaaaaaagtttatgatatttcatgataatgaaaatcctaaagaaagagtgtaaactcaaaagcaacaagcaaaagaaagcgaaaactttaagccatccttaagtcacaataacaaatcttaaggaaaagttcctttttcttttcgtatcaaatagtgcaaatattaaatggttgcactgagggagaagttgcagagtagtagtatagtattatagggttatgtttcattgcaatttactttaagttatagttttcattgcatagcctggcctactttctcagaaaccaaacaataagctaaagatattaattaagaaaacacactttataccccacataagaagattcaattcaataaactataaccccacgcacgcaaaagagagagaaaaaacatggacaaagactgaacagagggtcaatgggctagctccattagaaaagtacaaaacaagagggaatatcttatccagtatggataaaaaaaaggagaacaaggatccttaaacaaaagcaataatctagtgtttaagcaatattcaattcacaaattgttaacttggttgactaatccaaatgtgaccacatcatatactagaggagctaaacaaacataaaaaacacctgactttagtacctcgatttgagaaaagagaggatattgaccacgagatctgaagaaaaaatcgacggcgtcgttgtgagccgcattgttggcgatggttgaggaagtgggtctctgctggacccctccaatggcttgtttgcctcctttcacatctccagataaacaacctcccattctctctctctctctatctctagatttaaaccctaaaaatcccaaatttggagtcagatcaaaccctagatgaattcgcaaaatttcacaatgcagattgtaatatgattaacacaggattctgcaacttctctagctctgtatatatatatgtatattgaaaagggatacgcgtaaaagaaaaatagaactggaaaatctgaagttttttgatttaaaaaagcaaagaagattttctcaggaaattggttcgaccttccaagaaatcgaaacggttggttgaatcctttgtttggatatcaaaacgcgttttggttttcgaatttaaaggaaacgtctttcgatcatttaacactttaactagaaaaaaaggtttcaactttcaattcaacctaaaagttttctcgtttctgcgaattttccttctcctattctctcataaatttccttttcgcgcgaggttgtttgtgctaggaatataattagaataattaaaaatgaagctaataattccaaaattttaattagactagatattgtttgaatattaacttacggttaataatttaagtattaaggattaggtagtgttttacaattttgggtttagagtttagcttttcaactctatctttttagttttttttagatatttgatttagattattatgttaattatagaaattaaaatctatttttcttaatttgatatgattatcatacttatgttttgtttatgacattgtgtatctcgtgttttttttttgtttctatttattttgactcgagtcttgtttgttgttcttctacattggatggtcgttatacacgtgtgaaaattcaaaaatgttgttcctatcttgcacttttctgccgccaacataaaagtgttatataagagactaattcaactagaggtggcattttctctgagttatgcagtgagttcccaaaaaattccaaggaagtctaaatagcctacaacaaatattaagcctaaaagagatttgaaaagtaattgaaaagtaatgagcagtgacttgcttgggatttcagtttcaaaatagtttgtcatatgttttgttttttccccatgaattgttggatttagtttgtctctcgctgaatcaataaggtttgctaggaaaatcgaaatcaaacactaatttcagcacggacacaacaaacatttgttttctaatcgagataaattttaacatcaattccgttatcaataagggactggacaacagctctgattttcccttcaaacttgtcttggtcccttggcgtataagaagccgtgtacacatcagcttcttttgcacgctcagacaagatcctccctatggacatacatgccgggatatcacatcttgacctcagaacagcttttacgtctttagagtttgttcccgcaacagcaacttgcctacatgtaacacggtgcgtgagagatgccgaaacaaagcgctttgagatgaagacatctagagtgaacggctccatgtatgcaactgttcgttgcttgaacgacacatgcttgtctggattcttcgactttttctctttttggtatgtgtatggccggcttgtgtcgtcatccacgtagtcttctacaccaaagaagcttcttggtgcaaaaacagtctgtcaagaatggtaaagccaagtcaaaatagaaacagatacaaaaagaccaagaaacgatagctgaaaagactcaatacttagaacagagctgaacttaatgattgcaaagtaggctcagtaaatcttataaaatccagctattgcatactgactcatctaaatggccagactaaaagtattggcactatcaaacaccaacaaaccattgagaggtggaacaatccagtcaattactttaatgagctacaatttatctaactcaccgtttaactaatttgggttctgctcatacaattcatctaacctctttctagcaaacagcaactaaagctaaagggagtggtctaacgtcggataaatcacattcaacatcgtttccaagcagatctagttatgagatttcaatcaaacaggagtcacaaggaactgcacaagacctgattcaaaagaatacgcttcctctactaattctactaaaaatcaaactattcagtcaagtaaacaaagtggaagaacggtggagtgtacccgtccattgtggaatcgacaactggtttggcacatgaaaggtctaagcttttctctgttacttccataaatcgccgctttacctatagaatacttggcaaccacttgcttcaacattatatctgcaaccacctacagaaaaattcagtcactaggaataatagtgctcataaagacgttctatgttctatgatatagctaactgctaaaactaaattaaaccggaggtcactagtcaataaggatagtagctttgtcacaaaagtatgctttcttttagtgtccattccattactgcatcccaacatattgaagacttcttattgcccagaaaacgaaaccatttgtaataagcaatagagaggcaaacaagttgacttctctcaataacaatccaaaagatagagagcagctaaaagcttgtgccaagaatttataatttctaattgccaacatgatatcaaattagcagctcgtaagctatggaaatgaaaagtattgaaaagattaacgaatatgatgaccttaaatcatttgaagaacacaccccacgatgtgatcataacaaaattcacttcttttatagaaaatttgactcgtcttcaattcaaatgccatggattctgtatctggaagctcaatttgaaataaaaatacactaacgcacctggaaatcgatggctagagcacgacgggttgatattgcagaggatactacactcaaagaaagctgaaaacccacccacggagatagaagaaactaaaattaagattcagtaaacgaaataggttaggtgcttcgcaatggctgccaaggttgaaacgggcaattgttcttcggagctccaaacattgaagatgaagattttctaaaaccctacaaacgcaaaatttggtcttccgtcctcggaaagttactcgtttttcattttctccccataaaaagctaattcaactattaacacccaagggtcaccggttttattatggttttcacaccgggttaaggacattaatttggaatcttgaccgacttagctggttgaaccggaccgtttccggtttaagaagaataaagacgcgggcggggttgaattaaattgattttcagaggaaccgaaccttcacctcacgactctctcactgcctcactcaccgtcaccgtcgccgtcgccgtcgccattgctttctacttcgccgtgcctggttagttttcggaatctgattttcatttccatttcgttccttctgaattctcaactttgtctgcgattttcagaggtagcgaagttcgtttatggaagcttctgctgagtctaggtttgtggaagctccattaattttggaatttactggaatttccggggattcttcgtcaactactttcaggacttgttgttgattctcacagcgtgatcctgagaaaggtattttacttttatgctttgttcttttgaatttcagattaagatatataagaatccgttatacaaaattacaatgaagattatatgaagtttcgaagtttcaaggcaaagttaatatgcacgaagtttatcagctccatcaaaatttcagggtgccaagtattagccattggaaatgccaccaagaaagaagcccaagtcttcagctttgaaatcaaacaaacaatcttcagctaatcattcgtcacaaccttccacctttggcatccagcagttgttccttcgacatattcagaactcccaatcaacttccaactctcatacctccactgctgacccagttgatcaacagaatgtgaatggtcttgcctctgacactgcagttttaacgcctcaaaaccctctaggcacatcgaatgagaaacctgatgagtccaaagatatggaccagcaactcacggaggcatctcctaagatctccaaaaacctgaagcgcttctctcctggaatggtagtttcttttcttatattcccttatattctaatttaatagtttgaatgggtatgtttttctccttaattgctggttgatgtaattgcaattaccctataatatctgctcacatgattgagtcccttgtggtcgtataattcttacatgcttcttttatgttcatagctgataaagcaaagtcaagatgactgtggtggtgagataacttggaaaatctctccagtaaatgaaagacttcgggcagctgctaagaacattcctaagatgatggacttaacagaaaattcactaggggttaaatcttctaccattcgcccttgctctctgaataaggcatgtttacggctttaaattttcttttaaaactaattcttggttcggtagctgtttcatttcccttcttcacatcgaaactgacagcagctagtgcagaagcaatgtcctacatcaggtataacttccaaggttgagcaatggttatcttcaccctcaaaaaaagcttccaaaagaccagcttttgcaacaaatagggtcatggaaagggtaaatccttccccagatgcagagtttgaaattgttaacacttcaagtagtggaaacagtcctttccagaccccaccgtctctttcatgccctcacaacaaggtaaattactttcctgataaacagatttatgagcacattttatctacttcttaactttgctctgtttatgttcagcttccttgtactgtaacgtgcagcggagcttgtggatctatgggggctggacaacataaaaaggtatgatttgagacttgatgcagtcttttagatgcttatgaaaggcgtatttagagtattatgtaaaatgttttgtcacttccacctgtggttgatcaagactacatgcattatttcctctagaacttgttttctacagcgtttcaaattattatttcagcatattgcctctttttgtaggccttgcttgaactattagatcaagtggaggatgtcatcgcagttgatgacaaaacaactgatgatgtggggattgtgatgcctcaagctcgagttaaagatgatatcatctcttctgttgttgattgcgctgtagatgaagggccagtttctctaccaaaaatgcagaattccataaatccagatagctatttccttgtattggaggtaaagttggccttaatcgaacttggggggtagcaatgtggttttcatgtaaaagttactcattgtccagagttgtaactacaggtatcggagaaacgtggctcgggtagctcatctaagggtcaatgtccttataaggttcgtcatttactcatagattttctcttgtacatgctcatatttgctgactaaatttctctcaggttcttcgcttgctagatgagcacacaggagtggaatgcgctttgtatctctgggatgaatggtactttattttgtatgaaatttagggtgatctctgcttttcagatcaaattttttcaaaaatagcaagtggtcgttacttttccattctatttttgatgaagctattacaccttgttctttaatgtcttggtcttgaatgtttttgccattattagtttccaaatgtcggctgattgcatactacacattttcttgttgtttatctttctattctcttagcatatgggacatttatatatcatccattcatttcccagttggttgaaacttgatttcggaacactgaaggcttattgttaccaggttttacagcactgtatcaccaggagattcaatcaatgttattggagagtttgatggggatggcaagtgtgacgtggaccgtcaaaacaatttcttaattgttcatcctgatacccttgttgccggaactagggtattattttcgtcttccctttaaggactctgtctacaactaccaatcttctttgcacttaatttagttgttgttgtgaataactgttctacctttcaggttgctgcaagttttggttgcccaaggcgaaccgtgctagatgagaggctcagatccaatgaacacgctacagtagccttacttggaaccttgcaacaccaagtttttcaggtttactacattatggaatctttttgatgagaattctattggaaaatgagtgtttttgtttgatttttttgcaatgtactgatctgtgctatccatttcctttgttttccaggctggtctctcgcaagaatctccatctgtagatggtttgcaagaatatgcaagcacagtgattgagaaaagtattgagagcttatatgcatgcggaggttgattactacattatgtgttcctattatttgaaggttcatgcagttatcatatagctaggatacctcctattcatatcagaattttgagttaatatagctaggacacctcttattaatattagaattttaaattgaaatagatatgatacctgtttgttctatgtgcttttaagattcacattacttcagaattttgttttgcttttaataccaaaatgctacgagttgacccaatgaaatacacttaatcattttcttatttgatcatatgttctctacagtgcatgaaggagacgtgagatcaactttatttaaagctatcccgaaaatgttgaattggattgagcatttcagatattcgaaggtacacttgtattttcctatttatgattctttctttagttactaatggctgttatatcattgtttcccttgaacgtaattgttttggctactcttctggttggaatcgtcagatatttttgtagtgttgcacgtacatattagactgcattatgctctaatgtgtgttggacttgttttctcgtgaatgtgcttgtttggtaatcacatactttcatattatctgttatgctgcctttcacctacagatatccaattacaaagtacattaagatgcttgtattagcagtcactttatatttattttactgtgtcagtcccctttctagcaactctatgggcagaaacatcttaattcgtggcatgttgtttataaacaggactcagaagtatcaaaagttgattttggttctaccattgggaagaaagctgttaaggtatcagaggttagagctcttcctactctctcccttcttcttgggatttcatttgacatcattgcagaataatcgttgtttattaagcaatctcctccaatgagacttctattatgtatataaacaaattgcttacctcaggtaattgatattgaggagatgtcatgggcccctaaatatggtctcaaagggatgatcgatgcttcggtcagagtgatagttgaatctgacatgaacacagtgaatgagaagataatgccccttgagtttaaatctggaaaagctcctagtggtcaggtctgtgtggagatctatctagatatacagttgaaatttgaaagttccaaaagcttataaaaactacgcgcttggtctttattgtgttatgcagtcatcaatagagcattctgcacaggtgatcctgtacacgctccttatgtctgagaggtgcttatgtgctgcctttctttttttctttttgctggaaaacggacagcagtttacactttcattcatatatctcattctccactttgcaggtacctgaagcatattgacaatggccttctgtactatctacagtcagatcagacccaggtcagtcaagatttgtgttcctttcttcggtcttgagatttggggagtgactaagctttctttgttcacttgtaaagggaatttctgttcaacgatcagatttggtgggtctgattattcgtcgcaatgaacttgcaaatgacattcttgtggcgtcaacaacccagcaactgccgccgatgttacgggtatgctctgatgtccagtgatgacaatttctctagggaatattagataattaaattatttattattttgatgctagaacccaaacatatgccggaactgtcgccatctggatgtttgcacaatttatcataaggtattttctcgtttctatgattaataatgctcgaagtcaaatatttacattttagggtattaggttctacatgtttaagcatatggggttaacattttaatatgcatgttatgatctgacttgatggatgtattccactcgctaaataagtaatcaaccgttgatttaaatcacattcttgatactagtcacctgaaactgaatttccattttgttatttgttgcggtatattatagtaagctttttcttagtcatagttattttgcatgtaattcctgagagtacactacatttttcaagcatttttggggaggtgttgaacgtccatcttcatggtgttgaaccgtcatcttttgaagcttctaaaacatcttgtctgcttgccccaggcagatggtggaaacacagagagtagcggacttggtgatgtctttgacacacatgtttctcatctatcaactttacatttcaatttcctccgacactgggacaggctaattgacttggaaggtagagagatgcaggtcagccttgaatacaaagttgattgtttactggggtacaaagttaaggatttttccttacttggcgatcttatgtctatgtttgttttcagcttctacggaaagatattgcgcatccacatggttcaaagggcagccactcagctagttatctttcttcaatggttcttgacgtgacaaatgggtttcagcatcataactctcataaagaaactagattcatctatcgttttgtacgtcaaaaatcatctgaatctagagaaagagtaaccagtgaagatatgattaggactggaaaccttgcaactgatgacctggattgcaaacttagaactggagatcgtgtggtacaatatttcttgattgttcttatatcatggttaatttgaagttttgaaccaataaatttagtttcaccattaagtttagttgcaccagcttttctttctggcgattttttatttcactcttagtttatgatgttccccttttgttggtttaaattttcatttccagattcttcgcacagaagtcagccacctgaccgttgcaaatgggattatagcagatattagtcgcacacatatatcagtaagcacatacatcctggattttcttttaacagtctgtagatttagctatgtttgtctggtacaatatatcttgatgttcttatgtctaaagagtttgggattatccttttgctatgtcaatccttaggtttctttatccaagcgattacgtcttccttggagcgaaccttcttctgaggtatcaaatctctctcatgagttatggagaatttacaaggatgaattc

SEQ ID NO: 23 - DNA, 59261 bp, Arabidopsis thaliana
aagcttgttcagcggtttgtcaatgataaagacaatacactatcaaaacctgtgaaggtaagaaagagtttccgttatataggcgtatatgttatgaatattgttagattcatggcaatggttaataaccacataccaccatatagtttgcagctgggtatcaacgtagaggtgcggaggagacgaaaggaaagattcggaaagacgcttcagatgttctagttcaatgtccgttgctggaccgcattaaatgctttgaaactgtggcagctggagtgaaagacattgtaccagattcagttgtggatctcaaatctccagaggtagtgtgtatagatagaaaataattctatcttcgttgcatcatcgcgtttataaagtctgaaagattggagtaaaaatgtgcagttatgtgttctggtggaactgttaccgctctctagaatatcaagtggctcctttgtagctgctgtttcagtgcttccacatagactcgttagcacaaagccgaaactctgcatcaagcctctagtccctgaatccaaacacaaaaagggaccaaactgacaggtgcaaaggctgatcgctgcattcgattttcgagagccaaagatatcaatagaagttgtaatctctctgtttttgtttagatatgtcttttgctttcagtatctctaatggagttaacaacaatgtctgacctatgttattcaagagaacaaagataaacccatctccaccgctttttccctatgttcacaatgttacagtttgtaaggctaagctatggcaacttggaaatcaatcggttcaattcggtttttaaattaaaccaatcgatttataaacaaatgtcggtttaagcaaggttcggtttggtccacctctggtacgtggttttccaaatcgcgctctgaaacagtgttggcttcctggttccatcttcgcgacgccaagagcctgagattatcccagtggaaagaagagaaaccctaatgggaacgagctcgtgtggcgatcacgagaagcagagaattgaagatgaagagcaatacggtgtgttgctgtactacaagtacacctctgttcctgatctagatgagctcgtttccttctatgaatctagctgcaactcattaggtctactcggccgagtcaggctctcccctaaaggcgtcaatgttactgtatgcttctaatctccttttctacatatccaatgttttatatttgatttgaccattttctgagttctctgtttcgtctgtggttcgcgtctgattgagtattaaagccatgaatcgaaaattctaaccctttatgtggtgagagaactgaaaagaaaaacttaacccttttgaactgtgttctgttggttgtttgattgaggattaaagttctccatgtatagttacgacttacgagtgtaatccatcttaaccattaaagaagtagacaccaaaagtttgaagcttttgctagagttctgtttatacggttgggataatagaaaactttgcttattggttaggttggtgggaaattaactgcattggaggaacatattgccgctgcaaagtcgaattgtttgtttgaagggactgacttcaagcttgcatcttgccatcatcccttgaatgacaaagttgctgaggaatgtgggtttacatcactctccatccgagttgttgaggttattgtcttatctttcttaccaaacatagttaatgttatgttaagttcttatctgtggaacacgtaagattcatttgcggggatgataaaaatattcatgttatgatctccttgctcatctgactgaatgttttctactaatttataaaattcatgcctattctttccatagtctccataactgatgaccttgatgttgtatgtgctgattaaatcttaaattttacaagattaacgatgacttggtgtcaagttaagctttttgtcttctccggacttcaaatgttttctctttctgtacttagttccattttttgcatgtgatggatgaattttttgtcattgtgtcgaggttcttagactatgactttacttcctcagcattttgatagatatgtggcattgtgttgtgatttgcaggagttagtgacctttagtccttgccctccccttaaacccccagaaatttcaaatgctgggaagcatctctctgctgcagagtttcattcggtcctgcagagtgccagtaagtttcttatttgttttattacttactgctatattgcgtttcttagctgattacgtttccttgcaactctgctgaacatctggatggagatgggaagtctgagaataaggaacttgttttgcttgacgcgaggaacctgtacgagacacggattggaaaattcgaatcagaaaatgtggagacccttgatcctgaaatcaggcaatatagcgatttgccaacctggattgatcagaatgccgagaaaatgaagggcaaaaacgtgctcatgtatgaataatagttttgtgacatacggagatttcttgttcagtttactttctacatcactgaagtctcatctgttggcgaatcaggtactgcactggtggaatcagatgtgaaatggcatctgcatatatcagatctaaaggtgctggatttgagaatacttttcaggtgagatcctggatcgcaaatggatttgatacaggtcactgaacttggctgactccatctgttatttgtttcttgcagctctatggtggcatacagagataccttgaacaatttcccagtggtgggttcttcaaagggaagaactttgtgtttgatcaccggtatatatctagcatctttctattctaatctacgaggaaaacaatttttataggtccaggtaacatttattttgatgtcggatttaaaggatctcagttgggagctcaaaagaggatataataggcagctgccttctctgcaacaatacctttgacgactattctccacgttgccgttgcagattatgccggatgcttgttttagtctgcaatcattgtcgggtaatgcacccagaccacttttgttgatcaactccataaggattgtgtatcttggacttatgatgtgctattgcaggttaaaggagatatatatatatgtgagctgtgtcgtaaacacggaaaaggggaagtccctttgagtcttgatcccttaaaccaaccttctgaaagcaatggtaaggtctgtttgttcatttttggatcaaatgtttaaaacatcagaggatttttcaaaattctctagtcccttttcccctgaaaactttgtcaattcacttctatggtcaggtgacaatacaagacggaagctgaggatcttgtgcttgcatggatttaggcagaacgcgtctagctttaaagggaggaccggatcactagcaaagaaactgaagaatattgccgagcttgtgttcatcgatgcaccacacgaattacagttcatctaccaaactgctacccctccatccggagtatgcaataagaagtttgcgtggttggtgtcatcagattttgataaaccgagtgaaacaggctggacagtggcccaatgccagttcgatccattgcagtatcagactcaaactgaagggtttgataaatcgttgacatacttgaagacggcatttgaagagaaagggccttttgatggcattctcggattctctcaaggtgcagcaatggctgcggctgtatgtgggaaacaggagcagctcgtaggtgaaatagacttcagattctgcgtgttgtgctcgggtttcacaccgtggccattgttggagatgaaggagaaacgatcgattaaatgcccttcacttcacatattcggaagtcagcctggaaaagacagacaaattgtgactcaagccagctcagacctggcggggttgtttgaagatggttgcgccaccattgttgagcacgattttggccacatcattcctacaaagtctccttatattgatgagattaaagctttcctttaccaattcatttgaggactttattaacaagacaagaagactcttttgcaatcaaatatttcttgtacttgtactcttgccaagtaaaagttattaaactataacgacgacaaagattaaagtgacaaatacaaagtgtaccatatcctaaaccagaaaccacactacacataattcatagcagagtttaagatacagaatcagagaatgattcagacaaataaggacaacatcaacaacaaaaagaaaaaaaaacagaaaaataagcctttttgcaccagaactcaaaaagtcgaacttgaacctggcaattgtcaataacagttgcaaaagctgaatctcatgtttcccaaaccaaaggatttcaatttgtactactgtatacctttttcaggcaaatttgaatccaccaacgggagcagcgggattgttcccaaaattgaaagcctgttgtgaattgtcattcccgccgtcctgcagaatctgttcttcctcttcttcagcccaatatctctccaatatcttaacggccttctcatatatctcgttgttatcatgggattgaaggttttcgactttgtccaacccatcagattcttctattatttgagcatagagattcaccccactgtttaatcccatttccttgtcagcctcaccaaccttgagaatgttttcaagaccctcgaggcacactgtcacgatccttggatcagggcagattagaagatcacaaagtggtttgatgcagccttgggtcaccaaatatctgcatgcaaaactgtgttatggcatttttcgatttcgagatagataatggtataagactaagaaggaacactatgaagtgaagttagttgtttgcaaatgcgcttcagaatagagatgacatactgaatctgctcatgtgaccctcctgatgtggcattggaaatagcccaagcagcttccttctttatatcgaactccgcgttttggagcaagtgcacaagagggaggattattccagcgccaaccacagcctattgtttcaaatatataaactgattaaaaaattgcttttagcctctgaaactttaattaatctcaatattttcagtagcaaatagggtataattaggtttctaggcagagaagtcattggaaaatatgaaagtactaaaattagctcgctctactaaaaagttaagaaaagagtaacttcttcacttttcttccagaatcagaaatgaatatcttccatgaacagccgtcttcttgacatattagagatagcaacaaaaaaaccgcatacctctatctgaagtttattcccagcagtaatattcgagatagtccaacaagcttctttttttatacttttcttgtgattttgcgtcagcaaattataaaggtgtggtagtacgccactctcaattataaactgacaagcaaagacacagtcatagtcaaaatctcaaaacaaatacccaaaacaacataaatagtcgttcgtcataaatcatacctgtgtctgagagtcatcaccagttacgatgttcccaacagttcgaagagcaggaatgagaaccgtaggtgattgatgacttgaagaaagatatattaattagtatagatgcaccaaggaaaaaaaaaataaacaaaaggaacaagaatatgagatagtaagaacatcaacattcagttgccagaagatactcaaaaagcatcacaaatttgaagataccaacacctttattgagatagacaaacttttatagagagactaaatatgatgagaaataaacaaaaataatgtctagtcaattattggtcaggaaaaaaagaactaaccccaaaagctccacaagtcgtggacagacacctgcctcaatcacagcctgaatcttatcattggggccatctgaaaggtaggagagagcccagcaagcatcagtgagaacctcttcatcattcagatagataagctgccgaagaattggcaacgcaggcttcacctgaaacatatgaataaccaacactaggcttgagtaaagtaaggaacacaacgaaacaaatataataataacaataaataaataaactagaaccatcaatcataagttgtccagaaaaatcaaagagaagccattcctgtagtcatacctgttcaaatggtgttggtggtttaccacgacaaaagttggacaaggtccatgtagcatttcttagcatggacaacttagaattttcatttaactgagccagcaatggctcaagggccccatagttgagaacaagattcctgcagtttggagagtccccagcaacatttcccaaggcccacaccgcctacaatgatatcatgtaagggtttgtacgaagccataaaaagttatagcacctatgactacggaaaagcagttggctgactatatcacgaaaaaccactaaggatcaaaacaaacaacaaacaaaccaaatacgaccacggaacttagaggcatgtatccaggtggaccaggtcacatatacaaaatggaagcacgcagttatctagctagttagtggcaaacctgctctcgaacgtcatcactagcagatgtaagaagcttaacgaagataggaaccgccccctgttcgattacaacccgagtatgatctgatgttcctgacgcaacattggtcaaagcccatgcagcctcaaactgcaaacaaacttttcattaagccaccaaactattcttgagtcttcaaggtgcaattaataaagaacaaatctaaaaatgaaagaagtacaagacatacctgcaattgaggatggtcatgccttccaagaaactccacaaatcgagggataaccccagctttgatcacttcatcaattggaggactacgctctgtttatcaaaccgtgttacaagcaaccatcagaagtctattacacacatacaaccccagaacagaaaattgcttctgaaaggaacaaatgtatacctacctatagataacaactttctaaattgggtagtcgcttctagctgagcttgaggatcatcagaataaacaccttgtaccatcattgggataccttctaactgtcaaaagcacatgaacgtaatcaaacagttgtttccacagaaacgaaaacctctccttggctagaaatgtaacacatccaatccattgacaagatcatcggatcagaagatagaaattccgatatctaactaaagcacactatacattgcgatcagcatacatggtcatccaggatccgctatcaatcccaaatatccataaacaaattcccaaaaacaaaaaactaaactttgatggtcaattatgagattgggagctgagatctagaattgaggtaggaaacagaatcaaagcctcacttttttcaacaatcaaacaaagatccatcactaaataatcaaatcatgtgatccaaatcacaaaatcacgcacaattgtatcgaaattcagatcaaagggaacttactcgtttctcaacggcggcagcggtctggggaccatcaaggccagctccgagaggcagctgctgctgaagcatcattccttcacgacgcttcttgagaagactatcctcacgcttgtttttcctaatctcgacgagattgtcctctctcctccgcctggcctcatcggcatcgacgcctgtcttgtatatcttcttccttagctccgcgcgtgtgctcggcctcagcgacatcgtttgttaaaatctctttctctctctcgttccctgaaggcaaaccacttcgtctggatcttcttccttctctctcgctctttggcaaaattgaaattggagaaattgggatcgtggaggacgagtcgtctggtgctttcgggttcggatccgggtcggagttttattggttgttggatccttcctcctgacagagaagtattgccacgctggcgcaaaatttttgttttttcagttaataataatttcggattttgttggatccttccttcttttcgaatcttttctcccaagaatcagagacttttttcgcaacatattatatcattatatgtaattatcttgtattaaaataaaataaatataatcacgttattccaacgaaaagcaaactctactagaatcgtaacttttcttatcaaatcataattattatggcagcaaaactgtaaattttgcatttaaataaattcaaaaaaagtttgtaaaaatatccattagcactttcaaactgtcacaagtttacttggaattaatacctagataaaataaaataaaatcataaaattaacctaaaaaaagaagaagaacaaataggttttgtattccaattcccaagaaagacatgaaacccttgcctcactgtttgatgtggttcatgatcttctggagacatgaatcatcttcacttaaacctttttttgatattgtaatcttttcgtttttcaggatcggacaagatcttccacgcataattaataatctcgaaagctgatttggcggcaatagatttatttgtgtcggggtagagcttaaccaagatgtctctgtactttctttgaatcatctgatggctacagaacggatttgagattctcaagatatcgtagtgtgtgaaactggctttttggctagtcaagttgatttgataggcgaggagaatctgtgagatctcatggtggtttgaagatgtgtttgggtgaccaaacgttaagtcattcacgatttcaatggctccttttagattacctctttgataatgtgcttccgctagttttagctggtttttaaagaattttggagctttcattgaatcgttcattctttgtttttattgctgagaattaatggtgagcatgagagattcagtgatgaatttataagagaaacaaaaacatctatgaaaaatagggttttgagatttggataacaccgaatttttatggaaaatgatatttgggtatatccatatttaagagacaaagaaaaataatttttatttttataaatcctttatattgtaaaacataagtcactgtaccaataaaaatgttaaataaatatttacaaaacaacaaaaaagaatcttctcaataaataaataaaagcacgatttctctataaatacatttttgtcctaagtaaattaaatcgagaaattacttaaaaatacaaactagccatattttccactttgttgttatcggcggtttctactcaggcaaatataaccgtttctcgtcttttatttaatgaaaagaaaaactatcaaatttttaaattttgtgcgtagaaaagttggagagtacgattgatctaactgttcaggaatgtgagagcaaataagaaagtcaaagatttggttagttctaaatttgatttatcaagcttactctcaataaatttgatttcgtgactatgtcattttaatattctcgtttgatttgtataatagcataaaaacatttactaaaatgttgcactcattgtaaaattacaaaaaacaaaattgaagaaattacattttatttatttaaaaaattgtcatttctttcacagtaataaagatatgatcctttgttctggaatgtaggaacatgacccctttccatatctccacttatatagctgtagttgtttagtttgcttaatgaaaacaccatagttgtttaatttggttcattgtagaaacgtaacagatccaagtaaccaaaaaagacgatttataaaggcagattgaatttttctcaaaaaagttgtcttgtttttcattgctctagattgggaccttaaacatcaaggaaggccgacactagtttgcttgtctatagcctctcaataatattccgagttaagttatttggaaggaagaaattctaacactgcacatcaaagaaaaaaacaaaaatttgactaatttttattttctttggaaaaccaaaatataactatatatttactcttcagtttatctgtcaacatgttttcctttatcatcatgtcgtgaaaatggaactcgacgggaggaatccatgaagagtgaattgttagaggcaagtccaagaagcttgaatgcaagattcacaacacgatctaatagtaacattcaaaatttggttatatgtatggaggtagtgatatagaaacaaaatcgtaggagttgaagtggataatggttgacttgagaccacgtgcggaaatgcgagaaaacacgagcacagttcaaagacaacgaaatctgtctgactaagtacatgtgcgagtgcatgctgtcttgccacgtgttccatctcattacaccacgcaaaagtcttttacgtgtataatcaaacgtacatgaaaagaaaagatatggatgacagtatttgttgaattaaattttgtcgaagagggtttttgtttgcttctctaatcgtcggacccattgtttccactactcaacattctggtccggtcttttctgccggttgaaccgattgcattttccttctcttctacggattccataacgttaaagtgaggagtattggtggaattagggaactcaaacacaaggtaagaataagatgataattttgtatttttcttgttttgttttttacgagtcgataagtatggactgtaaatgtaaaactagtgtttgcttttgtttgtaaatagcgttgtagaaagaggagattcttgaaaatttggcatctcctcggccacattcacatatgaggttcataattggagtcacatggttgcatgtgatcacattgggtctaccttttagccacatatggccaactccacattttctccttcttctttttttcctcttttttcttttcgtttgttttgtagctatcattcgatgcatttatattatttaattaacaaaagcatacctatacatatttgcctcactattaattccgcttttcttcacaaaaaccatatcatgtgaatgaatacattactatctaaaactatatcagccgtattaagaaaactagaaaaggacaaaagatgcagtatgtcgatagatgacatttggataacctatctatctcagttgacaaatatctttgaaatacaaccataaattagttttttttaagtttcatctaacatgtacttaaaatatatatatttaaaacctatagcacatcctccaagctcgatccaaggacttatcaagatggattttgtgagaaatcttcttatataacttggaagacacaatgacccacaaacatgttgccatttaatttgatatacaacaaaaaggtgtgaatgcttttgaaagacatattgggtgttaaaagaaagagcacacgtggggagtcttaaagagggaaaaaagatgttccaagagactcatttctcaatcttattgtttcctcttcttttggttccatttttgtggtcctttttgctcaccacttctttcaatgttattcctagtggatttcttctgacaactaacttttactaacttgtattttataccataatcatcaatttttcataatgtcagttctcttgaagagtcgtatgctactccttgttatcataattaatgttgacattcaagtaaatgtttttttctaatcagtttgaaagattttgagggcattttgagcaaaaaatacacttttcgacataaacttcaacgtcggaaaaagtctttgagaatcacatggagtccattggccccaaaattaaggtgggtgtcctcaacacgttacacgcacatgctcatttttgaattgcttcaacttgcaaattatttgttcttctccttactttttagtttctttaatttgtaggtctaatttttttttaaagcgttaaacaatttttggaatcgacattagttggcattttgttgttgttattgtttagataactttgattatctaacgaaaaaacaaagaaagatcaaaatggatacaaaaaaaaagaagtgatgatgtatacaaataaaatacatgaatttaataaattaaaatcgcgtcgacgagaaaaaaaaaacacttgaagccaaaataaaggggtaaaaaggtaaaagaaaagctaattaacaactgacaaactaactgccgccgttaagttccggtcaacgtcgtccgtggtgcggctgcggttaaaagttcggcgagagcctccatggctcgaacctgcatctctaacgctgcgatgtaatcggtcgcttcatctaaaagattcggtacagagactttccggcaaccaggaaccaaacggccaagaatcttcagttttctctcaaccgccggtaacttaatccgattcgtctccgtgagaccttttctcgatttacaatttcccgttgactttttcgcctttctatgtttcttcagcttcgctcggacgcgactcgctaaaatcgctctgctccaccgagtcgtaccacgagcggacgcagctagaactcgatccgccgtatcacgtatctccctcgccgcgccggagacgagtttatcggtctcgttgttgctggtggtggaagatctctgacgaactcggcgtaaagcttcgacgagcttacaagcgtagatctgttgcacacgattcgttttccatctcttcaagctttcttcgttgacacgtcgtgcctctatctccgcctccgccgtctctgatatcctcggcttctttcttcgagacgattcacctgtgttttcgatgctcgggaacagagactccaccattaaatccgatttaaaaccagagattcaaagaaaccgatgataaaaggcaaaaacaacaatctcttcttcttcttcagattctgagagtctctctttctctctctctctctctcaatgtgactagttagaaacaagagaagatgaatggagagagatcagtttttatatctctgccaatcgccagcggagctataacacttaattccacttttgcccttatttaccggtatttgttttttgtgttttttttcattagttaaaaatcttttgtttttaatcttttgtcattcatgtgattgttctttatctttttgccttggcatgaagctccaaaattatgccctttaatagtcaaaatgctgagcgatgcaaatatattttctatgtttatacattgtaactccaaaggtcaaagaatatagacgattgatatatatatttttgataagttgagaaataaagggtgatgttgaatcttttgtttcaagtggttgcggtagaattcatgtggttttattttattttaaaggtaagcagagaaagggaaaaaagcactcagagagtgaaataagcaaaagagaaaagaaaatttaccaaaaaagcattccatgtgaccattttcatggcgctgccatatgagaaaaaaggatctcttttgtgtgacctttactcatttgtaatgttgtggacaattttccgccaacaaattctctcctttgccgtttcccactattttgtgtgtgatttgtatgtttctaattgatatctcaatctaaagagtaatgagtagtctacaaaggaaaaacaaaaataaaattcaagagtaatgagtagtatatgtatattgtcttcataccatagtttagaaaatattttttcttgacaaaattcgatccttcgtaacggtgaatgtcattgtcaatttgtcatatatcacgagggaattattagttcctacaccaagttctaaatcttaaacaaaccatgatctaaattctatagtaactaatgtaaaacatttacttttcttgatcaattcgtttttggcaccttgctatggaaaacacgagagaaatgttttagcaattatgagttgacactaaatattataagtgcatttttgtagtaaatgtgtgatttataccaaaaaaaacaagaaaaaaaaaaagaagatcttgaagagaatctaaaagggcccttttctctgtaattggccagagaggcttgcccccttaattgagacatcgtctccatgtctcttccttttcttaatattttaaccacgctcaaatatttcttctccgactctcttaataatactcaccaaatttttaaactggaacccattgatatatgtggtcgtaagcttttcttgtgcgtgtatattttttagattctaaaatatcacaagattcacagcgcacatatgacaccaaaaaaaaaaaacacatgtctatatgcatcagaccaattatggaatctcccaaggaacaaaaacatgctcattcgtgaatacagtatccaaggtggggaagttaaagactagatcttactcaggaattcataaacactgaggtcaaaatcgaacaacatcacacaaaggaaacagctctcttggatcaagtaacttgtctttgctatgtggttgcgttgcttttcagttattaccaggagccttctgtacctactgttgggtttgtgaacgccttggcccctttataaagttttaaatctagtccattaaggctcatttatcgttagacttactgggcctgtataggcccgaggacagatgttattttgttatgttgaaatcgggagttcaaattttcgaaatcttccgtattacaagatacacttgtcctgttaaaatagtacacttgcaagatttttttgttatatcttaaatattttggttttagttagatgtttgtggatcacctatgatttgtaaggttgaatccattgggattggtcaaccatacttttttcggcaatacctatatattaataattcatgtttgtgtttcaatttaactaattttagttaaggccataagaaaatactaacacactaataactatatataatgcattattgatgtcatcaaattcaaactggagtctcaaattactcttaaatgaatcgttttataatttttatgtttgttgttgtaacatattttggattgaatgtagcatttgacatgttcccatgtccaaaaaataaagttctaattagaaacgagcttggtcccggtttagttcttcaataccattgtcattcaagagatcacaatctagacgtcgcaaatttacaattcaatgaatataaagaaatcgcattcggagacaagttaggaaaaagaacaagatggagttgcattttgaaacacggcttatacatgcgatattattcagaatttatagcatacatgatggccaacgttcgtcgatgcggtgctatccgtaattggattgctagaaaagatagaatttaccttataagaaatgtaaatccgccagcagtgttccgttatacatggaataaaactaagtaatgttgatgataataatatttttttcatctttgtaatttacatcaagattcttcatatatatatatatatatttgcagttattttgtgaaataaatcctatagttaagatttatttacaatgactgccactggattttaatgtttgtttttgataattagaaagaaaatattctaattaaatatttgacatttaacaatcttcttaaaatctctcgaccttaactacacgattaattactaaaataaaacttccaaaatatttaatatcatttaattactacaaaattatcatttttgatattgcttttctgcatgattataacaattcgattataatcatcaaaccgcaaagatatttgataacatttaattactacaaaattataaaatatttagacaataatttataaacatatcataataagatcaacattaataaaataaataaatttttttacaggacgggttgacgggacgggtttggcaggacgttataaaataaaactattttatagataaatacaatttgcaaacttttatatatattaatttaaaaaataaattgctccgcggttaaaatctagtatatatttatataaacgctttgaatgaatggaaaaagaaaatgcataaccatatggaatagtttcagtcaacaatagcgatagaagaacctcttaactatgatgaaggacaagcttcaccttcacctacaagcagaatctgttgacattagcaaaacggatacaaactactttctgagccgaacaaaaagattgtgtgttgtgttttttttttgtattatatctgattagaaattaaacagaataaatatgttaagagcatgagacaaaatcgtgttctgtttcagcccaacagtgtcgcgcgaaacaaatccatttctaggaatatagaaagaaaaataaaacaaacaaagaacaattgagaaaagacaccaacacacaacacaaagacacaaatcataattaggaagcttccataagatagagaattaggaaacaagaaacgtcctccttaagacaactgttcctccctagctccgaactcctcgatcatcatgttcttgttcattttcgcgtgggtcttggaacagttgcaaggcttgagcaagcatgaattaggaccaccaacattcccaattgaaacaactggatgctttttagagatcaccacggagttgataacatcatctgttgggtgataaatagacaaaacctcgaacccctgaagatcacacggctcaacgatcggataaagaaacgctctcggaccatgagcactcctaagcatgagcacagcaccaggagccatgtgtttctgcagatgctcgatcactttaactttctcctctttgttcattccaacaagagcagctagaaacacgacatcaaagctctttaagctctctgtcacgtccattatatcaacggtgtggaagaacatgcgttgagagatgtctggatcagaggaaaccagaagagaagcgagtgagttcgctgatgggtcgatgtcaaagttgtgaaagattgtgtctttgagatggaatgaagcaagaacgatggaagtgagaggaagaggaccagatccaatgaaagccacactctttgggacaaagccatttaggttttgttcgaggaggtcgaactcgagctttccgagtttcaaatagttgttgtaataagggaaaatgtttaaatgatgaagtgggttgtcttggtaagaggtcaagatcgaagagaaatggttttctaagtgaccttcggctagaccacaaatcttgatgagattaagtcgaatctcttggactctgtcacacatcttggtgacatcgatgttagggtttggtggtatgcatgtggaaacgagctgcttgaagagaatgttgacatcttcggatggttttagactctcaagctttgagatcttttcgtagagatcgcatattgtttgcaccaattgttcgtcttggcaacccatgtcgacactatgaggttattgatttttctctttctctttggagaataatcgtgtgttctcgggtggtgtgaactgtttggactggagggatggatatttattggcgtggggttggggatctacatcaactagaaaaagaatctaattattttaacatttcattattcaaatatactatataacgtacacttgcgtttttgtttctttttttgtttaactaattaagaatagatccttatatttaggttttgaagtaaaagatttatttaagtcaagatattagtttaatgtttacagtattggtttagtttctatgatttctgatttaggtttaaggttttagtttaggtttagagtgtatgttttcgattatagaaatttcattcctaattgctataaaatttacaatcattttcaaaattatcctggttatgaaaaatgacttgtgtgaacatggattagatccaaaaatgttataaattattggatatattgtattacactaagcaagatgtacagtaattgatggatgatatgaaacgtataatctccattaattgatggattacatgaaagctaaatgagataatttgtttgttttattccattcttctgtatataaaaaatgagataaggtttgaatgtgtccatgtagtacttcttccaactcgtatgagacaactacacaaaagtttgatgccttatcatttttctgtacgtagcatatgatgtaaacacataattacacagaaataaagagtccattactatattatggggcagttcaaaatatatagccaagagcttttagtcttttagaaagaaatgtgcatgacttgcgacaacacaaaaagtgtaactaaccacagtaattaaaaatatatatatggagtaactactaacctatataacaagttgcttgaccgaaaaacatacgtcctttgtctgtttccaaacatcaactttggaattaaattgtaagacttcctcacaaatatcaaactgagttttcaatattttttgaaaagaatatgcgaatttcagaagaagataatctcttcatggcgtgtgccttccacaaatttcttacggctctccttgttttcttttgatatgcttcatgaatctctcaaattcttcacgcaatcatatatattttcatatctagaaagaataataatttttttttttttatctcaatatagcttttaggaattctaggagagtagcatatatgggatatatacgttgacaaaaaaaacacgtatatgaaattggaatccatgtgagacgaatataaaagattggaagaagacacaaataataagaggtacttaaagatacacacacacacaacaacttgaaaggatcgatattcttttatgtaaatgacgcatcatatttatttcttatgcgaaaaaacatattcgaaacaaagaaaaaagaaaacatgtttgatctatgcatttttgcctcttctattaactccacggccaacttgattaattatatatgccaacaaaattcatacaacactattaatattcgtttgtttttctccttctcaatttcaacattaatttttaaagttttatgtttattttttgtggttgtcagtcaatggattccataatgtatatattattttcgtagagatgctaagatttttttttctcttctttttcttcctgtataaataagattgcgtgaagaacttgcggaatttcatgagtgagacaagaaaacaaggagagccataagaagtgtgtggaaggcacacgccaaaaaagatattatattctcagagaaatggacatattcttaatatttccaaaaattgaagtttcagtttgataattgtacgaaaacttacaaaaatttgtcaatgttaatgttttgaaacggatgaaagaaagtatatttagtcaagtaacctgttatagtcatgttcacttcactatcaactctatcttcttattggattgcattgtccatctcccagtttattcttcttctttttcaaaattaatttatttcctcatgttacattaacatctatctattgatttttttttttttgtaatgttaaatttatttatcaattaaagtaacaaaatatattactgaagatttaaatgattgttgccatttgccaaagctaaagagataggtctgttaaccaaaaaaaaaacattttaatgggccacatgtgtggaaaagcccatacactttaaaacaaaacgtctccccggtttgattcaatcttctctcttggtttttctggttcggtaacttaccccaaagtctagtccggtttaatctcccaaatcaattttattgaaaagaacatgtcatcgttctgagtttgggttttcgagctctaataatggctgcacatgcgacatcggagccggccgtgaatctcccggcgacgcaatttgaatctcaggttacagagccgttcggggtaactcttctagttcggcatcttcctgatggaattcctcatgatatcgtctctcggctcttttctcagtacggagcttctgctgttcgtccttgctccggtggaaagtaaatttccagcaaccttttcctttctatttacttggagattcatattagtaagaaggttctagatttctgtagaagactgaaaaggttatagacagtttttgttcatcaggcttttgaatggaatatttaggttacaaggtggaaagactttttgtttactctagagaatgtggaactgctctaacttgacatataatcctacttgtcacagattgagaaacgctgcttttgtggatttcaagaatgaagcttttgcttctcaagcacatcgtcaattaaatgggtaccagtttcggatttactcatcttccattaatatgctcagactcttttttgtttcttgacaaaagccaatgattgagctgtttgatggttgtgtgtgtaggctgaggtttcttggcaaggttctacaagtacagagagccaataaacctaatgacaacaagaagtctcgacaaatcgaagaatctgtgaccaaggggaatgctttctctactgttagcaccaacaatgattcaaaatctgggcagattctttctggcgaaccgatagctccaaaactcggcatagactatccatttcctcctcacctgcagtaagtttttactgctcatactttttagatttgttccatttcatatcacttatccaaaaaaacataggtcaaacacaatgtgacaacataacaccattctttaatcattttctcgacttcagatgtttctatgtttgatcgggttcattttgcagatatgcttacccaccacccgatgcaaatatattagccaacattactaatgcccttatcgctgtcccaccgttatacacccaggttagctttgctgtcactgtatatgtcctgtggatagaagtttttttttttttttttttttttcatttataatctgtagatatcaactatcatggagtgcagaaaaaaactagaaatgtagttttagaccttttgatcataggtgctgcatctgatgaacaaaatgaatcttccacctccttttcgcctggccctgcccacaccacctctacctaaagcaggcccccaacaaactgacttggagcatcaatctagtagcgagtcagagatggaatctgatgaggtatgactcgtcatgccatttctgcattttatgataatagtaaaatggcttcatgctgagctccttatgtttgtttagaattacatttcgtagttgtcatcttgctttgttctcttttaacttagtaaactacctatgtgataatcgacacatataaatgcttagaatttattcttattttctctactctttatattctttgatattgagtacttgggtaagaattgtgatggtattacgtttaggatataggtacgtcaaaatcaggaaggaagcgtgctagacatggatttcttgttggtcttggtatggacaaggatgtgccacatgagactgttggagtgaaaccttcgtctttgaccccaaaagagatccctcgaataagaaagaataaacacgttatgcaggtccataattacctttcaataacaatatgctgcgtacttgtgctgatatttttaagatctatatgtcgatagatcaagatcacctctaaagttactcaagacgaatataaagaggaaagtgagaatgaagaccctgcagacgagcccaaagaaaaagattcaaatttgaaaccctttgcaagtttagaggaattggagaaaggaaggttacctccacaggatattctttcactccctatgttcaaggtatggaaactaggattaagttacataatacttatgtttgtattgagtagaacttttctaatgaacgatgtgactatgtgagcctgattatcaattccagccttttctttgggtatggaaaatgtaccttggctcatggctatgcatgcttgttactagggattctctatgcatgaaaagatatttactgcataatattgcatcttctcctacttcatgttataattccaaatgtagagagtagagtcatctctgaaaaccatattcactgagagaaaatgcttttttgtcttctattgtgtgcagaactacacagctgggaatccgtcggttgtactgtatatcaaaaaccttgccaaagatgttgttatcgatgatttctattacatatttggtaagaattagctctgctagtcaaaatcacaatcttgtacaatctagagtcgttaatttacaagttgttacctgcttacaccttacctttggggaagtcaattcatagctaaatattagcattcatgtagggtcacagtttgaaagcagcgaagtagctaaatcaagtcttggtgtgaggctaatgcaggtgatgcatctgtaaccttaaacttccctttgattattatcaatctttgatggaatgagtgaatgaaataatattacaggaaggaaggatgagagggcaagcttttttgacatttccgtctgttgaagtcgcacatcgtgctctggttagcatcctttaaacaacaacaacaacttcttgttctgcataaatgtctgaatactgtggaagaaattatcattgacaagtattcgtgttgtgcctgagctgaaggtaataagaaaaaagtgtgactgatatgttctttgtgattttgcagaatcttgtaaatggttttgtgttcaaaggcaaaccaatgataatccagtttggcaggactcctggagcagccaagccaaacgaatgatgatgatatatataacatcaacggtttttgaagagtaggtgcaaattctttttgtgtatcatcatgtaactctttgactctcagtttaaagtcaataaaatatatcgctgcctaattatatcaatgagcagttgaaatcaattcttgctagatttgtgttcaaacaaactatgttcttgttctcttcacgtagaatcacctctctacgctcttacaccataatcaaacattcaagttgttattcgactttggtttctgatggtaacatcttctcgattcaacactttcaatctcttatgcaaaaatatgaatcaaaccttaaaatcatccaccagctccattcacacttcaccacttctgggtttcttctccttcatcagaagcaaaactctgggaaactttttctattcaatcctctgcttcgatgctattctcttggcgaaacccctcttcatgcttacttcctctacgaccaactccaacgactccatttcttgtctgatcacaataagagtctgcctccttttgatagtttcacttacctctttctcctgaaagcgagttcgaatccgcggttcccatctttactactgggaattggactccacgggttgactctaaaactgggttttgaatctcatgtctacgtgcagacagctttggttggtatgtatcttgttggtggaaacatgattgatgctcacaaagtgtttgatgaaatgcctgagagaaatccggtaacttggaatgtgatgatcactggccttactaatttgggagatttcgaaaaagctctttgctttttggagaagatgccgaatcggacggtagtgtcttggaccactatcattgatgggtatgcacgagtagataaacccaaggaagctatactcttgttttcaagaatggttgcttgcgacgcaataaagcccaacgagataaccattctcgccattctcccagctgtttggaacttgggagacttaaagatgtgcggatcagttcatgcttatgttgggaaaagagggtttgttccatgtgatatccgtgtgactaactctctcatcgacgcttatgcaaaatgtgggtgtattcaaagcgcgttcaagtttttcatagagattccaaacggaaggaagaatcttgtatcgtggacaacgatgatctcggcgtttgcaattcacggaatgggaaaagaagcggtcagtatgtttaaagacatggaaagattaggattgaagccgaacagagtgaccatgatcagtgttttgaacgcttgcagccatggaggtttagcagaagaagagtttctagagtttttcaacacgatggtaaacgagtacaagatcacgccggatgtgaagcactatggatgtctagtagatatgttgagaagaaaaggaagattagaagaagcagagaagattgctttggagattccaatagaagaaaaagctgtggtttggagaatgctgcttggagcttgtagcgtttatgatgatgctgaattggctgagagggttactagaaagctaatggagctagagagaagccatggaggagactatgtgcttatgtccaacatcttttgtggtactggaagatttttagatgcgcagagatttcggaaacagatggatgttagaggagtagctaaacttccaggacattcacaagtaacatagcggagcatgtatatatttatgactccaatctttattgttttgatgataaacttcagaatttttgggagctctgttctgatcctcaatgttttgatcataaactcccaaaaggtgttttctattctgaatggttttattggattataaagaaacgcaaacctaatcaagaagaccaagttcataattcattgtcataataacttcacaagaaaaaaggaaaacatgagagcattgctgggtgcaagtttgatagataataaaagaaaaagcgatgagaatctgcaacaagggtttttgatgattcctcttctgaagacccaagcttatgaaatcttgttcatagaccactgggggttgcatgtgtttctgtgctgcgcttggattctcctgaagatgggtcagcaccgaatctgtgaggatgatctgtttcttgcatccccttttcctaaaccctaaatcctaaactcccaatcttcaatgagttttgatcataaactcctaaagtttggtgagctctctaatgaagtctcagttagctgagattacagtgacaaagatgtgtaaaatacaatggagctcaaatcattcaaagagattaaaaaagactaaatggatcaatgagtaacaagaacatgcataaaaatagttcattttttgaaaaaactttgcttcaatgggtgtcattatcaaatttgaatccaagtcagattttgagtagcttttacgctaatcttcttcacacaaaaaaaccatcaacacaaaaagatttataatttaaaattttatcggcccaaaatacacacatcaatcttcctctcggcccacgcttttagaatttttgtagatttaaaaattcagttggaatctaacggctgagatcacgtttaatccaacaaaccaagctatatatttactaaaacacccgagagatctgcttcttttgtttactctactctccacgagaagcacacttgttttttgtttatatcaccgcaccaaccgctaatatctttacacgtgtcaaatcttttgcttaaggctaattatgcacagccttctttctcccgttttatccaatactataacgacatgtcattctcaatgacaaatgtatctgacgtgtcggttacctattggattacgtggctgcagatttacacgacgtagcctaaaataaaatccatgagagcaaagctcacttgctagctcctctcctcgcggtatatataagctccaggtcttgtacatcttcatcatctgatctcggggaagctccgatctgagttttttttagcaatggcgaaaatgattcctagcctcgtctctctaattcttatcggtcttgttgcgatcgcctccgccgcagttattttcgaggagcgctttgatggtatctaatttctacatctctatctctatactctatcttcctgatgatgcgtctgtttgtgttctggcttgcgatctatttcttcaatttgagttttaatgtgatttatgctacgagtttaagatccatgctacgatatcctcgttttcatctgatagtttgttctcaaatgttggatcaggattattatggatctatgaatttgttgattttggtttgtctggggtttttgatttctaaattataattggagatcccaggaaatgacctccaacttttggtgattaatacttttcgtgtagatgtttgggagatcaagtttttaacgatgatgaaaattctgagatgatagttagcatatgattcctttctggttcgacactagtttactaatttcaatgatgaatatgttcagtgaagcccgctcttgagtttgtttagtcgacttttctgatttgaaatactaaaaaatattatatggtttgttcaattcgtgtttcttgtgttggattgtcttgttgttcttaacttagtatataatcttgtgattcttcttgtctgatgtctgtcttgatttgttatctttgttatttccatttctaaagatggctgggagaacagatgggttaaatctgagtggaagaaggatgataacactgctggggagtggaagcacactgcgggaaattggtctggtgacgctaacgataaaggtatgattcagccttcagagctaatcacagaatcattatttattgttttacaagcttgtgctaatgcgttgttgcaattgccattgtctggcaggtatccagaccagtgaagactacagattctacgccatttcagctgagttccctgaattcagtaacaaggacaagaccttagtcttccaattctcagtcaagcacgagcaaaagcttgactgcggtggtggctacatgaagctactaagtggtgatgttgaccaaaagaaatttggtggagacacaccatacaggtacaaatcctatctcatctcactcttatcatctcaacctattatcaattaacatcaatgtttaaaaataacaacccatctgcttttttacctgcagtatcatgtttggtcctgatatctgtggctacagcacaaagaaagtgcatgctatccttacctataatgaagccaaccacctgatcaagaaagatgttccatgtgaaactgaccagctcacccatgtgtacacatttatcctccgcccagatgctacttacagcattctcatcgacaatgttgagaaacaaactggtagcctttactctgactgggatcttctcccacccaagaagatcaaggaccccagcgccaagaaggtattctatttcttatgaacaaccaggctaaactgagaaccaaccacttatactcaattttggagcaaactagaactaaccacaaaccataccaaagctctctgatgaacttggttgattatacctgagataccatccatcatacaaattgatccttttatttatttgtacagcctgaggactgggacgaacaagaatacatttctgaccctgaagacaagaaacctgacggttacgatgatatccctaaggagatcccagacaccgactcaaagaaggttcatacttgtctataattgatgtaaaatctaaaatctcttgctgtgttccgtatttgctgatttttcgttgtcctttctcttagcctgaggactgggatgatgaagaagatggtgagtggactgccccaacaatccccaaccctgagtacatgggtgaatggaagcctaaggtttgtcaatttctattccaaaaagtatctatatcctggtcaacgtttttcttcctctcaaggctgtcaaatatttttgtagcaaatcaagaaccccaactacaagggcaagtgggaggctccattgattgacaaccctggtacattactactctctgtggccatattatccatgttgcatgtaatttgtggttcaacttctgttctttgttgtttgatggtcgtttctggtatgcctaaatcttctccagttagatttctcttgactaagtagaaggactatctaagtctaaggcctaagggttcatttaaactcaaatgctgaagtaatcctttacttccaaaaggtttattggcgtctctatgtttagtggtttaacctattaaatagaaacatgtttgtaactaacctggtttttcttttatcttctctatcattaaatccatggtcacaccagtttgacacatttagtaatctatatcttttgttcacctttatttacacttttatatcatgttcatttggatgtaactgtagaactcgcaactttttgttttttatgcttgcattaacttacatgaaaatttagctctcttagacataataataaacaattagtgtgcctaaaataaactgattaccgcagacttcaaggatgacccagagctctacgtcttccccaagctgaaatatgttggactcgaattgtggcaggtaaataaatctttgtcactttgaatgaccttcgaagatatgctttattcccatgactctcatctaatacatgttactcttccaggtgaaatcaggatcattgttcgacaatgtcttgatctgcgatgacccagactatgccaagaagttggcagatgaaacatggggaaagctcaaggatgtaggtgtttaaaatacccaatttcataacacagtttttttttttttgtttctggttactgatcagaatatccaatctaatatcacattgcaggcggagaaagcagctttcgatgaggctgagaagaagaatgaggaagaggtaaatatctctcctaattatttagcttaattcatttgaatctctctaaaacaagtagtttggacttttgtggagtttctactgccaattatgtaattgttgtaaccaagttgggaatagataatctaagacggcattctcctttttctgtgttgatacaggaatccaaggacgcacctgcggaatctgatgtaagcacttgtgaaggatcaaattttttagagtcttgtttgtttctgtcaaggtcctaatattatatgtgatataaattccaggctgaagacgaaccagaggatgatgaaggaggagatgattccgattctgaatctaaggccgaggagaccaaatcagtagatagcgaggaaacctctgagaaagacgccaccgctcatgtatgctaccacaatatcacttggagaaatttcactcatccataattttgttgttttccttgagttgtggttaaaactgcgtgatttggttttgcaggatgagctataggtgaaaggttgaagatttgaagaccaaagttttcagtctctttattgttttatcgttttcttttgaagtattttagcatctagtttgtcggagatagaaacaagttttagcaaaactaaaagggggatacaatgtctgtcagatgctcattttagactttaaaaaaccatgaagaagttttgcagttgcttctctttctctactcttgtttctctgctaagccaatgtccgccaaaatcggattctggtgtattcgttcactgctccccaccctttgagaatttgttgttagtctcttgtcagtcaatacagaccaccaagtccataatccaacagtccaacgtccctgcaagttgattgatactagagtagtagtaatgtagaatgtctttcactttccaaacaatttccacattgtctatacacttatactgggttcacttccattgtgaagacagatgttgagataacaaaaattatatagagataattgtaccccaaccacagatgcttagaacgctagagaacgaatgcagtgcaatctttgttttaccttaaccttagacagcaatattttaattcatgatgtcattctcaaaagatgaagtcacaatctttatacaaaacagcgtcctagcatattgagatggtatttaagcccagaaaaagctgattgagaaccaaaaaaagaaaaacaattacgcaggccctattaagtaatgggcttggttttttggtaaagataatatatttagattatttcttttatttctattggtcttcgtaccttcacgcggatcagtgttagaaaagaatgaaatctgtccgtagaattgtattaatctacggttgctgtgatttcacgcggatcgtgatagaaacctcttatatccgttgattaaaaaccaatgaacgatccagatctaatcccgctgaaaaagaaaagcgaaatattttccctcccacttcttgtaatttccagacgataaatatccccttcctcaatcgaaacaaactatccagatctcaactttctctcatcttcaaattaaaatcaaacagtttcttaataacattttacttcatggctcgtaccaagcagacggctaggaaatcaaccggaggaaaggctccaaggaagcagctggcgacaaaagcggcgaggaaatctgctccggccaccggaggagtgaagaagccacacagattcagacccggaactgttgctttaagagaaatcaggaagtaccagaagagcactgagcttcttatccgtaaactccctttccagaggcttgtcagagagatcgctcaggacttcaaaaccgatcttcgtttccagagcagtgccgtcgccgctcttcaggaagctgctgaagcttacctcgtcggactcttcgaagacaccaatctctgcgccattcacgccaagagggtcacgatcatgcccaaggacatccagctcgcgagaagaatcagaggagaacgagcttagatctaagtattctggttactcttgtgttttgattagaaccataagattgtaaaatttcaagttaaatccaagggttataatattaattccaagcaattatcttttgttctatcaaagtattgactttttagttgactttattaatcactaattgtttggttaatttgtgctagttcacaactcattatagtctcacaaattaatcagctttgacgctgaaattgttgtgaagatcattgttaattagttgtgattcgatcgaagatgaactccaatctgctatcgaatcctatatcatcggaggtcttcacctccattgatttgggaacaaattctttcaagcttctaatagtccaagctgagccttccggtagatctttcgttccaatcgagagactcaaagagccagtggtgttgtctcgtgaatctccaacctcaatttcgtctcaatctcaggctcgcgcgcttcaatctctacggaaattcaaaagtttaattctctcgcaccacgtctctggtgataggatccgatgcgttgcaacggaagccttacggcgagccgagaatcaggaagagttcgtggatgcggtttttgaggatgttgggcttaaggtcgatgtgctttctggtgaagaggaagccaggttagtttatttaggcgtgcttcagtttttacctgtgtttgagaaatcagtgttgtgtgttgatattggaggtggttctactgaatttgtggttggtaagtgtggtgatgtcaagcttgctgtttctttaaagctaggtcacgtgaatttgacgcagatgtttatgaaaaatggtattggattgaaggaaatgagagactatattcgtcatgcgattgatgagtctaggttagcagaaaaattgaatgaatcagatggttttgaggttgttgtgggatcttctggaactatacgagctattgagaatgcagttttcagtggctatggagctgatttgtgtgatttcaatttggaagggtataagagggactggagatttggtacaagagagctgagcagcgttgtagcaaagctatgcagtgaaggagacgaagagctgattcgaagggagggatttttcaagagaagatcagagttcattgttgctggggctgtattgttggaggaaatattcaaggctcttggcatagaggacatggaggtctcagagtatgcattggcagagggtgtgattgctgattctctggccaaagcttttgatggatcatatgatttaaatgctaatgcaagatggcgatcggtcatgaggcttgccacgcgtttcagtggtaaaaagcgaatgactcatgcgatacactgtgccaagattgcaaaggtacattccttttcacgagcaacttaattgtgaaatattggttggcagatattcataaagattgtagctttttgtcataccttttaaatatgcattcctctggtcatatatatatctcttttgtgtgtgtgcgctagtgcctaatggtttcaaatttcattttaagctttgcacaactggatatggtcattttgtttcagtaggtttgatagtacagtgattttccaggagatctatctaggtttgaggaagtgcaatgattttaaggttatcttagacgataaagatcttgagtatctcgaagctgcttgtttcttgcacaatatcggaatcatcacagggaaaaagggttatcataagcaatcttatcatatcatcaaggttagttcatctaacgctgtcaaacataccattcaataagcacagctctttataatctggaaaagtaactcacaaaagcttatcaccaagagtactctatgtttctactagaaaatttttgtaggttttcagtatttgttttgtccacattgttattaatagtttcttctttcgtagaatggggatcatctccacagctacactgctgaggaaatcgaggtagggtacttaatcctctataaggaggaacttgtcttcaatttacatttttttttttactgctgtggaatttactgtttttctgattactatcatattattttcagcttatagctatgcttgtgagataccaaagaaaaaagtttcccaagcttgatcgtgcacctcttaagggcttcactggggaggtagtgtgtcatatatcagcttagcaaaccaggatcaatttgttgatgtggttgttttgattctatgttttctgttgcaggcaaagcgaaaattcataattttgtgtttgattacacgattatcagttacacttcaacggaatgagaatatggatctccaagaagttgaatttattgaatcttccgagatcttcaaactcgtaagtacatcttttaatcattctacttcctacactgagcaaacccatataataaccatttcaaactctacaatcaaccccgttgtacctagattccctgcattcttcatttcgttcttccaatgaaattaatggtatgctgatcacctcttagtcaatttatttaaatcttgtgaaaatttcgaacttgttagttaatttccttgctggggataaaatggatatttccatctcaatatcagtgtcttaaatctttgtctcttcactttactatgattattgtttgtttgattgcaggtgctgaaaagacaacaccaggaaccggtagaggttggttgtcaagatcaagtaaacaaaaactctgatgaatcacaactggagaaagaagttgagcattttaaaagggtaaacattcattattacccaataattttgatcaatttcactttggttatcaaatgtttgaatttcatgcaatgaactgtcagctatcagcaaatatctatgatcgattagtaacagtaatagagacactgtggaaacattacctcaacagctaatgtaccaaagcctccatatataattttctggtattcgtttgctttgaactcagcagctatacaaaaaggaaatggtgattgtttttccttcctgaaaatcaatcagacggtttctaagatcaatgagttatcggtatgactaaactgaggcaactctagcaggtatgagaaactttctctgcatcaaagatcaaaagcatgttatataacaagtaataactatcataaaccatttcctctgtcacggcaaaactaaacctctacataatttggtacagagagttgttggtttctttcctggagttttccgttgtccaatttgtgaagtcgaaaatgtcaggtggtctttaattattcatgatcttgcagttttaaaccagaaactgatggtaaaactatgattgtacgcagattgaattggtgtaatgaaaagaggtaattaagcatcttagccaaccctgacggacttgttgtgtcaataaatttttgtctaactatttgattcaacaaaaccttttaacacaagattccctctctcacttgtacttttgtttgcctagatttgactccatgttaacttttcccactggatgtgtgcatttgggttataagcagatgttgaaacggttgccttcgaatcaaggtcatctacacatgactgcaggaccaagtgagtgaagccggggcggttgaagcccttgattctcatctgaagaatgatactattaccatggtaaggaagcaaccaatgacaattctagtatcaactatttgctttgacaattccaaaaaaattatatttatttatagtaactcattctgactatgtagtatattgttttatacttctatcataaaaaaattgagttgcgacattttgaatcctagtatcaaatttaaatactaccaccgcaggataactagaagtggactacttgaacataagcaaatccagatggtcgagggtagctaaatggtacttaaccatgttaaattaaaccgatatttaaccggtactcttaaaccaatagcgtttgaaattggcgcaaaacaactataattgagcgagagtggtagagaggagcagaggaggtttaatggaaatcgagcgtaagctgctgcgtcttctccacggccacaatactcgaacccgtttacccgaaatccacgcccatcttctgcgtcacttccttcatggttccaatctccttctcgcccacttcatctctatctgcggatccctcagcaactctgattacgccaaccgcgtcttctctcatatccaaaaccctaacgttctggtcttcaacgccatgatcaaatgctattcgcttgtcggtccgcctctagaatctttatctttcttctcttccatgaaaagccggggaatttgggctgacgagtatacttacgcgcctttgctcaaatcctgttcgtctctttctgatttgcgatttgggaaatgcgttcatggtgagcttataagaactgggttccaccgtcttgggaaaattaggattggggtggtggagctttatacttccggtgggagaatgggtgatgcacagaaagtgttcgacgaaatgtctgagagaaacgttgtcgtctggaatcttatgattcgcgggttctgtgactccggggacgttgaaagaggtcttcatttgttcaaacagatgagcgaaagaagcattgtgtcgtggaattcgatgatatctagcttgtctaaatgtggtagagatcgtgaggctttggagcttttctgcgaaatgattgatcaaggttttgaccctgatgaggcgactgtggttacagtcttgccaatttctgcatctctaggagtgttggataccggaaaatggattcattctaccgcagaatccagtggtttgtttaaagatttcatcaccgtgggaaacgctttggtagatttctactgcaaaagcggcgacttggaggcagcaacggctatatttagaaaaatgcagcgtagaaacgttgtttcatggaacacattgatatcgggatcagccgtaaacggaaagggagaatttgggatagacttgtttgatgctatgatagaggaagggaaagtagctccaaatgaagcgacatttttgggggttttggcatgttgctcatacacaggtcaggtggagagaggagaggaattgtttggtttgatgatggaaagattcaaacttgaggcgagaaccgagcattacggtgccatggtagatctaatgagtagaagtgggagaatcacagaggcgtttaagtttctaaaaaatatgcccgtaaacgcaaatgcggcaatgtgggggtcgctgctcagtgcttgtcgtagccacggagatgtaaagctagcagaagttgcagcaatggagttagtgaagattgagccagggaattcggggaattatgtgttgttatctaatttgtatgcagaggaagggagatggcaagatgtggagaaggtacgaacgttgatgaaaaagaaccgccttagaaagtctactggccaaagcaccatttgcgatgtttcagtctgagaagtagctggtttttgtcaatagaggccagacttattgctaaatacggtaatcaagttcatttgtaagcacatttgtatttttctggctcggtgaaaatgcggccaccaggtttgattagtttctaatgaattgattagaacaaaaatctgttttgttcggtttctttcaacaaagaaacacaactacgccaatagtataatgcacaagaagtttggagtcgacttactactattaaaacttaaaagaaaaccagaatagagagagtgagatgtctgattcataaaacgtgaagcaaatcaccaatgctgtcttggtttcctacttgatatactgagatagccatttaaaaccctcgccataacccattttgcggacgatgctgcacatgaagacctcaaggggacgaacaccagagtcttcaagattcactatgcctttaccggtagtgaaattggtgagacctaagtaatacctaagctcatcttctgaggatgcataaggtatatcaatcttgttgccaagaataagacagggaacatttgctaaggcttcatctgataaaagagcgtctagctctcttttcgactccacaaatctatccctgtcgtaagcatccactaggtagacaacagcatcaacctttatagtttatacacacacacagagaaagatttgattttggttccatcataagcaaatcaataaacacaaaacatgtaatctagttaggattaggatgtgaaccttggcatagcagtctttccaaaccctacgagcaatctgatggccacccaaatcaaaggccttgaagttgattttgccaatgctaagttcctcagacgtgggatgctgtgttggctggtgctgaactaatctctgcaacaccaaaagcgatattaaagcatcttcgattacaagaatcacaaaatttctcagtaatacatatattagttgaagagagagcgtagaagtaataaagcctacctcatctttgagcatgtgaagcaaagtagtttttccggcattgtcgaggcctaaaaacaagattttcgcctcttttttgcacaaccctaacgaggccaagattccatagaaccaatcgaataaaaacatgacgtcttcttcctgatatcggattataatccacacaacaaccaaaaaaatcaccagaacagaatcgggagacagagagagatgaagaacagaacagaaaaccaaaatcaaagtttcgtttcgttgatgaagatatagttgtatgttgtaacattagtgtatatatatgcaaacaaaaaaagaaattaaaaaacacgtgggtaatggggactggtaaattgatgcggagccttgtgattggtagtcatcatcgtcattcgatcaatatgaaccgtcggatcctagaacttgtcgttgcgatgttttttattacgttaaactttttaagattaaaggcttaataccacgtggcaaaaccttaatggccaggacccaggagagtttatttcctccacaagttattattatgagccgtctgaggaaagctacccacatttaattcaaacacataggatacattttttttattgttcaacagacatgatcaaagtgtatatacaatggagtatttaactttgaaacagaaataaaataacatgtaattactgtttcaacgcataaagaatcaaagtgcttacgaagacgagaaatattgtagttccggtgagaccacggtgtttgaagcagtcacccccgcttcctacagaatggccaccaccggtaccgccattaccatttccactgctgccacggccgccgctattagaagatcctctactgccccctttaccgctgttgccgcctcgaccactgctgccacctccaccaccaccacgacctcctccaccgccaccaccgctgcttcgaagctcccgctgccaaaccgggaaatctatcttacaacacgttttgttacctaagatggaattaggtttcagatggacggctgagacagaagtatttgtgattgaagcaacggcttggatatgcgcatgaatcgctagtaacaatagtaatacgtgaaccatacgtttcatgaatctgtgtatctccatactaatcttttcttttatgtttatttatcgctctaacccaaaaaggaaaaaatgagcttttgtgtagtacgatctctgtttatatttcatctggtcaacgtctaaaatctaacttcatttcctaggaaaaaagaaatggatgccactactagtctactatagagcaatattagcgaaatatttacgtttatgtaaggtgtcgagcctctcatttatcaaattttgaaaaattcctaaggaaaggccaactaactttttcttagctatgaacaggcccaacaactttgcttgggtcataggtcccacgaggaaaaaaaagaattttggatatggcctggctaaatctatctttatgtatttttgttatgttcaattttacgatcattacaagcacaaacattaacttaagtaggtctatttactatctttaatttctgtttcatttcgtttaatttctgaatgagtctagttacgttccattggtttcattttccaggcataatcaatacacaacattaagtgaccaaactaaactaacctattacaatgtctacctcttctcattccgttcacgacccgcaacacgcatcacagatcattttacaataatctacatcaggttaccaactggtgctaaactaattagtctcaagtttccaagcattatacgatatatagcaacatataacttcgtggtaatacgtgtctgtttttttcccaatatcgtgtgtattatatacaccattaaaatattatatcttcaccaatttttgaatgagttggtatcatgtactccatgaatgtatcacaaagcgaaaaaaaaagaattaatattattgaaaaaagtctacaagaaattgaagtatataattttcaatgaattggattatcaatagggtcacattcaaagatgtggttacaatcatcaaagcaaaacttttttcgtttgtatttctaaatatcttatttcttgttgactgaattatatatatctcgaaggaaaactaaaaataaattttcaagctgacttttattcagctggttataaaaccatcgaatcatgtttatattggctttcaaaacacctctacatacgcaagaaaaaatagttatacaaggtagttgtccaaccaagagtttcattataagcctttatttcttcatagaatttagagatccccagaatttattttcactttctaatttattataagggaagtaaaatagctctgcatagaattgcacatttctattggtatataactagctacacatgcaacttttcaaatttaaacataaattttaataagacaatggtattacttattagtacaaagagatacaaattctgtttagatcaactgggaattgtaatcgctaagaatttttgttaaaacatagtacaaatttatttattcccattataaaacctagtggatggttggaaactacataaacgggttataaattccgtagctatagaagttcgtacatattaaaatggagcaattaagaataataaacagaaaatgatttataatattgaaattgtccatctatagaaacccaggagactcgggggcctctgaatcatgcctcgctcttcttcttcgtttcctttttctgttgttttaatttcatacaaagaacaacaaaaaaacaaaaaaaaaacaaagagagggtcaaacattttttttgttctctctcaatttctttcattatattttctcttccttataaatctgagcaatgttccacatataagtgaatattcttgtatctatctacacagctttgattttctttgttcggttttggaaaaatctgtttcgagttaagaattctaaattttggttgtgagattctagtggtcgagatttggggtttgagaattttccaggtttcttgttgatcaagctaagagcattgaatcgtttcttgtcaatggcgacggagcaacaagattcacaactttgtttggcgacgattctggaggattttcttaaacaacgaaacattcaagttagcgttggtgtggattcttcgagcttgaaaaaagccgatgaaacttgtacgttcgtcaatattcctctgttctttctttttctatttgtccttttggtccatttttgagattagggtttgtaattgataattgaattagggaatatagatggattacataatttttttaggatgatccatcgcattttttgaatccatataccgcgtgagcttcttgtttcaccaatgattttctgaaattttgttgttacgatctttatatttgtttacctagatcatcatgaaacatatttcatatttttaagtgcttattttaatcatcacaattggtgtagttggaggaagggatttgccagtagatccttcagacttgagaaggtatgaagcagcaaggtgggtaaggaacacacttggtgtagttggaggaagagatttgccagcagatccttcagaggaagattttagaattgcattaagaagtggaattttactctgcaatgtcctcaacagagttaaacctggtgctgtcccaaaagtaatgtctctcacctaatttctcttatgttttcctcttctttattacagaatattttatgctcaactttttcaaagacttttttgaaacgtttaggcctgcttgtataaagttgtgcaagcatgattagtacaaccattttgtgtaatatttttataaaagaggttgagaaattgattcttttgttgccgatacctttgttattaggaccgtttgttctgattgtttcagtcttgattcaggtcgtcgaagctccaaatgatcctcttgttaatcaagacggtgcagctctatctgcgtttcagtactttgaaaatcttcgaaattttcttgtgtttgtggaggaaatgggtattccaacgtttgaagtctccgattttgagaaggtaatggttaggttcgaatcaatggtcatcatagttattcaaggcagcttgacctaccttgccggaggggttacctagacaaagctgaattaacattgacacacattctgttttgtgcttgatgtgttgttctcagggaggtaaatccgcaagaatcgtggagtgtgttttggctctaaagtcatatcgtgagtggaaacagagcggaggaagcggtacatggagatacattctgaactcaaaaccaaccacgtttggcattgcaaaacaatacaaacgcaaagactcagaagtacctgtggatgctgtcacaaatagcccttctagcactccatcaagtgaacaacctttgttagatcaatctgattctaataccaaaaatgatgttagttagctataccaatgcctccctagctagtattgattaaagttaaagctctcaacttacatttttagttttttttttagggaactgccagttcaatagatgccattgtccgtgctgttttttctgatatgaagcaagaagatattccagtagtaagtattaacttaccaaatgatcaatattattttgaaatgcaggttttagaataatactctctgccgttcttgtttatttccagattgtggaagatatgctgaaaagcgttatggtagaatatgaacgtagattagcaacacagaacgaattggtaagtaactttagttattcacccttagatctaatgatctcatgtatcttggattacaaggaattataccttttttacactttttatcttgaatatgcaattatttagctactgatgagcgcgggaaacagagataagcttggcagtggcgatcttgggagaactatttcaggaaatgaggagacgctaagtgatgcttcggtaattgtaccacccttgaagttggtgatcttgttatccatataagcatactacgatcttcatggatttgtatatctatcatcataatgtgttatatgccaaactggtttaatgattacatatttatgcagtacggagaagaaaacgtgacagagattgtaaacaacaacatggaagcttcacaagatagtaatgttgaagaattggaaaaccaagattatgagctctatgcaatttcaaaagagaagaccgagaagcaacaactgataatcgaaagacaacaaactcatactgaggtatatataattcagttgaacataaatagttatatatggcatcttgtttcttttaagactttgtatttggtgattatcaagacatgagtgtatatgtgttggcaggaactgaaacatgatctaaaggctgtaaaagcaggtctcagtctcttgcagatgaaataccagcaagagtttacaagcttaggtgatattatttcctacaacaaatttgagatgtttaattgtgattgcaatcactggttcatagcttttctagtgatccattgtacttttacaattgctatcaaagaaattaatcttatgatcattcctcatggttttaggcaagcatttgcatggacttacttatgcagctacaggataccaaagggttcttgaagaaaaccggaaactttataatcaggttcaagacctcaaaggtaaaatatcaagttgcatagtgctaccactaccaagcttggagttgcaagttgtatttagtagattcagttactaagatctgcaatatcaagtctaacgaatgtataacaggaagcataagagtttactgtcgagtgaggccattcttacctggacagaaaagtgtcttaactactgtggatcacttggaggattcaactctatcaattgcaaccccttcaaagtatggaaaagaaggtcaaaaaacattcaccttcaacaaagtgtttggcccttcagcatctcaaggtgattcaatttctgaaatttatttatcattctttcatttttacatatgatcaagatgcatataaattttgtatagacatcatgatcaatatgtatctatatatgatcttccttgaaaactattggtttttagttattttatgtcgcctcttacagaaacgtttaactttctatatgtagaggcggtgtttgcagacactcaacctctgatccggtctgttcttgatggctataatgtatgcatatttgcatacggccaaacaggatccggaaaaactttcaccatggtacttttctcaaagactttaccttattgtggaatattgaattttctgaaagacttcaccttatctacatttgtaattttactatggtaatcagatgggacctaatgagctcacggacgagaccttaggagtaaactacagagcattgagtgatctctttcatttgtcaagtgtgagaaaagaaaccttttcatataacatttcagttcaaatgcttgaaatttacaacgagcaagttcgagatcttcttgccactaatggccaaaccagcagatatcctttttcaagacttgtgtctctttagttttagtaagtcccaatgcttcttgcatatgatcattgtaacctactttccttgacttgtgaacacattagagattcgaaacagtacacaagatggaatcaacgtaccagaggcgacactggttccagtctccacaacttcagacgtcattcatttgatgaatattggtcaaaagaaccgtgcggtcagcgccacagccatgaatgaccgcagcagtcgctctcacaggttttcatttttaatgtttttataaaattgaaagttattatctcattgtctttaaacatacacttctagtgtcattgtgtgaaatagaaaagaacttggacttgaaggaatttggtatatactgaaaattaaaagagaaatgagaaacatagagcataagagtgaagattacatgttttattgtttataagaacaagcgctcactcttcctcagttcgtgttataatagtcacttacatgttttattgtttatacttgcagctgtctcacagtacacgtccaaggaaaagatctaacatcaggagttactctaaggggttcaatgcatttggttgatcttgcgggaagcgaaaggatcgacaagtctgaggtcactggtgataggttaaaagaggcacaacacatcaacaagtctctctctgctctaggagacgtgattgcatctctctctcagaaaaacaaccacattccttatcgcaatagtaaactcacccaactgctccaagacgctttaggtaaccagcaatactcaagtgttactgaatctagtcacgtataacaataatgcaactccaacttccaattgctaaaacggtttccatttgaagtataacatatggttctacaatgtatgcatgtatgtgtgtgtgcaggaggacaagcgaaaacgctcatgtttattcacattagccctgaactagaagatttgggagaaacactcagcaccctgaaatttgcagagagggtggccactgttgacctcggtgctgctcgtgtcaataaggacacttctgaggttaaagaactcaaagaacaggtccaccatatatacttctcttcacattattatactattcattctctcaaaatacattgtccaaatcatcagttacctttgttatttgctttcagattgctagtttgaaacttgcgctagcgagaaaggagagcggggcagatcaaacacagctccaaagaccccttactcctgataaactcctcagaaaaaagtcacttggcgtttcgtcttcattttcaaaatcagcaaacagtacaagacaggtccaaaccaaacataagccatcacagattgatgatgtcaacagcattgaggtaaaggggacaagaaaactcattcaccaaacaaaacaaatcaaacttgttaatacgttttgcagtgattacttcatgatgtgtagtgaaattacttgcagggtcaaagtgactctgcatctagccttgacttacaaggactagtaggttcaccgtcatggaaaaccccgccgagagatgggaaagaggaggacatggaatttattataccaggaagtgaatgggttgataaacacgaggacgaaatcacgcgtagtagcaaacctgaaaacagagcacatacacagcttgagaagcgaacgtctagcttgaaacgtgaagcaactcgaggtgtagataagaataagtgtaatagtagtgtagataaaggattagaggtaaggaagattccatacgaagaagaagcaaatgagtcagatgaaaccgcaacaagtgattgctcggagactaacttgatgtggcagttgaatgttcaagtgaatatgcctagaccagcttctaatggttcttcaactaaactaaagaagaatcaatcaaaaataagtagagttgctgctgagaccaggtgagttatttactatataaatgattggattttcttataaaaatagaatgttttagctaatgtaataatgttgatgatcaggagtatgataccttcgctaattccgacgcctacgaggacattatcgcttggggcggctattagctcgccaggacaaacgtcctcaaggcataacaacagtacagtagttgtgaagaagagacaaaatcccaagtaatgatgaaaacattttgtgagcattttaagaatacaattattattggcggacccatatttcatattatgaggtcatatatatacagacgccgtatacgaagagtagaatacgtatgagagtgatagattgtagttgtactatactataggttgaatatgttttgtttgatttgtgtggcgtttactagaatgaatattccattctttttatggccgatgttgtattctactacagtattacttctcgaagctaatgtattttattcatcacaagagttatacattttctgttttaaactttccataatctcgatttatatgtactttttaacaatatgatttgtcaatgtagcaattttatagtttgatattttgttaagctagactagttagttaataagagccaaatcagtttttgatggcagtttgactagatggatggtgatgtaaaactgctacaagcaaattagccaaatagtcaaacacatatcgaaaactgtgtccattatgatattttttttataaaaaaaaaccaaacagaaatattactatacggatttttttcacaatcagatttagttaaatcaaaatttgaccaagaaaaaagaagttaataaaaaaaaattctcctaccctaaaaatgtgtccgttatgaaagtatttaagaaaatttgttatttttattacaaaaatgctttaaacaaatattgcacgaatcatttgcagaaaatactaattctataatcaaacttaagaatatacgatttctataattaaacttaaaactatactaatacaattccttacctaaagcgggacttttgaggggcaattaagtaatttcgagaagttcatcatatttcttaataaaattagctgtctctaacccccgcgtcgctgtttcttcccaatctgagaaaactctcactctgcaacttcgtttctcttctcctttcttaaacctctcacgcggtttcagacttccgttcgcttaccgaagacggctcggaaattctttcctgaagaatcagcgacgaccttagcattatctacaagtcatcttttctgctagatctgttgtgtatactactcgcgatttcattttggtgagtttattgactgcgaagaagcctcaattagtgttcttttactgattttgctattgctcgattctactttcgatacattttcctgcatctcaaaagatagccaattgttggagattctagaattctctagattagggttttcctctgcattttctctatatttttttatttgtttggttccattaaccaaaaagagtttatctttgagtaattccgtagaaacctcaaatttttggatgagaatcgaaatttagtaaagttggttaccattttgttctcatttttagggagatagattgttatagggttccttagtattatttattagaattgaaccctaaatgtttgcagcaactaaataattttgttttctgtgatgaacaaagaatttgttccagccaatgctgaaggctagactaaaatgagcgtgtcaaaagcatcgaggacgcaacattcgctcgttcctcttgcgaccctgattggtagggagctgaggagcgagaaagtagagaagccttttgtcaagtatggtcaagcagctctcgctaagaaaggagaggactactttttgatcaaaactgactgtgaaagggtacctggtgatccatcatcggctttttcagttttcggggtaattgaggcattcttccctttaaggattctctgttttagtgacgaatagcttaccctttttctgttttgtcttcagatatttgacggacacaatggtaattcagctgccatatatactaaggaacatcttctggaaaacgtggtgagtgcaattcctcaaggcgcaagcagggatgagtggcttcaagctcttcctagggctttagttgctggctttgtgaaaactgacattgaatttcagcagaaaggtcttagcttatgcttattttttaaaggctttttgctttctattcttgtttttcaagcatgctctaaccgataagatctgttgtgcttacaggggaaacttcaggaacaaccgtgacttttgttataattgatggttggactattactgttgcttctgttggtgactcgcgctgcatattggacacccaaggtggtgtggtttctctactgactgttgatcacaggctagaagagaatgttgaagaaagagaacgcataactgctagtggaggtgaggtcggaagactcaatgtatttggtggcaatgaggtatgatcatttccagtgaatttaagttactgtttcattgtgttttggctgtggtgggtttgtaatgtgtaagaagtccttggattttcaatgatattaatgtgctttgattatgccaatgcaataggtcggcccactacgatgctggcctggtggtttatgtctttcgaggtccattggtgatacggatgtgggagaatttattgtccctataccacacgttaagcaagtgaaagtaagctccctttcccttggtacatttttcattaattcttatatttgacattgatcaaaaagtatttttatctgtacgttcagcttcctgatgctggagggagactcatcatagcttcagatggtatatgggatatactgtcttctgatgtggctgccaaagcttgtcgtggtttatctgccgatcttgctgctaaacttgttgttaaggttggtgatcaaccccgttgatttcattgtgttcttcctctggtctagattcctcttttttctgaatcatatgtttttaccaggaagcattgcgaacaaaagggttgaaagatgatacgacttgtgtagtcgttgacatagttccatctggtcatctttccttggctccagcacccatgaagaaacagaacccatttacctcatttctttcaaggaaaaaccatatggataccaacaacaaaaatggcaacaagctttctgctgttggagttgtagaagaattgtttgaagaaggttctgctgtgcttgcagataggtaatcttctagccatgagttaatattgtcaaactcttatccaacccgttaagtaactgaaacttcagatcctgactatcagtctttgtttgctcgtgttttgaaatgtagattgggaaaggatcttctctcaaatacggaaactgggctcttaaaatgtgctgtatgccaaatagatgaatctccgagtgaagatttatcaagcaatgggggttccatcatttcctcagcatctaaacgatgggaaggtcccttcctatgcacaatatgcaagaaaaagaaagacgccatggaaggaaaaagaccaagcaaaggttcagtgactacttgaagccacttgcgtgcgtgaaaaaaatcataaaatccggtaagaaatttgtatgtttctcattttcttatctaacttcttctcttgtgctctgtaagagtagcttggttttgtgttcttttcccaggtattgattggaaagtagtagtaatagtagaagtttatgcaaatgtttgtagagagagagagagagagtgtgtgacaatagatccaattcttatccattgtttaagatttccctggattgcgttcttggcattatgctgaccatttaccttcgtagatgtgtttttgtttgggaaattgctgatatactaacaagagtttccaagttgtaagtagaattcatattttgttattgtcactcaatcctattgcactcattcattgaagtttgtttcggtttatatatatatgcctttggttatgcgaaatgagattggttttgggattactactgttcggtttggtttatgctttatgatgcgatcttgaatctagaatcaatgtgtttgtgattgtatggttacgtggttcgatatgtccggtttactttggttctcacttcaccggttacccaaaaataaaataaaattgttgtatggtttctatttatttcgttttacagactgaataagtgaatatttgcatggaaaccgagatatgagtctgaagcagtagcagttctggaaacaacaaaaatttgataaaccgtcgtactaaagatagttcgaacaaaaatccaaaacacatttctcatttcacaaaacaaacgaaaactattgagtcacaaaacacagagagaatggagaaaacagaggaaagcgtcggaatcagagtttacacgacgacaacgacgcaaaatccgtcaccaacatcgtctcggtcgcccaaacctgtccctctctcttcactgcctatgcttccggcaggagccgccgcgggaggaggaaaaggtagaaaacgtcgcatggtggcgaaaggagttcaaaaaacggtttcgaagacatcaatgctcgtcaatttccttccgacaggaactctcttgatgttcgaaatggttcttccgacaatctaccgtgacggagactgtaacggaatcaacacactcatgattcatcttctcttgcttctttgcgcaatgtcttgtttcttcttccatttcaccgacagtttcaaagcctccgatgggaaaatttactacggttttgtgactccacgtggactcgcggtgttcatgaaaccaccctcgccggggtttggaggcggagatgtgattgcagagaaggagattccggtgacggatgagaggtataagttgagggttaatgactttgtgcattcagtgatgagtgttttggtttttatggcgatcgcgttttcggatcggagagtcacagggtgtttgtttccaggaaaagagaaggagatggatcaagttatggagagttttccgttaatggtcggaattgtttgcagtgctttgtttcttgtttttccgaccagtcgatacggtgtcggatgcatgtctacataataactaatttcacttttctgttgttttgtgattttttaagtatcttttttttgtagtatttgccttgtaatttagagtatatgaatttaatccactgactactatccatcgttttattagtgttttacaaaatagtttcgagtaatacacatgttttccttgattccattatattatgtcctacaatatagtaggtcggtgagcttggcttgtttgtcgagatgaagtcgagtttatgtcagtgaagttatcatgatcttatcttcaaagatgaaagatgttgatatcgcaaagaattctcaagaaataacaaaacacataaaaatctaatcagccgagttacaataaatccctaataagggtttgagtcacttcactggacaaaaacctactttggtacatggcacgtggaaacacacgtgcctaaaataaactcttgccaaagttcgtaaaaaagaaagatattttcactggaaaaaataaagttgaatattttccataatcatcttaaccaaaaacctcaaaaatattcacaaactatgttttcagggaacaaactcttgtgtctttattttgacacaagagaacaaaccttttttcttgaccaaaaaccatcgaaccttttgtcttccactaaggcaatgatattaatttcaggattgtgcacttcggtccaaaatagtaactactaggacgcttatatttacgactcatcatcggtcatgtatttcttctacaaaaaaaaacactaaataaaacagagccatagtttcattaataatcttctctcgctttctctctttactttaattctgaagaaggatgatgttaccagaagcatgcgtggcgactatcctctcatttacaactccggctgacacaatctcgtcggcggctgtctcatcagttttccgagtcgccggagactctgactttgtgtgggagaagtttttaccgaccgattactgccacgtcatctctagatcgactgatcctcaccgaattttctcttctaaaaaggagctttatcgatgtctctgtgaatcaattctcatcgataatggcagaaaggtctgtgatctttatctctgtctctgcatgtgaaccaattcttggtttaatgttaaaattcatttcagattttcaagatcgagaagctttcagggaaaatatcgtatattttgtcgtcaagagatctttccataacttggagcgatcaaagacattactggtcttggagcccacgatcagattcaaggtcgttattaatttaatcatatcattggtgtaacagtgtaagcaataatttttgtttcaatattttgattataggttttccgaaggagtccaacttataatgacagattggttagaaatcatcggaaaaatccaaaccggagctttatcgccgaacacaaactacggagcttatctgattatgaaagtaacgtcacgtgcctatggactagacctagttccggcagagacatcgataaaagtgggaaatggtgaaaagaaaataaagtcaacttatctaagttgcttggataacaagaaacaacaaatggaacgtgtgttttacggacaaagagaacagaggatggcgacgcatgaggttgtccgaagtcatcggagggagccagaggtgagagacgatgggtggatggagatagagctgggagagttcgagacaggatcaggagaaggtgatgacgacaaggaggttgttatgagtctgactgaagttaaaggttatcaattgaagggtggaattgccattgatgggattgaagtaaggcctaaacccctaaaagtgagggccgggaccaactaaaagatgagtgccaaattttgtgtttaccggataatgtgtttggtttgggtaaaaaaatgtaagatgagaaaactgttttggtgggttggtaataactctaatcgagttatacattattaatttataatacattagagtagatagtagtttcttttgtttgacatttatttgataacattctgaaaattgattaatatccgttaggtatcattttgttcaaacatctctgtcaattcaattgtattaaaaatgaaagcgtttaagtaatattatccataatagaagtacctaaaatcaccataagctatacaaatacgaataattctgttttaacgacattttgcaaaaatagtatacaaagggagatatccacgctttaccaaagtaaaagttaatattgaataggacaacagcgaaatagacgtgtcttaatgtcgtcatttcatttggcacatgaggacattcttagctcatatcgaatttctagtgttacctaatctcatgttaggtggcttatacaaatttttggttgatacaacgtcgtcatatcgtgcaagcacgtgtatgtagtactattatagctttaatacctaattagtagataaacagtgggcacattctgcctaatcgtttatactttataggcttatagcaatttgttaagttcaattaggatgactttaaatatattctgaccgaaataaatttgaacagctttttaatcttacttgtttgattatacggaattagaaactgtaaccttagctaaggttgacgttccctcataaaataagtatcaaatgtttgaaaacaaatcaaaccaaagctaaggttgatccggacaaaagctccataagtttagagagaacataaaaggagaccaatatatctctccgacactgattcacatttgacattgtcctcagtctagtcgttccatctgcaatacaaatttcagaaacttttgatttgtgttcttccaaaatcgatttttatatcaacaatgagactgcttggcaatactacgaatagagaaaccagagacaagtattggtaccttccagagaccgtcgttgaggtaatgcatgttgtcaactcctattcctttgttaatgctctttctgtgaacatacacaagaaaagtttagcgatgcgaaagaaattttatgagcaaacaggggaaacacggccaaaattgatcctggtgcaggtatgtgtatctaagggaagaaggaatatcaataaagtgacaaagatagggttacttggagaggcctggagccaagagactgtattttggctaagatacgaaagtatatcaaagcacatgtttgtattttcaaataaattccagcgaaaaattgacttacatgtcctttgctgacattttggtgaagcctattgctaaggcatgttgctttccttctgcatatatggcctaaacaaatacagattcatggtttaagatcagcatatacaaacaaaaatgcaacccagggaaatactgtttttattcataccactggcctttcagcctcgacttcttgatccagaacgcctcccggggatgtaagaccaggacacattatgtttgcaccagacagaacaaactttatggcacctctatcaacttgaaacctcttcattatatttgggtctgcaaaactccaaacattcagctgccaaatttttgacattcgtggctaattgaaaaaactccaagtttctttctatgtatcattcaagtatgtaaaagttagctgaacgtggtgttttcaagaatattttatactcttctggtaacagccaatgccaaaaccttctcactatgataagggtcagctaacccggaaaacataaaacaaaatatactaaacaaaaatcctggctaaccaatcatacgtggaccttttatatagttcactcgcatgaaaaaagccaaaggaacaacaacttacaggaaccaaaccccaggaagttctaaataactcagagaaaagtgtcggacatactattcaggtatatgcagtatttgaaccaggtaagttctactgcagaccacagtaagactaacaggtgtgaagaagagtgattgtatgaataaaacacccagatatgttatgttttgataacaagaccatatagcatggatggtgtgaaggaaaagtgatattacattgatgaagaagccgcagtgttggcatgtatggcccgtcacggatacagaagaagagggggacattgttgacaacaactagggtcagatggtttgggctgcacgagaaatatagtcaggaatactgtaagacatagatagtgggtaaaagaaaattcagaaaacaaaacaatgaatatgagtttgttaatttacagaccacttcactacgataagaggaatctttttgggaagtagatcctccatcactgattcaagtcccgggtactgcaacattaacataaacatatttatatctgacaaacttcacgaaatcataaaagtttaagaaggggaaaaagacaaatgaaacaacagacatacctcatcttggatactctggcggatcctacgttgaacagatgccttcacttggttttgtgatgaaatctcctccaaacaaaacctaaataaaaagtagtgaacataaataacaccttcatagacataatggtatatcaaatagatctaaagttgatagcagtagggaaaaataaactttatacaagattcactatgaatgtataagcatgtttcaggagatggataaacacaaactccatgatagtagagagtttagactggtcaaatcaagacacaaactttcctctatgacccacgactctttgtacagatttgataaatcaaatagtgacactatcaatatagaaaccaaaactttacaatagcaagatgttagcttttgagaactcaaaaccttctactttgaagaaaatataacaaccaatatgcccataccaaggctactctaagcaatcaaattaacaatgtggtcgacaacaagtagaagggagtgagttctcgatagttattagagtaagtggatactaaataaagagaccatcacattctttatcaactagtataaacaatgccgagatgttgaaaccactaattcttagattctacaatccgggtatgaaaaacagtttctatctaaataaaaaagtagagaaagaatctagaaagagacaaagatgcttacttcttaaacatgttcgaggtttattgaaaatgatcaccagcttctaactatggtatcttcttccctgcaagcgaacagtggaagatgattgataacggaaatatcggaacatcactcaacaaaccaaaaatttggacatcatatcgcaacaaattcaataggaaaaatactgaaattccaaaacagaaaaaccaaacggaacagagcaggaactcacggactgagagagaccgtggacggtgtcacggcggaaaatggtcttggacggagttactaatcggcgaattgagatttgagaggtggtagtagaggaaccgagagaatgtttctctcaaaaaaatccccaagtgtttccgatctagtgtctcttttgtccaaaaacgacagtgtttaggaaacctaggagaatgaatgacccgatggtccgaatccgattcgaaattggttcgaattgtaataactaacatacaatattccggtttgaatgataagaaaaaacacattcgatccggttagaacaatatattaacaggcccattaaaacatatgggccgatcttgatcaactgggctattcatcgttgatacatgcggccgcacaggattaaaatccagttccgttttataaaaggatactagtttccaaacgaacggtggttgtctcctttccagaacaatctaacgctttctcgaacatcttcttcttcttctttctcgaaattatttttccagtaatcaatttcttctcttctagatttttacaggaactaattttctgctctgaggtatcagatgagtagccgatggaatcgtacgatctacgttgggaatttgcctggagatattcgcaagtgtgaggttgaagatctcttctacaaggtttgaaaattcctcttttctctcgataaaaattgaattcattatgacttgtttgggttcataaatttgcaattctgtcttgctgagacaatttaaatcgactcttatgtatatttgtttcagtatggaccaattgtggacattgatttgaagattccaccgagacctcctggttatgcctttgtcgaggtatattgatcaagtacaaatttgtttttttcttcttcttgtaatagtataggctaatgactaagatagtttgttattggtggcagtttgaagatcctcgtgatgcagacgatgcaatttatggacgtgatggttatgattttgatgggtgtcgacttcgggttagtaaacgcatgatgaaagctagcttaattttctgtaatttcttgtaaaggtgttatctttgtgtgatgtttttaggttgagattgcacatggtggtcgtagattttcaccatcagttgataggtacagcagcagctacagtgcgagccgtgcaccttcaagacgctctgactaccgcggtttgtagagtcttctcgattgtgttatttggtgttgtgtaaaattttatatttgaaaactcatttttactacctaaacatgtagtgcttgtgaccggattaccgccttctgcttcgtggcaggaccttaaggtaagggacactatatagtctttttctctgaatgttggttctctatatcatgttttggatttatctcttttctgaaatgatgttatttgctatttacgggtgattaggatcacatgcgcaaagctggagatgtctgcttctctgaagttttccctgaccgtaaaggtgagttgacattcgatagtttggataagcttttgattgatgtgttagtaaattagtctttgtgaaggagaataggtgttaagcatctgaactgctaaactcacattcagtatttctttgtaggcatgtctggggttgtggattatagcaactatgatgatatgaagtacgcagtaagttttatatctttgcaacgcaaatgttcctggacttatgccttagactgcttttgtttcatagtataccgagctgaatttatcttcctggaggccagtgttggatctttgatgttcccttaaaatttttgatgtgacagataaggaaacttgatgccactgaatttcgaaatgctttctctagtgcttatatacgggtatgttgtattgctttctttgattttgttaagcataagtggatatggagtcatctctgaatttactgttcaggtgagggaatatgagtcgaggagtgtgagtcgaagcccagatgattctaaaagctatagaagcaggagtcggagccgtggtccaagctgtagctatagtagcaagagcaggaggtctttttttttttttttttttcataaacctaagacatataagggatttttattgtaacttatttatgaaattaactgacttctaaatgcaatgcagtgtgtcacctgctagatccatttccccgcgttcacggccccttagtcgttctcgctcgctatacagctctgtctcaaggtatgagtgttagatttgtatcattattatatatgtagttaccccttcatggatcacttgttcttgcatagtgaactccttactagctttattacttacaactaagcaccttttgttgcttccgtacacagttgaatttgtttgagtcttttttccctcatagtggactagtctattgtcacttgattttcttcctttgttgatgttttctatgtcatgcaaactccaatatgggtaaaggttacctccttgtttgggattaccagagttccttttcatttcttacacgtgaatgtgtttgttttttatgttttgagttcttgacagagatgctcccatcatatttagtccttttcctttctctttgtgtcgttctcttctggatgtttccttctgataaagctttacttcttaacttttttccagcgacggtgaatttattacgtatcaatcttcattatccgacttataatttaaagaacacttagctagatgtttcactttttgaaaatttatttctatcggaagggggaagatggatttctgaggcatgtcctcgatcatttaccgtgattacaattgtattgcgttgtttgttttctagatctggctcactgctacgagctggggattggatctagatgggtcatctagatggattcttggactggatttacaaagctggattagcatgaacttgaacttctgtttttacggtctggtctggtctggtactccgcgcgtatcagctgtaggatctgatcgcaaagttttggactatgattactctgattcctcaatatatttatctttttgacaatagtggattctgtgttgagttcttttctaggacagcatttaagctcccgggactagatgggagatggtcagtaaatttctttgttatgccacacttacatggggtttttggtcttgctgcaggtcccaatcaagatcaaaatcaagatcaagatcaagatcgaattctccagtttcacctgtaagtctaaaagctgaaccttctttaattcacaatccatggtgtttgtttaaatacctgctcactttggttgttcttcaatcaacaccaacttaacgaaatcatgagacagactataaaatttgaagagtctgtagaacgactaggtctcaccaacctctgtgtgcactaaaaatcgcct

SEQ ID NO: 24 - DNA, 16549 bp, Arabidopsis thaliana
ccgaatctttcctttcgtctcctccgcacctctacgttgatacccagctgcaaactatatggtggtatgtggttattaaccattgccatgaatctaacaatattcataacatatacgcctatataacggaaactctttcttaccttcacaggttttgatagtgtattgtctttatcattgacaaaccgctgaacaagctttgatactgtttcccgaagttctttctctgtcaaaccacaagtagcttgaactgggaatatccgatggcaccagctgcatcaatgaatcataagttacttgtttcgacacaaagacatgcttacatcaagggaatctgagaagataatgaccaaaagttcctagcagagtggataaataactacatggtccaaaaagaatgaaataggtctgatatgtaacagataccactctttgggattataagacttgaaaaattattcgagactaaatcagaactctataagcatgcttatttcaaggtagagttgaattctaaggcaagtggcgataaaattctgattaatcaattgaccaaaggttcactaactagcattacaccagatagacttacattggtgccttcaaagctccagattccatagactggaagactcgtgatacgatattcgttgtattgggagagttttcaacagggaaagtaaagagaagcaagccactctttgttagcttaaccaatgacatgagagaattgtgttcttcatttgctaatttaagatcctcaacatttggattttcacctaaacaaggcacagaaagagaaaagaaagacaagaccataagccaaaaaaaaacaagaatttgaatatgctcaaatccgcaaatgaaagttacctgtttcctgcaaggcatcattctcaagaggtacagtcttctctccgccttcctctgtctcttgtgcacaaactttttgttttttggatgcagtagagtttagaacttcaggtttctcctcatgcatggacccaatatactgaacaaatcaaaagtttgatttccgtgagacaagctgaacattagagaacccccaccactgcacttataatcactttcgtttcaaatatagtgtttctctaccacaattggttatcaatcactctgagttatcttctaaatgaaggaacaaaaatccaaacttttgcctcactaatgatggagaattgtgacgatacctttccaaggatggacatgacctctttagtagcacttttctccctttctgataacaagtgaaaatcagaaatagtttaacttcaatccctcaattcgactctcgtttagtccaatacacagattccacaagtcataaactcggagacaataaaggaattcgagaaattgaaggtcatgtcgcaaaacgaaattaacacatagaaactaaaaaggatgatacaaaagagtattgtaaagaagatcatactgatgttgcaggtgacgaggaatccggaatgagaatgatgaagcagagaagagggagctttgtagtcgaatcgagggatgcttatgatgctggagtgttgctcccatggagtcaatgtttcagcttcctctcctctttctcttttttcacacacagtctcttcctctattgttcttccaacatcgtctacttcttctacagcagccatcgttactctctctacctctctgtctctctcaaagccagagttaggccaaaaaaaaaaaaaaaaaaagaaagacattgagccttatatgattcagcgattcggaaagtgcggtagcgttttaaaaccctgaaacgcgacgtttagagaacgcaacttcaaaacagctaaaccctgaagcttaccagaccagagacagaccaatagaacatcatacgaggtccaattcgatcctctcaagagtctgcgagtctgtgagggggaagagatgcagtttcttgcgcggaatctagttcggagagtatcgagaactcaggtaatgctcccaattcatgttttcttcgtaatttgcctcctccttgttgggattgttcattaccatactctgttcctgaagacttgtatatatttgaggattaaagatcgaattttttgggttccctccaagtgcatagatcttctgtaccataaagtttcatcttttgaatgggaattgactttctataaagtttgcagaaattttgagacttgatttcggagactacttcacctccgatgctaataacttgtgtttcatcaactgatactgtttctacatgtgctttaaaatctactgagagacatgttctttttaaaatggggtttcaggtcgttagtcgaaatgcatattcaacccaaacggtcagagacattggtcagccaactccagcatctcatcctcatgtaactctcatgtgctatatgttctcttggatttgcaaatgctatttatatgctcagatggttcgctcttccccatcagttaatggcagaaggagaggtcacaccaggaataagaattgaggaatacattggtagaaggaagaaacttgtggagcttctccctgagaatagtttagccatcatttcgtcagcccccgtgaagatgatgactgacgttgttccatatacgttcagacaagatgctgattatttgtatctaactggctgccagcaaccaggtggtgtggctgttttaagtgatgaacgcggtttatgcatgttcatgccggaatcaactcctaaggtatgatgatttcttagtacatgagtttttgtatacagagtggttttgatttctgtatagcagtttataagaattgatttgtcatgtaggatattgcttgggaaggagaagttgctggagttgatgcagcgtccgaggtcttcaaggcagatcaagcatatccgataagcaaattacccgaggtagcttatatttcttccctaagtggcctctcttttaaattttcctatgttgtagactttattacttttgtaacgcgagatttgttttatttttcacgttctttatgtacagattctttcagacatgataagacattcttcaaaagtgtttcataatgttcaatcggcctcgcaaagatacacaaacttggatgactttcaaaattcagcatctcttggcaaagtgaaaactctttcaagtttaacacatgagctgaggttaattaaatcacctgcagaactcaaattgatgagagagtctgcatcaattgcgtgccaggtattcctgtattccaacaaagccattgttatgcttagaaaatttctgtttttagcttttttagtacaactgagatgctagagagtaactggaaatttaagatgttggagaaatttacaagagataatggggaaagttggttaagttgataacttttgcagacaattgtgtgtgtatatagtgaatttaatctcaagaattgatctgacaaagtgacgaacacacccataaaaagctcccaagccatggcctgatgggacaattttggttgagggtgttttattgtgattggaggctcatgaaagcaatgccttgctcaatgatatgtgaaagtgaatatattagaaattttacgtttgtcttgtggccaaagtgctaaggaaaaggaacatagagccaataaaacgtcatgaaccattttctacatatttgttgaaaataatagctattacagacaatgagcgtatggagtgattttgatcttttcatcctcagggtcttctgaaaacaatgttacattcaaaggggtttcctgatgaaggcatcttatcagcccaggttgaatatgagtgccgggtaagaggtgctcagcgaatggcgtaagtctcgacaattattccatgaataaatatgtgattcagggtctattacaataagtatttcctagtattcttattctagtgacaagaaaaatgacatgatttattcctcaggttcaatcctgtagtcggtggtggttcaaatgccagtgttattcactattcacgaaatgatcagcgtgtaagtttgacaaaaccctatttgattgctagtacagagatgttcctgaaaccagtatcttctttttataattatctgcagattaaagatggtgatcttgtcttgatggacatgggttgtgagttacatggttatgttagtgatcttactcggacatggccaccttgcggaaaattcagttctgttcaggttgatgtttctgctgtctcatctttcatctttttttgtctggtagttcaatattcttctgtttacgtttgtgctttgccggtggtgtttgtatgatgcaaacgagagataaaccttacttactatctcattctctactaccaaacttcttacttttttctgagatatacgtttcacaggctagctttttccttataatattgatttaggaaatcttcagaatttggacatgtgcaggttacatagttttttttggtgaccttcgctcgatttcacaattatgttacacagatgaaaagtaactgtacagctgctttcttaaaactttctctatcaaaatattgacatttgtgttttttccaggaagagctatatgatcttatacttcagacaaacaaagaatgcataaaacaatgcaagcctggtacaaccatccgccaactaaacacatattcggtaattacaaactatcttaagccgtgtctttgtacttaagatgtatcaaacacacaaaatgtaccgtttactcttaacaggtttgctatgatgtgaaaatattattctacttctgtcgaaggcttgttagcaaatatttcagaagctaaaatggatcagagatttcatacataccatttcgacaaaaaaaaaaaaaaaaaaaaaaaagatttcataaataccatcagaaaacttaaaagctttgtttgcaaacaaaattatgtttggactcagatgatgctttgtggtttgcagaccgagttgttgtgtgatggactgatgaagatgggcatcctgaaaagtcgtagactgtatcaccagctgaatccgacctccataggtatgcattattgaacctcgatcacattaacttatttgcaatttttgtcgatgaaatacaatcaactaaggctgattgacgtgtagatggtaaaatccttgttattgtcccgcattatgctgtataaaagttataatataaccaaaatatactgtatggttggggaaaaacttatctaacagagctctcttctggttaataaaaaggccactaccttgggatggatgtgcatgattcttctgctgtgggatatgaccgtcctttgcaacctggttttgtaagtaatactactctctcgagtcttagtttttataagcaacccaaactcaggctaataagatcttcacttttctacataccccctgcctcaaacactctgcttgttgatgctagtccattaaaaccgatatgtgcccttagaatcttgatcgtagaagtttatgtatttgtcatgtgatgccattggggtccttacgtttgagacaaatggtttgatggtgctatcaatagaatctaaattacatcaaatgactggctttggtgtttgctagataatgatctttcagactctcgatgtcaacttatgatcgctgtttggacaggtgattacgattgagccaggagtctatattccatcttcatttgactgccctgaaaggtacacatgctctctttagactaacttcatgtaaaagcgtggttttgtaggaaagtttgcagccaacaagtatcaaactgtgtagatctgagtggtttgactgcaaatcgaccgcaggatatgacattgatctatcgaccatggttaagtgactttactattgaaatttctcattgcagattccaagggattgggataaggatcgaggatgacgtactgatcactgagacgggctacgaagtgctcacagggtcaatgcctaaggagatcaaacacatagagacattgttgaataatcactgccatgataactctgcgcgaacttcgccagtttctctttgcaaggttaaaggcttgcatacgaaccgtaacccaagaagattgttttgaattaaacatcattgataataattcaaacgtaaactcctgttccttgcgtttgactcatagaatgtatcaaagcattttgaagaaatcttacgcattctgaagtgtggaatttgtaaatagcaaaaccaaaagacatcgagttactacgagaaaggtcacatatcacaatcaataagttaggagttggaacacttatagttatgtgaactttagtctttattggttatggttgcttttatgatagaagaaataaataatgcactatacagtaaatagtatatgtcatccttaacacgtaacactaaacgcccaagaaatagatgttctattcgattaaaatcatataaaaaataattgaggaggccgtcggttactggttagcaggtggagagaatgtgaaatgataggcactgcatttatatggacggggccatgcaccacatcacaataatcatcatcattaatattgtgatgatgatagccatatgaacgatcatgtaagagatatatggtttaacccgaaactggaacacagagctgacaagacgtacccataaacctgcccaaccatggccattaatgattttacatgcacctcatcttcaagaatcaagagtttagattttacattatggtcttgtcggttttttcaaatttcttgtagtagaagaacaatcgatcacgtcgttttcgatagtgatgttttttaccgttattttataatagggttggtctcaatttgataccaaaactaataaatttgccaaaattgtatgaagtcaaaggtatcttctcaatccgagtgtatttcacatacaatttaatttctaaacatggtggcattctccgtaataagatcaggaaaccaagggcaaacccacaacacgtcagctatatatcactaggctaagtcccttacctctccacaacacaacttcagctttaagacagctaaaactaaatacaaagaaacagagatgggtttggttacagaggaggtgagagctaaggcagagatgtacaccggagatgagatatgtagagagaagacaaagtgtttcctcaaggaaatatctatgcccaatggtttattaccattgaaggatatagaagaggttgggtatgacagagagtcaggtgttgtatggctgaagcagaagaagagcatcactcacaagttcacagagatagataagcttgtctcctatggaaccgaagtcacagccattgttgagaccgggaaaatcaagaagctcactggagtcaaagccaaggaacttcttatttgggtcactatcaatgagatctataccgaggaaccccctaccaagatcacgttcaagacaccgaccacactgtccaggactttcccggtcacagcttttatagtcccagaagaacctgccaaggaggaacctgccaaagaggaacctgccaaggagaagagcagcgaagccaccgaggccaaggaggctgttgcaatcaaggaggctgtcgcagtcaaagaggcggcctaatcagctcagcttcagcagataaaagagacccgaatttttaagtgtacttcaagaatttgaacaaatcatggagagttagtgtttctcactgctctaactatcatgtattatctacctaccacttgttgctgcttgttttacctgtaataagatatcaatatcatcctgttccactaaaacttatccttaattatctataaactacaatacagctggttctgtatgtcacttcaaaaacatgggaaacctcttcgcaagcaaaactgagagcatacactcctaacattcataagatgctaaacttcgtaggtaatatggcctacctctttcgaaaaatatttgacaataggatggataatcaacaaggcaaggaagtagtgttacagcaaaaacttgtctatcaaataatcaaccgaaatcaggagcaatgagaatcgcactatgtcatggaacaagaataaaatatcaactggttgttgcatcttagtcactcatcataactgcaattatctacaatagcaagggaacaccagggttaagactaactgactaagagatacaagtacctcaaagaaaaacaaaacttgaaatcccaaaatcctgacgagttatccagcccatttacaccttctgagactgaaatcaaaattaatgacagcaacttcatcagtaaaagcttgatgaaaaatgactattgcaggaacgatgctgaaaccttagatataaggggaaataacgaagttatatgtgataaaatgagttgatcgttttagaaccataccttaaaagatgttatccactttccatcaatccattcctgatgtagccttagttgagagtgatgaaattttagcagctcttgagtatttttaaagagaaccaggtaagatgactttgcaagaacctttctaatcaccccaacccaccatccatcattatacaaagcattaactttgtcatgcctctcaaatggactaaccatgacactctctagtggcagaggccttatccgtgaaacattaacctcttctctcaaaggctctttcccatcttcagctttcagattatcatattctacaaggcatttgtcctttcctctgtattcaataagttttgcaagaaaccaagaatcttcaaatccttcttcctcagggctaacctcgatcggagttccaatgctgaacgcttgcttctcagttgctttcttgggtctcacgttccggttacatgaaacagtctacacatcaaaataaaaactttaaacacacatatttggggaagaatatgtcgcacataaagaagaatgggataagaatgatctatgtgaacttgtctagagttcataattaatatggaaatcatacagaaccttttccctctttatcttccctcctttcagtggtagctgccaggtcccgtcaacccaatctttatgcagacgaagcccctgccttccaaaccgcatcttctcttgtgattgcctaaaatatataccaaccgttccatgcttcataccatctatgacaacacctacccaccagccgtcattgtaaaatgcattaatcttgtcaccaacagcaaaatcaatatcctcatcccttggtggtggcggccttatgtgcagaaaatcggtttcttctttcaaaggctctataccatctttttctctcaagtctcggtactcaacaagaaatttgtcttcgccaacgggttcaacaactttagctgcaaaccaacacccctggaaaccttcctcatcgctgctaacctcgacaacagtgccactggaaaacatttgtttcgcgattgctctggtagtttctagatccactcgggctaaaatatcctgcattttattactatcatgattaaagtgcattctcataaattgctctagaagaactaaagcaaaagtctccactaaacaacttccacagaaaggttatcaagtatcattgagaatgtgttacctacctcctcgtcttctgagtcgtctaatttgtcttcctctgattcatcttcctcttcttctgtttcctctaatggaggcttccaagctccatcaacccattccctatgaaaccgtaactcatctttcctaaaccgaatctgttccttagagctcctaaagaaaacactgaatttcccatcatccagaacctcagtcacatccccttcccaccaaccgtcattgtaaaacgcgtcgacctcttccccaaccacgatcttcttcttcttctctatctcagacattggcggggccggaggacgaagctgactcatgtcgacaacttccttcagtggcttcgtcccctctttatcgaagaagagcgtcgtatactcgacttggcatttaacggaatccttatctgaggaagatgggatggtgattacttttcccatgtaccacgagccgcggaatccaatctcgtcggagctgatttctacggcggagccaggtttgaggtaagaagggagacgctttcgattcgctctcgtagccatggaattcttaggagcagctttcttcctctgcttcgccggagatgaaaccccaagagatcggcgaggccgcaacatggcgttgcaagtgtcaaggatgaatcggggaaaggaaactggcgggaagaattggtagtgagaatcaaagaaaggaatcagctttttagggttttggggtttgatttctcaatttcaaaaagctttgcttttgggatatcaaaagtctctagatttttagcttttaacgtcagaaacagaaacccaaaatattctcaatagatttgtggtaagatactgagattggtgaaaaagtgatcatgggctaaaaagaggttgtagcccaagttcacctttttttaacttgggccaccaaatttatttgggcttaaaagaacgtaaattattttcataataatgtcctttactcagtagtaatttcaaatcatttctctcttctcatgtctcatgaaacaacatcatctacatgatctctgctctgcattagtaaatcaccacgaagcttagtgttaataagtagctcaccaaaacaaaaagatgcatcgcctgcaacatgaacagaagatgcatatgcagaattggaaaggatcagagactttaaaatttctgatttttctttagggctaatatacgtataataagaccatacgagatgcaaaatgttaataggtaagtcgaaaatgtaaaatacatagaaagacgaatataggacctcttaaatcttacaaaacatttgaaaccaatcagtcaaaaaaccaaccatgtcgttttggcaatcttctttgtacaccgtctttgctctcacagcccttaaaaaaagcgtctttcttctcttcagacaagggtgaaggcagattgtactgttgattggaaccgtgatgcgattgtctgcgaagcaaactgctgaaattgtttctttgcatctgccaacaagaattggtgaatgccgattagagtcacctctatatatgtacatgcgtatgttctttgtacaaaaagctaacaacctattgatctacagctggtttgattttacacaaaatcaggtcagttgtgaaagactaatgaggatcttacctttcttgcactttgtgaagccgatgatattagccacattgagggacaagcaaacgccaacaacaagcagatagtcagcttgaaatctaatcagagaaaataccccaaggataaaccatgcagctgcctgaagagtgaaaaaaggagaagatttagctgtgaagacaacagaaaaagacagcaaacaaatccacatgtttttaatgtttactacgctccagtaccatagacatcaaatccatagctaccatctcatggctacatctcactctttatagtcgcttgtaaggtaactgagcatataagtttgtaagctaccaagttttaactaatattatacttagtcagtgtaagatcataggatatactccaaatggccgacttggttccagcagataatctttccctactcaacatatattgtaatgtgacttcgcatgtgatttgactccaatgtcaaatgctatatcccactcatgcagagggaaaaaccatttgtcgcaaacttctttaactggtagcttcttgggggaagatattcaggtgtctagcgatctatatatgggtctacatgggattctaaaagactgctctcaattcttatctaccacctttgcacaatatgcttcaatataagggacatgtttattcttgcctattcttattccactataagggacatgtttatccttgcctattcttattcctagtcatccactaaagttccacaatgattgtgaatgggttttaagtaattagcttatgctgcaactgaagtgttagatatgaaatacttactgcaaggtaaagtgtccaccagaaaagccatgagtctttcttgttcatccgagccaaagactgtatagaaaaatgatgaaaacacatgagtatacaaaaaaaaaacggaaagggaaacacaaccccacatttctcgacaggctgaacccatatccttgtgaataagtgaagaaaagctaacctcctgatcaagagactcgaatttccagacactttctcccaagtcattgatctcgttccaccacctgagaccaaccagtatacgcccactgacattcttaaccacccagaagtcaagagcagcaagaagaacagtgactacaaagatgatgacaaagctgttgaagaagagagcagagagaatgtaaaacgccaacgcagcaccctggtccaagaacaaatacaaactggtttaacatttgtccaatgtctaacatttcctttgactaaactgatttatactctaaatcataccttgaagagaacatggaaaagacatgtccttgggtttgcataattttcaactggtgcctgtatctaagaaagcataaagttttggtaagattagctgtagcaattttacattgtaataaccattacgatgctacccaaaagagtacataaagattattatccgccaacacatcctctaacctagcaatgtttatttagctcaaatgcataatttctacggattatcggagaccaaaacgtcgaaacacagatctgacacaataacatctagatcgaacaactagatacaggttaatcaagaatctgatatgcaatcgaactcagaaattaagtcagaacaaaatgagaggaagcagctgaaaattcacctgattattagggtccatctttcgaagaatccaaaaggatcaatccgagaaaaagaagaagtaatctgctgatcagcagaaacgaaacaccttctccgttgtggaaagtatcgatcttccctctgaattttcccgagaaaaaatttctgtatcagatcttcaaaactcttgcgcgtgtctgctacgtgatttcttctatttttgataatttctttcaaatgtgttttttaattctcaacgagcccgataactcttctctggcccaataatatttaaagaagttaggcccaattattcaaaaaaaatggtaattacgatttcaccacaaaaacttgtgtttcgatcaaaattatccactatccacaacaaggcaaaagaagagttaagaaagaagaggacgacaatggctgtaaatatgtgaccatgaaatggcgagaggctgagataattgtcttatcccttcaaaatttaagacttttaatgatcggaaggaacaagatgacgaggtcccacgaaccaccatacacacttcaatttcaaataagagcttttcttcagttgttgctcagagacttaaccaatcaaccatggcgaagatgatgatgttgcaacagcatcagccttctttctctctccttacttcttctctgtctgacttcaatggcgctaagctccatttacaagtccaggtctttttcatccttcgttctgacgactatcattatcaattttatcagatgggttctgcttttgtgtgtctgatgagccaaaatccgttcagcacatttcaaaactattccttttaaaatgggtttaagcttgtttgttcgacttcttgagctatggatcattgtgtctatattaatgaatgtgtgtctaaagtcttagtgtggttcttgtttcagctctgattttgtattatgagtaaagagttttatgagcttcttcgtcataattgtgagagtttctggtttgtggtttggctctggtttgagttgtctgaatacccccctcatttgtgtcaagtatgatttgtttctgtgacgctctgccttcagattctatcactagtcttagaattgaaactacagtttgtattttggggataagatttttcttatagagttggctttgttgttaaaattgcagtacaagaggaaggttcatcagccaaaaggagcactctatgtttcagcgtcgagcgaaaagaagattctgataatgggtggtactcgattcattggtctgttcttgtccaggatccttgtcaaagagggacatcaggttccactaccgatcaaactctcttttcagctaaaaatttagtttccgtttctgagtgaccaatggttgcttttgcaggttacattgttcacaaggggtaaatctcctattgccaaacaattgcccggtgaatctgaccaagactttgctgatttctcttctaaggtattacatgaatccttgtaaaaaactagtatgcacactcaaatataatatacatttcagatgataggaacttggatgattaggattccaataaaataaatgatttttctcggccttttctagattcttcacttgaaaggagacagaaaggactatgactttgtgaagtcaagtctttcagcagaaggcttcgatgttgtttatgatatcaacggtaacagctaatcactttgttcttactgtaaattcaagaatatctagtcttttgcctttgacaacaaagattttaagatttcgtataatttatgctctctttttttctcagggagggaggccgaagaagttgagcccatactagaagcactacccaaactagagcagtaagtaatacataacatctatcaaggcctagcttgttcatttggtttatagctttcaaaacatagcccttcaaaatttaaatcttccgttaatgttataggtacatctactgttcttcagctggtgtttatctgaaatctgatatcttgccacattgtgaggtatgtaaaagatatcttattcttattcctggaagatatgagcttgtacttttcttgaattagccatagaatagtatgattatgtaatttgatcatatgatgtcacccagaagtttattatctaaggccatttgtaataactttttatttgggacataactgatgcaggaggatgcagttgatccgaagagcaggcacaaggggaagctggagactgagagcttactgcaatcaaaaggtgtaaactggacttctatacgtcctgtctacatctacggtccattgaattacaaccccgtcgaagaatggtttttccaccgtctaaaggcaggtcgcccaatcccggttccaaactctgggatacagatctcacaactcggtcacgttaaggtcagtcacactttctctaattcttgagcttcctttcatgttcagaaaactcattgttatagggacccactgactgaaactcagctctgatcaatcttgaagagtattgatcaataacatcaaatcattctgtaatttcaggacttggcaacagcctttctcaacgtgcttggtaacgagaaagccagcagagagatattcaacatctcgggggagaaatatgttacctttgatgggttagcaaaagcttgcgcaaaggtacattcttttctattggctttattgttgtctcatcaatccaaatcgtttcaagtacatcctggtgtggtccgtttgtaatagatatcatactctgagctttttggatcattgcttgagtaaacttattcatgttttcaactctctctcaggccggtgggtttccggagccagagattgttcattacaacccgaaagagttcgactttgggaagaagaaggcattccctttccgtgatcaggtaaaaaccacaacgttctaatgatcgaggctgcaacatgaacgattccaatttagaagttgagattttgatatatgtatattctcttgcagcatttctttgcatcggtggagaaagcaaagcatgtcctcggatggaaaccggagttcgacttagtggagggtctcactgactcatacaaccttgatttcggtcgcggaacattccggaaagaagcggatttcaccactgacgacatgattctgagcaagaaacttgttcttcaataatcgaaatcctaagagttgctcattcttggcttgtatgattctgatcacccggttctcttaaagttctgaactttattgtcatctcacgtatgttatggtccggattttgttcgacttttctctaaagaagtcaagctagggacgatgaagaaaccgagaaagtaagtacacgagaaagagacggtctggctcttgacttaggaacttaggaattttggtatcaattcgatatcctctttctaaatctgaaccgaaccaaaattacaaccataccgactaccgagctaattaaactttagttttaaatgcgggcccctttgtatcatatagcccattaaccgatcgaaccgaaccaaaaaatcgaattcgcacgactaaatacagatttgacccgtgcttggttatgcccgctacataccggtcaaataaaaactcatttgggctccaatatttaaatttagaagcccaactcgtaattgaaaagtccaacttgtgaatattattagtttttttttttttttttcatcaaatattaatagtttatagagacatatttcattgg

SEQ ID NO: 25 - DNA, 95865 bp, Arabidopsis thaliana
gaattcgcacgactaaatacagatttgacccgtgcttggttatgcccgctacataccggtcaaataaaaactcatttgggctccaatatttaaatttagaagcccaactcgtaattgaaaagtccaacttgtgaatattattagtttttttttttttttttcatcaaatattaatagtttatagagacatatttcattggttgtaatttacttatcttttggcctatttttagtgaaaaaaatgattagttgattttttaaacgtctgaaacttgtattagtgattaattgaaaataaaagaaaagaaatgtaaattctattactctattggttatctaaatgtaaatgagtcattctccggaattttgttttatgttttttttctctcgactcttgttggatcatttagttctcactgcaagtcttaatcttgtggatagaagaatcttacaaaattcttgtgaaatttagattccaaagaatatactacgaaaaaagatttagtcttcttcctattttttgtttggtcaggattacttaaagtcgtagctccatgtgagtttataaatatcatcttattctttctctttctcaacatatgtcggtacgtctttttcttttcacgtatgtcggtacgtcaaaatgttatagtgctactcttagattgttacattcatatcaacatcagaatacccaacaatactacatacatatatccaactagtcaaatactctataaaaaactaactaaacaattcaacagacaggataaaaagaaatttggtagtctattgagcattttggcttacaagtaaaagatcttgaaacatatcaacgtaaactaataatgcatatttttaccaaaacaaaaaactaataatggatatatactataacattttggcttttggccagttaacaaaaagaaaaagaaaaaaaaagtttagaaatattaaaattatgacgttaggacaaaagaagaaaatatcaaatttatagaaaacaaccactacataaatagtaggtcggccatgggtcggacaaaatagattacttaacaattaacgagcagcaaattagctttgggtatagtaacaaccaatcaatgttccctcagcttcttcttcgtgggctccatttaggccacgtggcattatcacagccttgtattgaattcaacggagatccttcaaccaatcacgagatttcgttagcgctggtagggccctctctcgctaaacacatggggtagtatctaaagtggacctgtcacactgcatcgccatgtcatcatttcgggcatcttcaacttaatacgaacttacgaagctttccccggtggataattaaccgttttattaattagccataatcacggcctcaaagcctatataagttgtttctcaccaacaatcaaatcacttatcaacaactcaaaactgatcatcacaaagaaaagagttttctctgataatctttctcggacaagatggcacctgagatgaacaacaagttgagctacggagaaaagaagagagcgtacgttacgttcctcgccggaaccggagactacgtgaaaggagtggttggtctggctaaagggctaaggaaaactaaaagcaagtacccattagtggttgctgtgttacctgacgtgccggccgatcaccggagacagctattggaccaaggctgcgtcatcaaggagattcagccggtttacccaccggataaccaaactcagtttgctatggcttactacgtcctcaactactctaaacttcgtatttggaaggtatttatatacatgatagtatctaggtttaaaagacttgagaatctgaatttaagttttcttgatgaaacaataactatttggatgcagtttgtagagtacagcaagctgatatacttagacggagacatacaagtgtttgagaacatagatcacttgtttgatcttcctgacggcaacttctacgccgttaaagactgtttctgcgagaagacttggagccacacgcctcagtacaagattggctactgccaacagtgtccggacaaggtgacgtggcctgagtcagagcttggtcctaagccaccgttgtacttcaacgccggcatgttcgtctacgagccaagcctccccacttattacaaccttttggagacactcaaagttgtccctcccacaccttttgctgaacaggtaatacaaaatctacacagtatatatatatatatatatatatatatatatatgattatatacatacatggggcagctaccactatacatattagaggtcttgtaccttactctaatattatgaggctaagttgatttgtgtgtgttttataggatttcttgaacatgtacttcaaagacatatacaagcctattccaccagtttacaatcttgtcttggccatgctctggaggcatccagagaacatagagcttaacgaagctaaggttgttcattactgtgcagccggtgctaagccttggaggtatgatctaattatcttcttgttaatttaaaaaaaaaaaggtgaaagatctgaaattgcttctctgttttgtgaataggttcacaggccaagaaggaaatatggagagggaagacatcaagatgcttgtagagaaatggtgggacatttacaacgacgagtctcttgactacaaaaactttaatgtgcattgcggacaaaaagaagatgttcacaggaaaccgaaaacccttccacagttctttacagatttgtctgaagctgatgtgcttcaatgtgccaaagctccatccgcggcttagacaactttgtgagggctgacgagcgaggttcttgtcaacaccagtttgctaatagtttgtgaaactggtgatgtttacttaggaatttgttatatgaaattgtgctttactgttttttaatttactgaattaagaggactttttaatccccaaaccctctttgtaccttatatgtttgctatggactttccttcctaaaatacaatgaaaatatatatagttttgttaattatttctcctatatatagttttttaattttctcctatatatagtttttttaatcttcttctatttttttttaaattctttgaatttaatatacttgacttagaaactttaaattatattcaatatttatttatcaaaaaatgtgataaatttgtatttctatttatgcaattggtaagttcttcattttcctacattattgactcactaattttggaaacgtaattaacaaagtaaagcataaatgggtaagctaccacacatattttatacatgttattcaagaatctatgcaacacacaatctcttctaaaatttagaatacaaaattatgaatttcgcgcccttcgtttttctcatgatcgttcttgttctttatatttttactcctcacattgaaggagtcgaagccgatggaccaacagaagcactgatcaatagtatttgcatagaaaacgaagattatggattttgcaataaaatcatccatgaaaaattgaagacaccaacggctactatcaaagaactcacgagtctcataatatacaccactatggctcacgccagtgatacttacattttcatcgataacatcctccgcaaatggcctggccctaaggagacgagtggtctcaagacttgtcatgcagtttataagagagagaccaatagtttcttagaaattcgctttctattttcaaaaggagagtacgaacttatggatgaagccattttgtccacagccaagatcttagaagagtgtaggggcgattttcttattcctccttacaaggagcctctgcttgagaagaagagagttatgagaatattgatcaccatgtctgctgtttctggacatatggtcaaaaatgagaaggcttccttgattagctcagtagttactgcccagtttttcaatatttgagaacattaatcagtgatttgtaacaaatataatatcaataatatatagaaaatataacaaaataaaattaagcataaaatctcttttcttatattttataaatttcgtacaaaagtaaataaatgaaaaaacaataaattatgaatgtttatgaataatttccatcaaacaatagtgaatgaccaagacttgtagtttaataatttgtattagagtcattgttgtcaacaccaaattcaaatttggcatttgttgataaacaaaactacttaattaatttatataatatacgatgttgcttatgaagaatgcctaatgtgttaaaccttgatgaatacaactataagagattcaagcgaagaaacgtgttcgaatactaactcttgattttctactcgagttactaagatctgcatgactaaatctcgttctatgtaatgaatattatttctttattgttgtgattttggcttattcaataaactcgtaaagcataaaacaggagaacggtattaattagatatcgaatcctttatttttaaaaaaaaaatcctttaactaactttatgaatatataggaaagagatattctacctaaatcaattctttcataggctcatttgatttgagtaggacctcctaataatgcttattgatttttaggtcaactagaagtctagaacaagctccaactgcagcgacttcagaatcttgtttgctatctgagggttctttcttcctttagcattgaaagacgtatatcaagtttaagcaatgctaaaacttaatcgcagtgactatttggtcaacatatcaatagctttcttcgacatattcaccttctgtagtaagatctcatctccactctgttgcaattttctgctcactcgaatatgatcccttaacaatatttattaattttccaatcaactaaaagtctaaaccacctattcatttgcaaataactagctaacaactacaaccatttaaaaggctagctctatttgaagagttattgatttccctattcatatgcatattcgagttactaagatatcggcatttaagtagtcaaacaaaatcttcttctaattggtaaaaaaacttcatatacactagatgagtacccgcattacatgcgggtttatgtattactatttacaaattgttttatataatgcctgttcatataaagtaaagttgaatgcatcggttttgaaagataaatatgatttgtaattgtttttgaaaagtccaactatattagttcatctgaaaaacgaatgtgtttgagttatttttttattgttgttctagattctcagtttttttttttaagttagatatccttatttttttggttatatgtttagattgtgagaaggtgaaattttagaaaatttatttcttacactaaaaatagaacatgtctttgttaattatgtgtctgcatattcaatctaatcatattcaacttgatgttcttggaaagtttagttaagttcttgtcataatcttatatcttacgtattagttataaggatagctcctcaaacatctttcaaattacttgttttcttagcataaatctcgaaaagcttagatatatttaatctgcatattcatttagtttctttcttaataatcgtctaatttttaggcaaggaatatgtgtaacatgtttggattttatgatcactttagccacttaagtggatctcaaaattacataggatatattgaattaaaaaatgtagaaagagtgatggttcaatttctgattaattatatcctcctattttagttgttatgttaaattaattactaattatgtattacttattttatgaagtctaggtgacaatctctcatgtgatgatgtgtcaagttgtgggagagagttagcctcctttcatatatatgatttgcgattgaagacacacacacatatatatcttaataattatttattaacaactatataaatatattcacacacagatactatatgtactatatatataaaaatataagcatatgtttttaagtagatatatgcatatatgttatgctacttttttccaaagacaatttgttttggttgaaaactctaacagtaaaataaatataagttattaatttatttttaaacaaaaattattaattttaaagtgtttgacaaaaataatagtagaattaaataaaaaaataaaagttgagtgtaattgtggccttgacacatatgcatcaatactgactttttaatgtattgaagatttggtcaactcaaataatttataaacattgaatgttagttcagataaataaacaaaatattgtagtttgggaattgttttcttttccttgaaatacactaattctcacacgcaattttggtaacttacaaagactttttttgactcttgactgattcattcaaatgcctaatttcatatataaaataacaaatttctttctcaaatgaccacatactcaatttacaaaaaaaaaaaaaaaagaagaaagatgaaaatgcatcacattctctcgatagttttggcaattatactcgcttcctccgttgcagaagcttttctcgatgaaaaaactcaacaaagggtcaacggaatctgcaagcagacaatggataccagattttgcagtagtctcttgatcaagaacctgaatacttttcccgcaagtaacaaagaaatcatgaacgtgacagtaagcgaagctgaaaggttcgcggccaacacttatttcttcatcagcacgcttctcaggaatgctggagacgagaggcctgatcttcaagcgtgcgccgaagcttacgccattgtgaactcggcgttcacgaaagctgtaaccttcttcaagcaagcttactacagtaagattgtcaatatcgaaaagaaagtttctatggctgttgatatctgtaagacagatttcaatgtgctcggttatcagatcaatccgttgattgagaaaaacagacagacgaagatcttactatccatggaacagattgttagtcatatggtttcttcataatctgattgttgttgaatcatgacatagtagcaaatgtttccagaaatattctaattaataatggttacagaatcttcttaattgcaattctctatatgcatatatgtttttaatggcgatgctgatgctgaggttgaattgaactgaacttgataaggataaaaataaacacttgggatataatataatatatctttttctgtaagatctaattctgtttttgcttctatgaattatgaccttatggcaaaatcaggtggtcaataatactaataaatgtccatagtgtttgtctttgacaattaagtctaactaaatcgcatgtgattctccatgttctgtatcaaatctactatatctatcgattacaggtacatgaaccgagataaaccttgcaactcgtaatcaagaatgacgaagaagattaacaaaacagaacagcgactctgttttgattcgtatataacacttgagttactaaaccaggattaaaccgttacagccaattgtaattgacttgcacgaaccgaaaccctctgtttcaaggcactattttacattttgggtctaaatgaatattgaaggtctgtaataactttcaccctctgacaaaacataaaataaattacttgaagactatgatttgatttgttttggggataaaggaaataggttattagaaagaaaataagataatggaaacgatgaagattaagaatactgaatatatatagagatcaaacaggtgatatttgttgtccataggatgaacacacaaatcaacactccatcattagcctcaaaatgggatacaaaattaaacactccgaaaatccaatttagttgcagtaacttagataacaagaaatcccaaaaggttcttccatagctcatacttatatatgatgaagaagcaatcaccattttaaggcgatgtagaccttgtggaaccatttccactacttgctaccggtaatctcgattcaatatcttcattactttcactcttgactttatggttttgttgtttcaccttctccctttcttcttccttctcactcacctctctgtctttcccccacaatacgccatagagaccaataaccacaagtgctgatcccataaacctaatatacatatatcatataaattcatcatcatcatctcgtttatataatgtttaaacacacagagagatagataaagatgtatagaaacatacgtgccggtgtagagtttctcttcaagaagagcccagctgaaaatggcgacaactacgagaagtaaagggctgaaaacagagacgtacagaggacctttcctctgcatagcccatgacattaggcagaaagctaacgcagacgccaccactccctgcatgatccgtgttttatactagtgtcatatatttttagcttaagattgttatctaatgatcatagtatatgtatgtggacttacggcataaagggcggatatgaagcggagaggagagctgagagaccaatcagagattgtatgatcggagatcaaagcaatggctccacattggatacttcccatcaaacacattagtagtgtgctcgtgtacggtgctgcaaatgtttcactcatcttcgtctgtaaccaaaataatatttatcataaccaaatgagaatttagtttcattttccattatgtgggttcaaattgtttgaagctacatttttttttaattaagtaattaagttacctggataatgaaccaagcggcccaagaaacggcagcagccataataagaaaaggtcccaagaagaaattagaatggccagaactggaaccatgtttcgtgatgttttcagcgtaggcccaatggatcttggattctccaatgccgatggtgtgaccatggtagaaggagagaaccatggctccgatcacacatactagcgtccctatcactttggcttgtcctgatgccttcttgatccccacggtttcttgtctgaaaagaaaaaagtcttgtgttaagcaataatcataaacgagtattgtctgaaggaaacttaattaagattaatttcatataacctgaatattgcggcgaggaggaaagtgaccgctggtaagagattagttaaggcacaagcaatggtcggagatgaattctgaagtcctacgaaatatagcacttggtttccagtcgcactgcaaagaaaatcaatgtaaatcgctttataacaaagtaagattgcaattagtaggtaaagtgtatgtaagatacccagtaatggagcagaagaagacttggacaagaatcctaagtgtgatcttcggtcttgtcttcctgcacaagaaaccgtgtatgaaaaatttatgttttcattagtccactaatcattattaatcaattaaagcatttctcattgaatgtaatcatgcaactaatcctaaaaccacccggttaagttaaaccgagactcaagaaaacaatcaaattcacttctcatatcatatgaagagattagagtggagaaacagagtaaaaaacgtaattgaagaagcacgtgtcttggcaaatgaagatggcacggcacctgacgacgcttaactcacctggcatcatgatttgtttgtcatcatgtgcttcggtttaagaaagaaacgtgacgcgtggattgtgtgagactgcgtcacatttctcatttgtttctctctcggaaaacggaattaatgataatgtaactacttaggtttccacataccaccaaaatcattgacggtaccatgattatgaaaaaataacggtaaatactaatcccaataaacaaaagaaaaaagctagtgtctactacatttcaactaattaatcagcgtcactttaccacttttttgtcttttttttctttaccacatttttcttcacattctgaattaatattattcatcaagaaacttatagcttaccatataccattatatgcgtattctatcgtaatctccggaaaataagacgatgtcgtgctaaactttttttcttaattattagtttagtgtttttaatttttagtcttctaaatggaggttcatttgttgccaaaattgtaaaataataagaagtaaattaatgaatttaaatctattcaacgtatagtactgatgaattaagttattaacatatatcaaaaaaaatcttgaccacaaaaaaaaaagactttaagcatgcagtacttctatgtcaataaattaaaaagcttgatttttgaaacttttggaaagtaataaatttaggtgacgcaagaaagttcaaagacgtaaaaacgttctacatgagactcacaaagccatttagtaaatggtttttcgtcgttaatattttaatatacgcactcaccattttgacgtttatgttgatgaatatgatttcatcattttctactttcgcagttaagacaaacttgaaaacacaaaaaaacaatgctaaaagaaaaatttagctaatcaaagtttagcatttcttgctgatctttgtaaaacatagactcaccacctaaaacctaattacttttaaccccaaaaaagtaataaaaacacccatatgctttattcaagaattaaaacaaattcaacatttcatcgatgcaattgttttaatcgtgtaattcatacatgtctaaaatcgttagttgatcaaataagatgtatatgggcagatattagtatggttttttttttaccgttcgagaaaaaatgcgaccggaaaagtggcgatagtggcaaatatctgacgataagcgaccaggatgagtggcttcataccggcctccatagccatcttcgacgtaatgttcatgcctgcgtagccgatttgcaccaacaccatcgccaagaacggcaacatatctgatttagccatctctcactctcttttattttattcttccaatttatgtgtttatgtgtatctccaaaatatgcctctctcactattactaatcaataataataggtcaagaaaccaagaaaaaaaaataagggagagaggtggattctctatatcatttattagtttccccaaatctatattttattttggttcgaccttatatttatagccaaagatgtatatatacacacatttatatatacatgcacatacatatatttatttatatacatacatatatatagagagagatgttttaaacagaaaggtgagaaacggttcgagaatgaagtttgcttgtaacacttggactctctttagggcataagaacacgaaacaataggtgatatgaatcatttgatatttttggcaatttatttaaattttctccttgctgattactaatacaatccaaattggcgttttgtcaaaaaaaaatctaacttattttcctcgttttaatccatttttttggtttccgttttttcatgggtttggtggagcttgtgaatgtctttctcaagcttcaagcaatcaatttgcctttgctaaaactcgtttctgtgatattaaaccaagggcttggtttatcgcttgattaacaatatcgaattagtattatcttacgtattttgaattgattttcattatatcactcttgctttttgtcaaacttttgtgtgtgtaatatatatcataaatggtaaattaactatttatatcccaaaagggttggaagttgggcatggattatcgaatatatattgaatggcatgcatcttatgcaatataaatataactaggtaagtatccgcaaaatgtatgcatctaattatttctaaaatttaatatataattaaattcatgattatattattacatgtttcagttcgactgcatactgtatatatactatatatttttaatgtatgaactaggtaatcatttacacaatgggttggacatacgtaatttaagaatatctttgaaaataactggaatttatatcattaaaaagtaggatataactagagtggctagtataattttcagaaaactaattaatttttaattaaaaactatactgaaacataatgatttatatataaaactttagtaaactaaagtaaaatgcataatgaaaacttgtataatataagaaaatctcatatacaaaacaacatatattgttgggccaattattggtcttaaaaggcctcatttattcttaaaaggcctttccttaggtgtacagtgacttccttgagcaagaatgtcatttcatatggatagagataaaacattggtctgtagtcagcacataggtataccaaacacgttaaacttttttgttggctgaaatttgagaaagtaagtgatgcttaacattttgctggatatcagtggttaatttttatacgaaatgcttttggagttgaagatgaataaattatgagtaatgctccatttgcataagtcaaacaagctagcgttggcgtccagatgattaatttccgcgtcctctttggcttccaagttccaacgtaaattttcgccgcatattttttcgatcttatcttttcgttgttacgtacaaaaggaaaattccattgtacattcgttttggatatatactttaggatgcatatgcatatttatgtatgaacaattagcatctacattggagctggagccaacagtaagcttgagttatgtgtctgtcactgtcaaccaccaacatacaaagtcttaggctttgtttttaaattcactaaagaatcacactcacacactatagcttaaaataagagaaataaggcccacacacttaaggcttaccattattacaatttattacaaagctttcgatcttcactctatcttgatcaaatctctactagcaagttacaatggctactctctctcttcactcccactctttccttcttgttctccttccgtttatcctcattctccgacaaaacttggcagtggccggaggatgtcaggttccgccggtgatttttaactttggcgattccaactccgacacgggtggactcgtcgccggactcggatacagcattggtcttcctaacggtcgttcgtttttccagagatccaccggccgattatccgacggacgcctcgtcatcgatttcctttgtaagtcaactttctcttgactttttttaactctagttaattatttagacggtggagattagaggtaagtgcaatgaagtcgtgacaaccgtccgatggaatagatgtaaaccttaatcaacggctaataattgatgacggtgatcgcgttgcgtgatgccacaaaacgacacaattcactcgttgaaatgatgaaaatctaatccaaagaaaagtgggtcccacttaccaacatgggaagatatcacaatcaaaagtgggtgccaccatgtagattcggcgcgtgaacccactcgttacattagattgcgtgactaaagagtcaaacaacgccgtatagtaaaagatgcgttctgttttttttttttttttttggtatcaatgttaagtatgcgttctgttttgtccaaatcacatgttataaggtttcatattttagtcatttatatactataatgcatgaaaatattttgttactaacgatatgcagattcaagttaaattttggtggttggtaaagttgaaatgcaacttctatatctaacttcaaaagtaaatatgaatctaatattccattcttttctgacatattggcaggccagagtttgaatacaagtctattgaacccatacttagactcattggttggatcaaagttccaaaacggtgccaatttcgcaattgttggatcttccactcttcccagatatgttccttttgctctcaacattcagctcatgcagttcctccatttcaaatcccgagcactcgagcttgcttctatttcaggtatctatctgatcgtaattaactctttagcaaaaaaataggtaattcactaaaggacccttgcattatgttttgcagatcctttgaaagagatgatgataggcgaaagtggattcagaaacgcattgtacatgatcgatatcggacagaatgatattgcggattcattctccaaaggcctttcttactcccgggtcgtcaagcttattccaaacgttatttccgagatcaaaagtgccataaaggtaagaactagagtttgtgggtttattctgaataaaacatgctagagtgtgctaaacaataagtcttgatattgggagagagttgaaatcttttgttaaatttgttttgcagatattgtatgatgaaggagggaggaaattttgggttcacaacacaggaccattaggttgtctgcctcagaaactttcaatggttcatagcaaaggttttgataagcatggttgtctagcaacttataacgcagctgcaaaactgtttaacgaaggactggatcatatgtgtcgggatctgaggacggaactgaaagaggccaacattgtctatgtcgacatttatgccatcaagtacgatctcatcgcaaactccaacaattatggtaagctttgatgcatataagtaaacaccattagtgtctgtttatcggttaagatcttatgtcatcataaatccttcatgtatgtgtaacttcgttaagcatttttgtgtcatgcatcaaacatgattaggtattttaatccggtctatctgatctgaatcaaaccttaaccatacttaggaacctgaaaaaccaaatctatgttttgtttccatggttaattatgatcatctactcaattgttttgtgcaggctttgagaaacccttaatggcatgttgcggatacggagggcctccttacaactacaatgtgaacataacgtgtgggaatggtggctctaaaagttgcgacgaagggtctcggtttataagctgggacggaatacactacaccgagactgctaacgccattgtagccatgaaagtattgtcgatgcaacattctacgccaccaactccgttccatttcttctgcggcggctgacattctacacattgcttccgttccaagtaagaaattttatttttgtttcggatttggttttagcctctgtaattgtgcaaattagacttcaccaatataaaaaccggtcacaattgattttcttaatggtcttgagtagacataacaattgaagcgaaaagagattgaacaagactcttgtcttattgatctgtggtatcgagaaaagggtaatcagtgtaaccagcaacaggatcagaactgtagaaacttggtctgtcttacttattcagcggagcattgagctcaaaccttttaggcaaatcaggattagctaagaacaatcttccgtacgctacaagatctgttcttccctctgccaccgccttgtttccgtcttctcttgtataacctccggcgacaatgaacgttccattaaacgcatttctcatcggcgtaagtgattccctgcactcgaaaatctcactgacggttttcatcctaggctcaatcatgtggcagtagagtatctcgaatctgttgagagacttggccatgtaaagccctaatctttttggatctgtatctccggattccatgtaatcagcgaacggtgagagtctgattccgacacgatcaggtccgatctctttcgaaaccgcttcgattacttgtaaagcgaatctacatcgattctctagagatccgccgtaactatcggttcgatcgttaacagagtctttcataaactggtcaatcaagtacccgtgagctccatggatctctactccatcaaaacctagaaaaagataataaaaaaattaggttggaatctttttttctagggtttggttggaaagtgaaagtttggatttttttaccagcttcggttgcgtttcttgcagcgagacgaaaatcattgataattgtcgggatttcgtcagttcttaaccttctcggaggtgtaaactcattcgatggatcatcggcgaatggcttatctgttgaagagaccggagattctccatttggctgacaatctacaaatatttacacaaagaaccatgtttagcaattttcaaatcttaaaagagtaaacttgtaaaacagtttctttgataaaccttgatgagaaacgcgaccagcgtgccagagctggcagaagaagatgccgccgtgagagtgaacagcgtcaacgatgggcttccatgcttcgatttgttctttcctccatatccctggcatgttttgatacctttaagagattaaaaaagtcaatgaaaatcataaaaagtcaactttctgtgaattggttttagaaaagacttacgccatggcggtttcagaaactccggtggcttcactgatgagaagacctcccggagttgttctttgacaataatacaaggcgacgtgaggttgtggaatgttaccgtatgatctcattctcgccattggcgccataacgattctggaatttatattcagattgagattttgataagacagagatagtaatgtaattaccactgagttgtttgtgtgtgtgtgtgtaaatgatatctaagagaacctgtgagtaagattgaagtttttcattgagaatggagtgagaaggggaattgtcgagctttatctttaagaacttcatattagtgttgccttggtgatttttcagagtattttggagttttattaccagaatccgtgaaacagaggaagtttaaagagacacaaatatgttaggtgttaaaaagtcaagagtacacaaatatgtatacgtaataacaaattaacttctaattgtttttaattttatacgtaactaatttgattcgttaggtcgaatatctgtatagaaaactacaattgggctatagaaatgtatttctagaccgtaaatcgttccttgtcctacaagatttgttttttactttttagttaaatctctttttgataaaggtttcctctttaggtttttgtttttgttgtaactcttgttctgcaagttaaaggttcatcactcagagctaggtagtactctgagtatgaagtcacagatactcctacgtcgaacgtatagcacaaccatccctcctcccacagcaaatgttagaatcactcatctctctcgtatcggcaagattcatgaagctcggaagcttttcgattcatgtgactcgaaatcaatctcttcctggaactctatggttgctgggtactttgcgaatctaatgccccgagatgcacggaaactgttcgatgaaatgcctgacagaaacatcatctcttggaatggtttggtgtccgggtatatgaagaacggggagattgacgaagctaggaaagtgtttgatttaatgcctgagaggaatgttgtctcatggacggcgttggtgaaagggtatgtgcacaatggtaaggttgatgtggcagagtcgttgttttggaaaatgcctgagaagaataaggtttcttggactgtgatgcttattgggtttttgcaagatgggcgaatcgatgatgcgtgtaagctgtatgaaatgataccggataaagataatattgcaaggactagtatgattcatggattgtgcaaagaaggaagagtggatgaggcaagagagatttttgatgagatgtcagagagaagtgtgattacttggactacaatggtcacaggatatgggcagaacaatcgtgtggatgatgctaggaagatttttgatgtgatgccagagaaaactgaagtttcatggacttccatgcttatgggctatgtacagaatgggcgaattgaggatgctgaagaactttttgaagttatgccagtgaagccagttattgcgtgtaatgctatgatttccgggcttggacagaaaggagagatagcaaaagcaagaagggtttttgattcaatgaaggagagaaatgatgcatcttggcaaacggtgatcaaaattcacgaaagaaacggttttgaattggaggctcttgatttatttattctgatgcagaaacagggagttagacccacttttccaacattgataagcattctttcggtctgcgccagcttagcaagcctccaccatggtaaacaggtccatgctcagttggttagatgtcaatttgatgttgatgtgtatgttgcgtctgttttaatgacaatgtacattaaatgcggcgagcttgtgaagtctaaactaatatttgacaggtttccttcaaaggacattatcatgtggaattcaatcatatctggttatgcctcacacggtcttggagaggaagcattaaaggttttctgtgagatgcctttgtctggtagtactaagcctaacgaagtcaccttcgttgcaactctctcagcatgtagttacgctgggatggttgaggaagggcttaagatctatgaatctatggaatcagtttttggggttaagccaatcaccgcgcattatgcttgcatggtagatatgcttgggcgtgcaggacggtttaatgaggcaatggaaatgattgatagtatgactgtcgaaccagatgctgcagtttggggttctctattaggagcgtgcagaactcactcgcagctggatgtggcagaattttgtgcgaagaaactcatagagattgaaccggagaattctgggacttacatcttgctctccaacatgtatgcatctcaaggtaggtgggctgacgttgcagaactgagaaaacttatgaagactaggttggtaagaaaatcaccaggttgtagctggactgaagtcgagaacaaggtgcatgcattcactcgtgggggtattaatagccatcccgagcaggaatctattttgaagatactggatgaattggatgggttattgagagaagccgggtataatcctgattgcagctatgcattgcacgatgtagacgaggaagagaaagtcaatagcctgaaatatcatagcgagagactagcggtagcttatgctcttttaaagctatctgaaggaatacccatccgagtcatgaagaaccttagagtttgtagtgattgccacacagcaataaaaataatctctaaggtgaaagagagggagatcattctaagagatgcaaacagattccatcacttcagaaacggagagtgttcctgtaaagattactggtgagattcaataaatgccaagcagaatgtttttttttaatcttaggcttagctatcaatcctcgttggagcgttggcaaaatggagtaattctcgcaaaccataggaacttgctcagccattgatgagagttctctctaagttcttctgctaatatatatatatttttttactgatcttgttatcaatgtgcatttgtagcattttcttcaatatggttaataagaagtgatgaacaatcttcaagcaaaactagaattccatgacacatttgtttttggtacgtagttactaacattctttgttgcttatacagaaactgaagagctctttgtctcttgtatgtatgtatgctacagagaaagattcaagtctaaacaaacgttagtctcagatccttcttgcttttccttagagccatcatactcgttggatgctgaagagctctcattagctgctttttcaatgttgttggcctctgctttattcatgaaaatgaaatcttctggctgaaacgaagggaatctacgaacccttgctctttcttcttcttcctgtctcttcttctccatggagctgttgacatatttccgcatttcccttgcgtttttaagcactgtgtacaacttctccatcttttcttcttcgtcatcttccttctccattttcaccctctttctgtctctgtccattgaaccgctctctcttccttcccctatgaaaatgtttctctttagttacatcattttcatcctactttgatcatcaacacatgatacatctggaagaattttctggaggaattggtggagaagatataattattgcctctagtgggaagactaacaacatgaccttatctaaaagtctctcagactttcttctttcctttgggtggctttggagacttttcaacactattatggaccccaccatgatggacattcatatagcaacatgacatacatgtgtacatatgtacagtctacagggaatggcacagcttcaagctaaacaaacacacttcacaataaccattcagaatcactctcatttgtttgttgctgcatctatgtttcttcttcagtcatctgcccatgggacaccgtgcttggcccaaagatagtatgccgcaactggtcctcgtccaccaaattcatacaactccggagctgtgtgatgcttgtctatctcttctagaaccggactaagaatgttccatgctgctgcaacctcatcgcttctcatgaacagatgattgtctccgtcaattacatcatgaattaggtgttcatatgagtctggtacttcggttttatacctacaggtttgatccaacaattcaaccaaccataaggcgcaaaagttcgatttttaaaatgtgtaggaacaaagatgagaatgcaaaacttgcctgtctttatagagcaagttaagttcagaagcgtctagctgaagacctaaaccaggaaccttgttgttgattttcaccaggatggcctcatcaggttcgtcacgtagaataagctcatttgtccccaaatctatgtttattccaatattttctcggtataggtttccaggaacatgccggaattgcacatgaatctccactctttcaacattaaggcacaccaatcaattgttatgacagttggatatgtctatgagtaggaataattattcttacctgtgtttaatgaggccagtgccaactcttacaaggaaaggtacaccatcccaacgtgcattatcaatatacaaggctgctgcacaatatgtagggtctacaccgttcaagatcacaccgttcttgtctcgggaactggatttatactggccaaggatgacatcacgcgggtctatcttgcgaattgatcttaaaaccttcacctgcagaagcaggtttgtcaccaagtcacttgacagaacaagagtacacaacttacatatataccataagacgattttgttctttacagtacaggttgaccttttcatttcggatatcttcaccatcgagacttatcggaggttccatggcaagtaatgcgattgtctgaagtatatggctgtgcactatgtcccgtattattccatatccatcagaaaaccttaaaaaaagcagtaggaaattagaaaataacattactgatttgtctaagaatgctgaaacaacacaatttactctcacatgcaaagaaatggtgaaaatagaactattgtgccttacttttctgtttgcgcaattgattctgatataataacctggaaacatcatttatacacaaagtgaacaaaccagaatgtggaagaggaaagttcaggcactatacacaactacaaacaatcagaaggaaacactacctgtatattgcgtatgtatgttctgttccatagtggttcaaaaactagatttgaaaaccttaacactgtcagattttcaatgaggtttcttcctaacatgtgatctatcctgtaacgggcacagaagtgtgaagaaatatgaacttgagagctgtgcatgcagaaagcaactagatttaaaagaaggacctgtagatttgcttctcttcaaacttagagagaagtgactttgttaactgatgagacgaatgtgagttaaaaccaaaaggtttctcaactattattcgagtccagcctcgtggtgcctgagcgttatctccaatggtgcatgccacatccaccagagcttcttgaggtactgagaggtaaaagattctatttgcttctgattctccctgaagaagaaaagctgttaatgtcttattctatcttgcttgtctgttcaaaatgttgtaaactcagaaagaggactacttctgggacaaaatgtaatcattgaaagaaagaaaaaaaggtacttaggaacctcaatctgtttcattctctcggcaagtcgggacatcccatccctgttattataacctccattgatatagtatgttctactctgaaatgcatccatcttgcccccacaattctccctgaacatttagcatcattctttagctagcacggccgtatatcagagataccaaatttaaggtagtaccaagaattatacatactgatgatcaacacggcaagtcagcgttgatgcaatgatggatctgaggtcttcatctgtcagattctttcttgaaaccccaaatatagcaacatcctgtgacaatgaagaccaatcaagaagacaaccgaaaaaaactatccaactgttttgctgcttactttgtaattgttcatgagcacaaaagtcatacctcaggaaggtagccgctataatacaacgcaaacaatgccgggaaaatcttccctcttgctagctcaccagtggctcctacaacagcaatgcaaagtgaggcccttcttcgaacatctgaaagatcatccgagagttgttttgacacaggtggtaagtctccaacattgtgaaacccatcattcaaatccgttcccagaatattctcttctggtcgtaaatcttcagctctagtttcttcagcaaaacctgcatcacattctacctcaggaagtgctaaagaatgatcaagtgaagacatgagatgtaaattgactcatatcttagaactagacctcgttcatcatcgctgaggaaagtgtgctttgagtgtgttgtaagctcgtttacaggctgatgttttctgttgttgccttgtctacgattcaagctcttaagtatccacagtttcaaaccacagaatctccggcagagattcgagcctcctccgttgagaacaaggcttccacttctggagaaactatagtctcttgacgaaacctattcacacaaaatagagaaatttcaacaactagaaatcaagttgatttcgaaggtcaataatatactaaagcttagattcagagggcatgtaacacgaatttgagatctttggtgagattgcagaaaacattagcataatccaagaaaaataataatctttgtttctcaaagtaatgaccttttgataaaacgaaagcatgcatgaaaggtagagcgaatacatgtgcttaccggaaaattagaaaaagaggcggcgagatggcaagagcagacggaggaagacggagccgtcgctgattgagaaaagggaagcaagcaactggagagagacatgaggatagttcctcagggattatagctaaacatgttcaaagctttaaagctgctttaagtggatcaaagtggaagacgagtgcaagtttaagttttctgattgacgcctccattaatggttccaactttcagataatcgtcgggttcttctaaaccgaaccgtaccggttggttctcgaggaaagagaattgaatttgtggtttaggcgggggtgggtaggttgactttcgatatctcaacgtcaacgtctcttctggtcccgccgagtcggcgtcatcgttgagttggtgagatcatcttcttctcaacttcatcgatcttatcgtctcgaaaattgtcaccttttcttctcagctacttcaggcggagaaacactttccgtggtttagtgttgaggacgatcactgtttgtaattcgatggcgaggaagaagatcagagaatatgactccaagagacttctcaaggagcatttgaagcgtcttgctaatattgacctgcagattcgctctgctcaggtcattctcacgaattctagttttgttttcatcgatctgctttgtggaaattcgatagcacaattcaattggaactcttgaatgaatcgtgttttgtctgaatgttattgagagtaatcttggacttagatagagctaatgaaagtgagaatcttgggaaagatctctttctactgatgactttggacatggcatgattagttgattactagaactactgatgatgggtgattcgtttattgttgtatacttttaggtgacagaatctacggatttcactgagttaaccaaccaggagtcatggctatcgtccacaaagctagttgtgaaaccggatatgctatttgggaaacgcgggaaaagtggtttggtagctctaaagctggatcttgctgaagttgcagactttgtcaaagcccgcctcggcactgaggtgactcatcgcagccagagttatagatcagctggtaaattttgttgtggtattgatgtttgtttatgagtcgcaggtcgagatggagggatgtaaagcacctatcactacattcattgtggagccttttgtgcctcatgatcaagaatactacctctctatagtatctgatagacttggatgcactataagcttctctgaatgtggtggcattgaaatagaagagaattgggacaaagtactacctttttttttttttttgtgcttcttttcttgttttgttgcattatctttttcgactcacttctgttgttttctcctggggaacttggttttctggtatcaacaggtgaagactatatttcttcctgcggaaaagtcgatgacgctagaagtatgtgctccattaatagcaactcttcctcttgaggtaagtttctgttcccctgtgattaacttcctagtaagccagcggcaccctgcaactatttgctttagataaccctagaaatctggttttgatgtgcgtacattttcggtctttgtatggtgttctactttcaatcctatgcaaattcaaagatctgttagtctgaacttaggctgctcagtacttgcattcttttttaaggagattaataatttaggttgttttgaactatgctatgcctgctctaacaaatgcttctatctatttcaggttcgagctaaaatcggcaacttcataatgggtgcctttgctgtatttcaaggtatgagtatattagattaggccacttcttgactttgctctgattcgagatctctcaaggacatcttcttattatctacttgtgtgtttctttaaagatttggatttcagttttatggagatgaatccttttacactagtcgatggagaaccattccctctggatatgagaggagaattagatgacactgctgccttcaagaatttcaacaagtatgtctaacatttctaagttcccggtgagagacccgcaatcaatttttccggtggaaactcattggattgataagttttattaatacaggtggggagacattgaatttcctctgccatttggaagggtcctcagttctacagagaacttcatccatggtttagatgagaaggtttaagcatccagcttttctaaaaacaccacttttgtgactcagacaggaaagacttgaaagtaatgttactgaccattcatgtctgtgtgtgtgtgtgtgtttgttacttattgcagacaagtgcttctttgaagttcactgttttgaatcctaaaggccgcatttggacgatggtagctggaggtggtgctagcgtcatatatgctgatacagtgagttgcaacccctgaacttaaggcatgctaattttcatggttgaatcaactcaaatatagattatagattatgatttttaaaaaatctcatatccttaccatttcaaaagactggaaaaaaaattccttcaaatgatgactccaaagaatttctcacattaatttgtttttgttgtccttatctgcttttgttaaggttggggatttaggttatgcatcagagcttggaaactacgcagagtatagtggagcacctaatgaggaagaggtgttacaatatgcaagagttgtcattgatgtgagtcatggcaaagaacttggccttttccttaattgtttctatctataaaattttagagattcacagaccaaacgttcgggctttctcagtgtgccactactgatcctgacgggcgtaaacgagctcttctaattggaggaggcattgccaatttcactgatgtggcagctactttcaacggtatcattcgagcgctaagagaaaaggtgctctttctcacaaactttagtgaacgaacaaacagttgctactgtattttgatgaagatgagaggaatgctcaagaatgaaatcgatgctgacctttttttgtgtgccatgagcaggaaacaagattgaaagcatcaagaatgcacatttacgtaaggagaggtggaccaaattaccagactggtttggctagaatgcgagctttaggagaggaacttggtgtccctctagaggtaaccgaattacttatggttttactcacaatctaaacctaggagaaatggtgaaaactcattctgtcgaaaaatttctcagaaaagaacatgtgtggttagttcgaatactgaactttacaaggattgatgattgcaggtatatggtccagaggcaacaatgacgggaatatgcaaacgagccattgactgcatcatgttgcctgatgcataacctacccaaaccttttatctcttcttcagtttgaaagcagaacaaaagctttggagctggacgaatgagtgagtgtaaaatgagtcatgtccttcatctctctctttccacataagaaaatgaaaatctctttaaaactttttttccactgggtgtgaatttgaaaactgtatcattgtgtgtaagcgtaattgtaatcagacggtcaaaatccttattttgaaatgtacaataagacttcaaaagttaatgttgcttttgatttttgtgtgtggtaaagccacactcgctctacacaccaatctattatactaatgtaaaggtttgaagacaaatccaattccatatacaaacatgtctatgtatacaatatatgtcatattgtatacctctctatcagctcttcattcaaatgcaaaacaggaaaaaaaatgaaagaaaaagacttccaaaaacaagaacaagaaaatgcagaagaagcaacatcttttaaagaacagagaataatctctgtttctgttggtgatctgactattacagtctcttgctctgtgatcttgaaaccggtctgcttctatcggtatccgagttttcctcttgcgttctgcgcactctccgctcctgtaagttgaattcttgcttatgtttatacagtttctgcatacttttctgtttcatataaaatggttataaagcaacactaacctctcttggtacaggatattcctcagactccagcatacgcacaacttgactcattttaggtctcttttcagaatcaggatcaatgcatctaagtgctgtaagaagtactcgtttcagtgctctagtcgctggcctaactgctatgtttggatcaatgacttcttctaatctcttagatcctaccatcatcttcaaccactcaaccaaattcacctgcaaaataatgttgatgaggctcaaaactcatcatatttatcaaatccattcatctctccatgttctatctacctcattagcaggccgcgcgtaatccacaggatctcttccggttattgcttctaagaccaagacaccaaagctgtacacatcactcttttcattcaaaagtccggtattcgcatactcaggagcaacatacctgcaatactcaaaacaaaaaccacggctcagtaactcattccggtgttttctttttgtcttaaaccaaagttgcttaattacccaaatgttcccatgactctagtagtcacatggcttttcccatctccaagtaacttggcaaggccaaaatcagaaatctttgcattgaatctatcatcgatcaagatgttgctcgacttgatgtctctatgcaccacttttggttcgattgcctcgtgtagatatgcaagactgcacatgaaaacaaaacttacattcagcagaacatatgtgaaacaccaaaaagaaatgtaaatgttttgctcaattacgccttggatgttccagtgagaactttcattcgagcttcccaagttagatatccatgatgtttcattgctccgtgaagccattcttcaaggttcccattgttcatatactcataaaccaatatcctaatagcaacaaactcacataagttggcttcttttttctctctatataagacaaaagattcaatatatttatacctgtttgtgccttcaatgcagtatcctagaagacgtaccaagttcttgtgacgcacatgacctatagcatctacctctactctaaactctttctctgcttgtcccctacaaaatcaaacttcaagaataatcaactaaagaaaacaaatcaataagagagagtacatttctctgagaccataactcacaagtggtttaggatctttttcacggcaacaagactcccattgaccaactcgcctcggtaaacaactccatagcctccttcaccaatcacattttcctttgagaatctgtttgttgctatctcaagatctctcagagtaaaccaatgaccccatccaaggtgtgactcaggtaaaccagaaagaggtgatggtgatggtgtagccatctcatacaatgatgaagtagaccggtttgcaacacataaataaccttctttgcctgaaccagaccggctactactcaaaccattctctctgttcttctccatttccaaattaagcaagaatttgtcagattcattgttgttttcatcctgaggatcgaagttactactcgttgagacaacatgctcgatcctgacttccttgatctcctttgacaccacaggggtttgtatgatgggaagacttaaggttttggatcttcttgatttctttttccaaatgagacaaaatgaaagaacagagagtacgacaatgatgatcagtgcaatggtgataaagatggcttgccagatcttaagtccagccattgttctccttcctaatctgctagactcaaaatcatcaaactaagagattaaagttgattcaatcagaaaagagaaagaatagagaagtaaatgttgaaagaactagctacatgaaaaatgctgtgggagagagactccaagttgatatagtggtcccgaattatagaaaaaggaccactaagtagctaaaaacccaagaaagcaagaagataacaaaatgcagcaatcattaacatcttcattatctatttggaagatgcataggacaaatcaatgatgatagaaatacagagaacaagtagacgacaatttaatgattattacctctatgaatgaaggttgacaagagaaacacttcaaagatgttttagatggaactgaggaaacagagtgttttgttttttgacgaatgatgaacttttttgtgaaaagaacaagaaatcacgaaaaatttcaaaatcaaataaaagaaaaagagaaaacttaaaaacttaggcagtgaaatctggtggaagagaaaacttaagagaaggaagaagaaatggagttatcaagtggtaggtgatgaaatcttaatttttttttctttctattaattgttctttaatataggtggtgtgacagagagagcttgcattgcaaattacatttcattacaaaacataaaaacatcctctacatttccgtgaagagtatgatgttttaactacccaaagtaactgtccgatcttttatattacacggctatgaagaaacctttaaataagaaagtattgttgatggcattgcgttaaaacattaaaaggactagtaattatcaaattaataatatttatgttagagaaatgttcaaatgaatcatggagtagtgggggctggctgacctcaaaatttgaaaattgtttttcttacatttcaaattacaattaaggtaatttaattcctttttcatttgttgttttggaatgttgacgtaacatttttttggctttagctaaatccgcacaatcacatgatcacatcgacgttctaaatttttgttcggtatgtataaatatataattagcataatatacatatacatacataattagtatgttgtgttgtgataacttgaatacagcacactaataatgtgttaatcttatacaatcgcagagtagtacatctttacgtaacagacgttaatctacaagcagatcaacaaactggatccaaaatatatgtgtgtgtgcgtcaacaattgtgttaagctttttttctttcattatatatacaatatccgaaaatagagagaagttatagtcttctagaatagcttttgacttgtgaagtaattaacattttacatgttgttgcttaatctttgttcatcatcgttcctctccttgaaagagaaactccaacaaattgaaaagccttgcacatcgcttgcgataaaaccaatattaataatcgtttggttcggttagagaaacccggtttaagaacagacaagtcttgggcttgaaattagattcggagcccaattttgattttggattttaaattttagacccacgaaatttctcccgccttcccggtccacaacttcgattcaaatcgacttttctctttctctctctctctcggtgactgttgcagtactgatttgtgttccctctaacctaaaatggggcagagaggtgaatcaattgagttccgaagtttaaatcgttattgggtttgcttttaaatttcgatttctgtgtgtaaaggtttgtgcgtttgtggcagttgatctatggtctgaggtcattaaatctgaggaagaagacggagatatacctaagattgaagccgtttttcagagaagaaagaagcctgataaatcctcagaagctgtcaatttgtaatttttctgcttcttataccccaaaatttgaaatgtgtgtgtggttatttggctttgtatctgataagtttctttggctgtgtatctgagaaatagtggctggttggtgaaaggggctcgtactagttcggtcaatggacccaagagagatagctgggctcgttccctttccaccaggtgtacattctgagcttaaccctaatttgttctccttggtttttggcttgttgctgcaagagattcatgttccatttctcgtctatccaattcttttcttaagttatgaaattactgcacatcacttgtttgttgaaatgtcaaggaaaggccaccacttatttgagtagattgatgcaataactgtagtttgcttctggtgcttattgacagagggagagagagtattgcagtgcgcgcttatgtcaacaatcagcctcagaagaaggcagccgggagaaaaaagccccctattccaaaggtaggcttagttgcatctatcttgctctgtgacttatgtggttttgataccaagttctctgaacaaacaatgtcctgcctttgggttttcaatgtcccctagaagattgtcaacatatatgttcttctttcttgagactctaattttctcttgtgagatgatataaaagtagtatcttttcaaactctcagggaaaagttgttaaagctccagacttccagaaagagaaggagtactttcgtgatattgatgcttttgagcttctagaagagagtccttctcccaataaatctagtacatggaccatgggtgaacaagttgttcctgagatgccacatctgtccacaagattagaaaaatggctaatttcgaagaagttaaatcatacttgtggtccttcgagcacactctctaagatacttgaaaactcagccatacaccaggagtcagtatgtgataatgatgcctttgattcattgtctctaaaaaccccagacaagtcttctgctggcaacacttcagttttccggctcatcccgagctgcgatgagaacttggctgccgaagatgtgcctgttagaaaaatcaagatggaatcaatcgaccttgaagatgagctgaagcgactgtctttgacatctgatctaatccccactcatcaagattttgatcagccaattcttgatctattgtccgcctgtggacagatgcgaccatcaaacttcattgaagcattctctaaattctggtatggacttacagatgatcttttatgtcctagccttgggtgtttgtctagtgctttggatgttatcttaggaatgttgtgcattttgttgacacttgtaacgatgaaatgcgatgtagtgttcttatctcattaagtttaacttgatccaattgtaacgattactcaaatattgcagtgaacctgaaagcattgtcaagattggtgaaggtacatatggggaggcttttcgggctggttctagtgtctgtaaaatagttccaattgatggagacttcagggttaatggggaagtacagaaggtatatttttcttaactcacttctattgttctccatgatggtttgagactacaacttctagttggtgaaatgatcatgttagcatggaagcaaatattggagagagccagcaagctcaagttaggttaaattctaattagagaaaaacacagtgtttatagtttagataagcttatcatctctaaaaacttgcattgcttagggaaaggcatgcattttctcacaccagatgctatctgaatgaattatggtcaatgttatggaatacttacagcttatcaaagaaaatatgataaatgacaacttagtgtatgttcatttttgcagagagctgacgaactacttgaggaagtgatactctcatggactcttaatcaactaagagaatgtgagactacagctcagaatttgtgcccgacgtacataaaaactcaagagtacgtcttctcaggaacgagaatatgctggaaatggctattggttctgtgttataaatcttcttccaaacttatgtgcatcatcgttcacaaaccttttctcataatgttgttgcagtataaaattatgtcaaggtccctatgaccctatactgataaaagcatgggaagaatgggatgcaaaacatgggtctgagaatgatcacccagattttccggagaaacaagtcagattcttttcactccattagattttaaggtctgtttatataggatgctaaatgatttgtagaagcaatattcattttctgtgtggtgtttgcttccagtgttatgtcatgtttgttctggaacatggtggcaaagaccttgaaagctttgttcttttgaactttgatgaagcaaggagcttactggttcaggtaagttgtagagtatagattctatttgctgttacagaaattatgtaaaaatgatattttttcttccggttaatggcatgtgtttcacatctaaggccaccgctggcctggctgttgctgaagctgcttttgagttcgagcacagggacctgcactggtaattttagtgtttgatttggtaagtttactacttattagttttctctcgcttgaacttcttattttcatttctcttttcaggggaaacattcttctcagtcgtaataactcggatactctgccttttattcttgagggaaaacaagtttgcatcaaaactttcggagtacagatatccataatcgactttactctttcaagaatcaatacaggtgggtttctgattctcaatactgcgacataatgtaaaccataaggtccaatctaacacttaaacagttaaactaccaataatcatggtgctaatgtgctcaggtgaaaagatactctttctggaccttacttctgatccataccttttcaaaggaccaaaaggagataaacaagtaaggaaaattaattaagttccttattatcccaagagttaagagaaatgtacatttattttaagttttaataacgttattatgcagtcggaaacttaccgaaaaatgaaggcggttactgaagattactgggaaggaaggtaagcgtaacttttccaagccttccttttagttttcatgccgctaatttggaaatttctgcagactagactagaatattaagccacaacattatctttctttctagaaagcatgagactgtgatatgagcattagtacgcaaccaaactgaagtgtgcctaaatgatttgatgattaatttaattgccatgttttgttttgttctttctaacaacagctttgctcgaacaaatgttctctggctaatttatctcgtggatatcttacttaccaagaagtcatttgtaagtttgcaagacacagataattattagttgcatcaactaagaacagcttattgatactcctttcgttcgtgtgtatatgttttaggaacggtcttcaaaacacgaaagagaactacgatcactaaagaagcgaatggagaagtatgaatcagctaaagaggctgtgtcagatcctttcttctcagatatgttgatggaccaaatatcatgaagaatataataaaccccgtaagtgattaaccagaagctctctctcttgtatatttgtttgcctagccacttaaatcaacagtactagctcttgcttcgtaatattatctaaggctccgttatctatataccaatcttgattttcatctcttcaaatgaatccaagaactgatatgttagtcttttcttgtatgtgacaatagtttaatggtagcttttatctatagaaatacttttgaaaccatgaattcttttaagaagaaagtatcaagatctaccaattccacatgggttgtccctacttgcatgaatagatcttcttatctcaagaacaaaagttgtcacatttttattcttgtaatgagggaagaacaatattcaaacgcgtagatgataaaaatgagagatttgctttaaaattaggccaataaactaatccatttaaacagctaacaaaagctttatgttgtctgcttttttgttttttcaaaatctttccgctttgttgatttctttaaatctttgtgggttttgctgagctaagcaaaagatcatccattgtattaattaatctcatgatcttaatctgcagcaccagtgtctcttctttccttttctcctttttggataagagaaataaaaataccaatttgcagcttctttcttgaaaactttggagagctttatgcatatgcttatgtctgaaacggatctgacaaaaatgggtttttctctttcttgttttttttctggctagcataaggtaaaagcttatatctttgcacacaaaaatataaagaacagatgagattagtcagaggccaaatccaaaagacttcatagcaaagtaaacatcttttgcctactttcttctttttttctcacttagtcacttgcatgtagagtacagtcagcatcttctctctttttctcccccaattctctcaagagaatctctaagcttttgttcttcttacaaatcatgtacttataataaacccaagaaagaagaagaagaaaaacaaaaccaatcccaagctgtgatggcgaaacagagttacttcttcgtcttcaccttcttgtttctttctcttctctcatactgttcttcaacaactacacatcatgatgtgttaaacccaccaacggtctttcctacaaaccccacaactacaccgacggctacatttcctccggtgaccataacgccaacaaatccagccacaacagttcctattgttcctccagtcacaactattccacctcctacactcacaccacctccagtcataacaattcctcctcctacactcacaccacctgtgacaaacccagtaaccaacccagtgactcagtatcctccaacacaaccctcagggacggtcccagtacctgttcctgtggttgcaccgcctgttgtctcaaactctccatcggtttcaggccaaagctggtgtgtggccaagcctggagcctctcaagtctcactccaacaggctcttgactatgcctgcgggatcgcggattgctctcaactacagcaaggcggcaattgttattctcctatcagtcttcagagtcatgcctcatttgccttcaacagctattaccagaagaatccttctccacaaagctgtgattttggcggtgcagcctcattagttaacaccaacccaagtgagtgagaaaaaacagaagatactctgtttctctttttctttcttgttttcagttagatggctttgattgactttggtttggattgttgttccaaaacaggcactggttcttgtatataccagacaggttcatcgacatcaacaccaatgacagcaggaacaacaacaccaactccatcaacacaaacagtgaaccagcctcctgtcacatcaacacctataataccaacaggaggcgggataatcgggtaataagagcattcttttcaactcttttgtgtagtcttaaagcctcattagagtttcttaactaaaaatgtacctctctgtatttatattcaagggttggaactccgccagcgatttttaaccccgcaaatcctacatcaaatacgctaaacaatccatcctcaggaggtttagcgggtggttacggttttgatggttcgccaaatgagaacaatccaacatcatcagactctacacacttgaagattcactttggtcatgctatggtggcaacattgattcttcacgcagtgctatttcattagaagtagaagaatatgtaggagtcaaaatagctttatgacacacaagttaaagctcttttagagtatcttcctaggaagaagctaggaatgtaagacattataaatttctttggttcgacggtattgctaaggcttcggatttgtacagaaaacctctggttgatttgttttaaatatatctctttaggaccaaaagcggaaactcagacattgtaacaaagaggtgtatcttaatccttcatacactggagggtactgtctaactattttaatatgatctaaaatgatttcatcgctaattcaacgcctagaaaacgcaactaatatcagcattgacatggagacaacaatcttgaaacctgatttgtcccacaagttttggttgctagaatgatcagcttcatgctgtttttttgcagccaattgctccttgagttcttgtattgccacatcgtttcgctctcccatctaccatcccgcagaaaagcagctcgattggtattggattcaagattattatcccaagtaaaagaaagtgagtgtaccttttgaagttttcgagtttggatgcgtgtttctcgtaggcaaaattctaacttcagcaccttcttcttcagctcctgatcaattctcctttgattctccacctgatccagaagaacaaaggctttactacataaaaccaaaaataaatcacagaactaagagatgctaaagcatgacgtgttgttacctgatcttctaattccttggtcttaaacctccagtgagccgatataatcttcagttcatctctcagtcttgcaatttcatcatctttagccgtcaaaagtttgttgattctttcagaattctttggagtatcttcatttagcatgttccgcacctcagagttctccttggtcttgaccactgatacagcccgcataatgtcaccttcaactttcaaaagctcatctcttagctgcttctgtgaagattctctaactcgcagctcctttcttagattctctagctgctcaccaagtctagttacttggtcctcatgctctttcaaagaaccggtcctctcatgcaattgtttcgaaagcactctacaatgagaatgtgctgattcagctgacaaagcacttgcctctgcagttgcatgtgttgctgctagctgtgatttgatatcagccaattccttcacaaactgcacaataggagaacagaaaagttgataagttacgtcggtaaaggacgtgagatctcctgagttttggcagatttaagaccaaagtcaggttcaaaagacaatggaggaccagcaaagtttgaagaggcagacataagaattaagaaggctgatgagaaacaatcaatgaagttgatgctctaacagatctatgtgttcaagcagaatcaagcaaaactagagaaactggacaatcaagaaatgtgaaagaaaacaatcctaaccttctcagtagcaacatccgaagcacgaatctgctcaactttctcgtttagttccttggcaagttcatgcatttcatcttccattctcttaactcttgtttctgcctcctgctcatattgaaaacagctcaacaaaagtctcaacatccaaaccaaaagactaaatcacaaaaaaaagtaatagctgataaattcagaactttgctaacctgcctggacatagcttcttttgaacacgaccgctcctgttccgcaagacgagtcctcgcttctttcaactcagtggccaaagacaccacatttctcctgaaactctgcttcttctcactcaaatccttcaacaaaggatcatcctctcttagactaacagaagttggcattttctgaaactggaatatcaccgctctgttctttaatctagacagataacttctccagaaaaccccaaaattcaaaaacgtaaaaggaagcagctattcatgttcttcacgtgaccctgtacataaacgaatgaaacacataaatgtccaatctcagtatagttaaagaatgtgaaatcattcaaatatgtccacaagaattaaatcctctaaatcttgtttgtaacaatcaatttcttataaataacagccattatcgaggtagggaatacgcaaaagagacaaagaaacttgtgtcgtccctttcacatcaataaataaactctgataaagacgaatactttacaagtatacagccaaaaaaacgtgacctttttaaaaattcaaaatctcttacaggatttttttaattttcaaaccctaaaaatccaaactttctcgcgacccaccagtctccatcgaacggttggaaatattaggtttctgggtttggtaggaagaagaatcaatttgcagatttgttcgagttcgtgatttctccagaggaggaaagtgacagtgaaaatgaaacctggaggatggggtccctatccgttaggttcggatgagagatcatttaaggaaagtgactaaaatatttagcttcggagttaccgagcctagggcttcgaattttgtgtcatttaaagtaacgaatccgtagctaacctacgcatctggcgcagttagctaacttgctaggtttgactgtagcgcggcaaaatctattcgttcaaagttcaaactatagaaagccacgtgtgcatagtgtaaacgtagtcggaccacttttgcagccatatcaaaccgttggagatccgatcgaatacaactacgaaagatattaaaaagcttttgcatgagtaatgtcccgatttgtgtcgtgttgataagtaagttatctttttcccttcatcctttcctcatactcatattgaatctataaacagaacaactttttttaattattgatggacttttattttaggaatgaagagagttagatgatgcatgaaatggcatacaaagtgtgtgtggagaaagtgaagagtttgggaattgagttcactactcctatagaagaaaccctcagagacactattgttagccttatggaggattgtcttcttatatgatcctcatcatatataggcatatagcttcattttctggttgtttctattttttaactataattttgtatggaggatgtctaggctttacaatatgtataattaaaaatatttataaattttaaataatatctataaactcagaaaaggagaaatattctgaacaatgaattacggcaacgtgatttgttgaaaaacttaacatgtggatgttttttttttctttttgcttatgcatataacatgtaggccttatttcttgtttacaaatatcttctaaaactgaagggccagttttaaacaaggcccatattctaattgagccgccctaatttaccaaaccatttactaattgaacactcccatgcgtttgaagagttgattcttcatttaagacaattattttcagataaagagaggtcaaaggagattatgaacggcggaggaaagttggtctgcgtcaccggagcttccggttacatagcgtcttggattgtcaagcttttgctcctccgtggctacaccgtcaaggccactgttcgagatctaagtttgttcccatattactcttttcttttatctaaatacatcattcttttgcaaagtatagaaagactgccattattagggatcattaagagtagacaactaaaccaaatcggaatctagcttaaaattctgacggaaccaaaccaattatgtctttactttagtctttaaacaacacaatacatatcaaattaaaccatgaaatccaaattgatttttttttcttaaacaacaaaactgaaatttatttgattagcaattttgttgtttagctgttgtgttttgaagttggccaaaaaaaaaaaaaaaaaagctgttgtgttttgaacagatgaaatttgctggaaagggagataatatgtatggatacagtatgtttgagttatattatatatatatatatatatatatatatatattaaaacataaaaaaacaaatgtacttttagtgttttcatataatacctttttaatagtattaccaaatatggaaagttgagagacatcattccggtccgtaccaagtaggactgtaggagagtacaagtaattaaagacgtaaatcactcatcgaacctaggtaaagtaagtaagtcaccttgaaggcttgaagtgtgttttgacgtatatgttatatttttctttagcggacaggaagaaaacagaacatcttcttgcacttgatggtgcaaaagaaagactcaaattgttcaaagcagatcttttggaagaatcttctttcgaacaagctattgaaggatgtgacgctgtcttccacaccgcatctccagttttcttcaccgtcaaagatcctcaggtttttcaacaacttcaaatttgttgtggtgaatccaatgcatgttaattttaactactcactctgtttcgaattcatccaagttttagttttttcacacatgttaaagagatttctaaagtgacaattataaccttatgtttattaaatgtttcttaagttttctttaaataataaatatcataggggcaaaattgagaagaaaaaagaacaataactacacctaaaaatttgaaaacaccttaattgaaacatttttttaaaaaaatcttttgctttcgacgccgtaaagaaacttatcaaaatgtgtgtgttttttttttttaataattatcagactgagctgattgatccagccttaaagggtactatgaacgtccttaatacatgcaaagaaactccctctgtcagaagggtcattctgacatcatccacggctgcggttctctttcgtcagccacctgtggaggcaagcgatgtggtggacgagactttcttctccgatccaagtctatgcagggagacaaaggttcttaagttttgttgtgatttgtgaacatatcaatttcgagattttggaatctttcttacacttttctttttcttctttagaattggtatccactctccaaaattttggcagagaatgcagcgtgggaatttgccaaagacaacggaatcgacatggtcgtgttgaatccaggatttatattcggaccactcttgcaaccaactctgaacttttcggtagagctaattgtggatttcataaatggtaagaatcctttcaatagtagattctacaggttcgtggacgtaagagatgttgccttagctcatatcaaagctctggagactccttcagccaatggcagatacatcattgatggtccaattatgagtgtaagtgacattatagatattctgcgggagctacttccagacttgtgtattgctgatacgtgagttctctttcccgctacctttacttatgaagtccataaatttaatgaaagattttgaaaaacttacgttcgattttaatttttgtaggaatgaagaaagtgtgatgaatgaaatgttatgcaaagtgtgtgtggagaaagtgaagaatttgggagttgagttcactccaatgaaatcgagccttagagacactattgttagcctcaaggagaaatgtcttttatgattctgttcttatatttataactactgtgtattttatatttttgttagtataactaattcaagtggtttaagctgttaaggctctttaagatctaagcattttataaataatgatagataattattgtttaggctaaatttgtcactaattaagatttggattcatgatttatcgataaaaatacatcgtgtaaactaagcttaaatcactaaacgtttacttgtaacgctaggtgatgtcaccaagtcaattggtacaaggaaaaaacgagtggtcatatgacattatgaccataagaattcaaactcccgtaatccaatggttatggattcaatgatcaagacttgaaccacgtaatccacccttatccttatagaagctcataaataccactaaagggacagacgacgcttaaccagtagttgtccaataatttacgctcataaatacccttatttttataccttagatttctctaataataactcagacattgtaacaaagaggtgtataatcttaatccttcatacactggagggtactgtctaactattttaaaatgatctaaaatgatttcatcgctaattcaacgcctagaaaaggcaactaatatcagcatcgacatggagacaataatcttgaaacctgatttgtcccacaagttttggttgctagaaagatcagcttcatgctgtttttttgcagccaattgctcgttgagtacttcttgtattgccatatcgtttcgctctcccatctagcatcgcacagaaagaacagctcaaattggtactgtattcataaaattactatccctagtaaaagcaagtgagtttaccttttgaagttttcgagtttggatgcgtgtttcgcgtaggcaaaattctaacttcagcaccttcttcttcagctcctgatcaattctcctttgattctccacctgatccagaagaacaaaggctttactacataaaaccaaaaataaatcacagaaataagagatgctaaagcatgtgttgttacctgatcttctaattcctttgtcttaaacgtccaatgagccgacataatcttcagttcatctctgagagtctgagtcttgcaatatcatcatctttagccgtcaaaagttatttagcttcggagttaccgagcctagggcttcgaattttgtatcatctaaagtaacgaatccttcgctaacctacgcatctggcgcagtaagctaacttgctaggtttgactgtagcgcggcaaaatctattcgttcaaagtgtagaaagccacgtgtgcatagtgtttatcgttagtggtcgcacactaataatcttcttgtcataaaataatgttgttgttcgttttattgccgcagacgctgccgctgccgcaaccgcaggtttatttgttcgttttgacgccgctacgataattttcatgtaattcttttatttacttttctagttatattctgaatataaaaaaatgtaatttaaatatatttacatccataaaaaatatttgtttagcatgtaatagtttttagctttttttggtaaggagtaataattttaaatattagttttctgaaaaatgcagaaacgattttaaatacaaatggaacaggtaaaggattgggataaaccatctttcctaacaaaatctgaactcgtacaatatagaattcagtcttgtttgatacaaaaaaatcataaaaagaacaaagcaagtgcaaaaattcttagaagagaatgaaaaaaatggaaacaactcaatagccacctttgagatcgttgacaacattgggaatgggagtgacagtctccaaggtcataccttcaaccatgaaacaaggtttaggacctttaggttgtctcttagtgctaatagtctcacatctagctttagcagcagtcttaaacacatcgttttgcttcttcctgagactaaactcatcatcacaccttgactgttgcagccttaagcacatcgttctgcttcttcctgagattaaactcctcatcacaccttgactgttgcacatgctccacacgtacatgtatcctcttccttataattctgtgcttaatctaaaactcaacccaaaactcaaaattagctctccaagagattcaactaaatgataaacatcaaagtcaaaatgaaaacatcactaagaatcatagtagattgattgcaaattatacaagtagcaaaagaaggacccaagaagaaaagcttgaagctttcaaaccaatactaatcacacatcacaaaattcaaaacagatagctcacacaagacaattaaaccccaaatcaaagaatcaaaataacgttcaaatcctaatttcaacaatcaaaactcttccaaacagatgagaattttgagtaatcgaaacctgtttgttgacttcaacaccaacggcacgcttagtgagattccagatacgaccaatacgactatggtagaacttatgaggaatacccttgtgaatagctccattaaccttgacatcgacgtaatcgccgaccttgaaggttatgaggtaagtggagagtggaatataacccttcttcctgaatggtctcgcgaacagatctcttgttcttcagggtcaaccagagaacttctaaaacaaaacccattacttcgaaatcgccgagtttaattcgaaatcgctgagctttactttttcagatcgaaatcgtgtaaaagagaagaaaagtttcagatcgtgaatgtgttaggttttagagttaggttttatcgtgggtttctaaatatgttaagggtatttctgtcatttggcatattaatcgcagttttttaattttaacgctgaatttaatcagcgtttaatttttttcgccgcataacattgcgtcggccgcagcgttttgccgcagctatctgcggtagtgaaatgaacagtttcatctgcgtctaccgcagctgcaactacctgcggcgacgaaacgaacagactaaatataaataaacataaaaattaaaagcacaaatgaattttagtatgtgtaattatgtatagtagtaattactcatcaatcatcttaaaaacctttttttctggtgatttctagttttaaagtttttacctatgattttgtcttgaggatgtctaggctttacaatatattgaaatatttatacatttaaaataaaatctataaaactgaaagaaaataattaatattctgaacttcattttttgcattttgtgtataaattaaaaaaaaaaaaaattactgctacgtgatttgttgaaaaaattaacacgtggggtgttttatttttgattacatgaacttgtgaaccttgtttctgcttacaaaaactgaagagcccatttcaaacaaggcccatattctgattgagcggccctattttaccaaaccacctactaatgaacactctcaagtcacctcattcgagttggaagttccctttaaaacaattattttcagacacagagagactcagacaggagatatgaactgcggaggaaaggtggtctgcgttaccggagcttccggctacatagcgtcttggattgtcaagcttttgctcctccgtggctacaccgtcaatgccactgttcgagatccaagtttgttcccaactctctctctcttctttattttaaaaaacaaacgactgcaattattagggacgattatgagtagcacaaatagaatcaaaatcggaatctggctgaaaaatctgacggaatcaaaccaattatgtctttacttaaattacatacataacatccaaatcgttcttttttttttttttgagacaaccaaattgaaatttgggactttgattagctgttgtgttttgaatgatgacttattaattagacaatatttttccgacctttataattaaattaccaaatacggaaagttcagagaactcattcaggttcgtaccaagttttgacttttgagggtacaagtaaaatcattcttttgaactttgaactttgaagtgcatgttgacgttatactcttcttcagaggacaagaagaaaacagaacatcttcttgcactagacggtgcaaaagaaagactcaaattgttcaaagcagatcttttggaagaatcttcttttgatcaagctatcgatggttgtgatgctgtcttccacactgcttctccagttctattcactgtcacagatcctcaggtttgtcagggaattattttaactattaatttgcaaagtcatatgagttaaaatcaaaatttgtgtttcttttcctattagactgagctgattgatccagccttaaagggtactattaacgtccttaatacatgcaaacaagtttcttctgtcaagagggtcattctgacatcttccacggctgcggttctctctcgtcagcctcctattgggccaaacgacctggtggacgagactttcttctccgatccaagtctatgcagggagacaaaggtcctttgattttgttgtggacttatcagtttcaagagttcggattctttcttacacttttcttattttcttcttcagaattggtattcactctccaagattttggccgagaatgcagcgtggcaatttgccaaagacaatggaatcgacatggttgtgttgaatcctggatttatttgcggaccactcttgcaaccaactcttaacatgtcggtagagctaattgtggatttcataaatggtaagaaccctttcaataaaagatactacaggttctcggacgtaagagatgtcgccttggttcatatcaaagcgttggagactccttcagccaatggcagatacatcatcgatggtccaaatatgagtgtaaacgacattatagacattcttcggaagctgttcccagatttgtctattgctgatacgtgagatctctttccctagctctacctttgcttatcatcttatgaagtttataaatttaatgaaagattttgaaaaacttacttgttgatgattttgttaggaatgaagaaagtgagatgaatgagatgatatgccaagtgtgtgtggagaaagtgaaaaatttgggagtagagttcactcctatgaaatcaagccttagagacactattgttagcctcaaggagaaatgtcttttatgattctgttcgtatatttgtaactattatgtgtatttttattttgttagtattactaattcaagtggtttaagttgttgagactctttaaaatctaagcattttataaacaataatatataattattgtttaggctaaatttgtcactaattaaggtttggatacatagtgtctaaactaagctaataatatcacttaacgtttacttgtaacgctaggtgatgatgtcgtcaagtcaattggtacaaggaataaacgagtggtcatatgacattatgaccatatgaattcaaactccagtaatccaatggtaattggattcaatgatcaagacttgaaccacgtaatccacccttatccttagaagctcataaatatcactaaagggacaggcaacacttaaccagtagttgtccaataatttagttttccaaaatgaaaaattattgttgtcatctattttaggtgttttagttcaatgtggattcctcgtcctaacaaatacttgacgaatatatctagactataaaattggttatgagttctacttttttttgtttgtgaaattatcaaaatttgttatatttatttatttattctcattaatttgagtactaatttttaaattatttatactaaaaacaattactaagatacaaaaatggataagagcatggtgtatagatatttaatgggatagaatatttcccataattgtatgtgtgtgagaggttttgttttcgtaaggaaagaaacaaaaaccatttgaccaaagaaaagcaaaagaaggcaaggaatcaaacaacaaatgttgcaaggcagaaataatggacgttatgttaatgtagtgtcgtcacacgtgacttaaaagagacgagtctgcgtgtcaaactaaaaatgtatgcaactataaaaatgggatttgattatctttttagtaccgaagcctaccaaccacatgcacactaattctactcgccaaataaagtgaaaagagatggctgatggaggaaaggtggtctgcgtaaccggagcttccggttacatagcgtcttggatcgtcaagcttttgctcttccgtggctacaccatcaatgccaccgttcgagacccaagtttgaattccttcttctctctttcttttttcctcctgatttctccttagtaatatcgaagacaatccctctttgtcactcacttgaataatcaaagttatctagatgctttttagagatacaagtgacaattcagagaaaattaagaatattagctaagcaaatccaactatccaagagaaagtattttgtaggtacttggtacgattaagagttggttctatggccaaaaaagtatgtttttggtttcattctctaaaaggaagtatacattaacaaacgaaaattcaaatgaactcacatgtagtggatatagatggggtgaaactttggtcgatgtttagagccaaaaactaaataagcatttatgttatcttgaagtgcactttgacatatatgtgtttttctccagaagatcgaaagaaaacagatcaccttctagcacttgacggcgcaaaagaaagactcaaattattcaaagcagatcttctagatgaaggttcttttgagctcgcaattgatggatgcgagactgtcttccacactgcttcaccggttgcaatcactgtcaagactgatcctcaggttcctcaatgatataaatttgttcggaacaacacaatcggtagtaatttactatgaaaatccacatctaaatataatagtttttgtactctggaatttgcaggttgagctgatcaatccagccgtcaatggtactattaacgtcctaagaacttgcactaaagtgtcttctgtcaagagggtcatcttaacatcgtccatggccgcagttcttgcgcctgagaccaagttgggaccaaacgatgtagtagacgaaaccttcttcactaatccaagttttgctgaggagagaaaggtctttgaattgtgttttgacatatcaatgagttcatgataactcacattttttctcacccattttattttttcctttccagcaatggtatgtactttctaagactttggccgaagatgcagcatggcgatttgccaaggacaatgagatcgacttgatcgtactgaatccgggacttgtgactggaccaatcttgcagccaactcttaatttctcggtagctgtgattgtggaacttatgaaaggcaagaatccttttaatactacacatcataggttcgtggacgtgagagatgttgctctagctcatgtaaaggcactcgagactccttcagccaatggcagatatatcattgatggtccggttgtgacaataaaagacattgaaaacgttttgcgcgaattctttcctgatttgtgtattgctgataggtgagagagttttctttttctttgatcatttatttataagtctttatcatgttttgactctacaaacctaacaaagaatttctcttgatctattattaggaatgaagacattactgagctgaattcagtgactttcaatgtgtgtctggataaagtgaaaagtttgggaataattgagttcactcctacagaaacaagccttagagacactgttcttagtctcaaggagaaatgtcttgtgtgatcttctttattgtttttggttacttgttattccttgcaggtctatatacatttcacaaattataattaagtcttacatgttatttaaaaccaatataaatcttatgtttatgtccctaggccctaattaactaaactaacatatatcgttacgttgtagttagtaatatcgattggtgtagttcaatacaaatttgttaggaaaaaacgacccttgaattggataattaagtataatcgtctaactattcattatgaagaaaaagaaattgaaaaaattaactcattgatattttatttattccattacttgttgtaaagcagttactagtgagttttgtaatttgtaaagaagtgaaagtgagaaaaggaaattcttgcaaatgagtatacttctctctataatttgttttaaaagtaccaaatttcaatctttgataaaaaaaagtaccaaatagttgtaaaatattgattcatacatttattttattaaatataaaaataaatcattagatagtaatttagttacataaaataaatcattaagtaattttaaattcttaatttataaatcattagttgttcttatatatggttttatctttagctaaaaagtaacagaatctcaaaattaattagatttatttataaccatataagattacaaaaagtgatatatatcaaagtatgagatgccaaatgaagtaataaatcttatatagagtaatgagacaattaacttgagataatgacgttgaacagatgtaaatatacgtgattttttcttttaattgtgtcatcgtagtttagtcacgtggacctaaaaagggcaagtgtgcgtatataagatgagagtagttgctgctcaaattcataactgaaacttaaaccaaccccaccaattagagaaagatggctgacggaggaaaaatggtttgcgtcactggagcgtccggttacgttgcgtcttggattgttaagcttttgctcctccgtggctacactgttagggccaccgttcgagacccaagtttgttccttcttctttcctttctatctttttttttctagactttataatcggtaactactaactagaaactctttttaactattctgtatacatttgtgttgttgttgtataggtgatgaaaagaaaacagaacatcttcttgcactagacggtgcaaaagaaaaactcaaactgttcaaagcagatcttctggaagaaggttctttcgagcaagctattgaaggttgtgacgctgtcttccataccgcttctccagtttcactaactgtaactgatcctcaggtttgttcacgatttgtatcaccttgtttagaacaagacaatgcatggtgattgatgataataaagtactgattgaccatgccacttatatctgactttagatcaagaattctaacattaacttactagcttaagtgtttccgagggtttgcagattgagctgattgacccggcagtaaagggaacacttaacgtccttaaaacttgcgctaaagtttcatctgttaagagggtcatcgtaacatcgtccatggccgcagttctctttcgtgagcctaccttgggaccaaacgacttagtagacgagagttgcttctcggatccaaacttttgcactgagaaaaaggttctcgaattgtgttgtgcaatagcattgatctagttcattaaaagtcgcattctttcttaagttttttatttgacttctccagctttggtatgcgctctcaaagactttggccgaagatgaagcatggcgattcgcaaaggaaaaagggctcgacttggtcgtaataaatccaggacttgtgctcggaccgctcttgaaaccaagccttactttctcagtaaatgtgattgtggaacttattacaggtaaggacaatttcatcaacaaggattttaggctcgtcgatgtgagggatgttgccctcgctcatatcaaagcgttcgagactccttcagccaacggtagatatattattgagggtccggttgtgacgataaatgacattgagaagattttgcgtgaattctttcctgacttgaatctcggtaacaagtaagttcaacattccttcacatttgatttacaatcagatagactctgaaatacttcatacaaaataaaaacttttttgattttgctttttaaggggtgaagcaagtgagatcattccagtgatatacaagctatgtgttgagaaagtgaagagtttgggaattgagttcactcccacagaagcaacccttagagacactattcttagcctcaaagagaaatgtcttgtgtgatcatcctatcttgttattgctttcctgtcctttacaattgtactattgaactatgcatttcataaaataaaagtagtcttgctctttattttcaaaacgtagattttaattagttaaattgacagaggaaataacattttcaatctctattatgaacaagaatcacatcacaacttggacgatcaccggtaactaaaaccatcaccaggctatgttacacagtgtggcttttgtaaagacacagaaacatatgatttattttaaaaaaacacttcacagttccaaagattcctacacatagtaaacgatcgaaaaacatgaacaaaccaaaaaaggataacttacaatctacattgagatcgaatcagaatcagtttctttcatcagaagccgaaatgcttgaagttgtggtacctgaaactttaaacattgatttcacctagacgcatcagcttcttgcttaactttagccaattgtgttgccggattctgtttctctgtacctccattgttcttagtcgtagtcgtcgtaggagtagtagtagtatcagagctctctgtttctttcacagtagcaccatttgatgcaggactcagttttggtttctgatcaacgggagcttctttaagcttaggaacaaccgatcttgccttctccttggcatcaagcatgacaacctgctcaagagcctcgcgagctctcttcttcgccaaagcagcttcttttcctctccggtcagtttcacacttagcggtcataacagctttgttcattgaagaagcagcgatcttagcagcgcataagaaagcttcggagagtgctttatcgacgaagcgagagccgttttcgtcgacgatagggcggaagaaggagaaggaattagggtctcggcaaggaggacagagataagaaaggtgactttcatcgccggcacagtgaatgtgagtcaaggagtggcaccctttaatggaacaagagacgcggcgaaaagacggcggagatgaatcgtacaaggcgaagcaaccgggacaaaacgacgccggatggttgcggaggagacaatgagtgcagaagaagcggagagatgcacggagacgtactgtgtgtatcacccaggcgtctgagcttccgcaatcatcgcatctttcggtggaattcgccgctgcatcggaagtcgcggaggttgacgtcgccgtcgttgacgatggaagattcatagtgtctctctggtctttgcgattttgggaaattagggtttactcctcttttcaatcgaggaagagggttgacgtggcactaatcgatttgttaggctatgttggctttacttacttgggccaaatgattgtaactgttgagcccacttgaatatctagccacttgtttctgttaattctgactcggatgagaccaaagagacgaatgtggccagatattatagtgggctgatgagtaaggcccaataaaaatttaaggtttaacacctatctaccgttccataattcttctacaaaaggttgttgattgtattaaacagtgtcgcataaacttttaagagcaccgaaccgtattaaattcatcaaccagtttgtggtaaagatacaataatgtggatttggttttgtctctgattcaattttaaattgacaaaaatctgaattgggtttggtttatagttgagattgattagtttttttggactatccaaggaagtggggacgtgtttgattatgaggatagggacacggcaaagcgtgtcaacgtgtagaagttcattgtattttgcataatatacgtatatacattacatacataccgattcttgttcgatatattgtttctggtcaacattttgcaccaaattaaggaaaagacaaacaaaagcattttgcaccaaaaggaaacgcattattttcttctatattgttcatatagaatatgccagattgtaatagcatatgtcacatgtgtcacatctcttgtgccctcaaaaatcaccacgtgtatcgactcatcatctatcaccatcgtcgagaataatttacctgctgatcatgatcatcttctccaacaaatttgcttttgtgttgacgtaaagtgacgttttgataatatatatagcaaatgtatctgaccttttaaattgtggaagggccagttctaagaaaagaaagaaaaaaaatgagctagggttctctttcctaagttgttcatgataatgaggtaaaagattaatgccagtataaacttctggcacgtggtcggctagctaaagatcagatcttttatttttgtagagaatgtagagtaagtgatcaaaaacctgttgttggcctattccacggcggattgagagaattgtgcggggacagggtcttgtcattttatttgagttttggcctaacatatagcaactagatcataacccgtatatagcacggacattaatattttatataaattaaattgtatactttgttatgtttgctatgtttgttaaaattatttgttatatttgtcaaactttagtaaaatatatttaaattaaattaaatttattaaaacttaataaatttaaaagttttttttgtttggagacgcactatttacatacaaaatatccgtttctattttttgagtacttttagggcctgaaactttttatccaaactgacctaaacccaactggacgcgacccgaaccgaatatttagaattattctattaaatagtaaatcatatacccattaatcccaaacccgaacgggttctacatgaactcgaatgggttactcatatgtccagccctattctctgatttaattatctaaaaaatcccaataaacatatgttttggtgagtactttttattcaaaaaaatttacatcctcttctgccaaaatcatttcataagacatcccaaaatctttggaataatgattccatgaatgaagaatcctaatttgaatataccaagaggttttgaaaggttttaagtttttgataggtgtgtatgtgagaaggtacatccatcgtgatggtaatctgcttatttataattttaacttgcattatacagcagataggcttatattttagttaaactaaaaacttttattgtaaaattgattataaatatatgatattattttatttgattttaaatgtatagaaactacgagttgtatatgttttgttgatattatttatattgtttagtgtttaaaattatatacttgtattttgattgttaattttagagtttcacatgtagtataccatcttgtattaatattgatttaaacccgtcaattgtaggatttttcagcttgtattaaaaattgaatcacatcatacacattaaaaaatctaatatgttattaattattgtagtatataagattataaattttaaaataatatgtatgaaattgaatataaatattcaaattatgacacagtactcagtaattttttttcttaaatctacttttgacccgttatagtatttttttcatgtactgaacaatttatattcgtttttaaaaattcaaattgtggcatatgcgaaaaaactctaattatttttttataacgatgatattattttttcgcaaaaatagaatcatataaagatgagaggtgaattataataattaataaaaaattaatatgataatattgatatcaaatctaatttgttgattttaattggttacttttttggaaattaataatgtatttcgtttttgagttaaatttaattaattaaattagtatttgactttttaatttttaaagaaatgaattaatttactctttaaaattttatttctaatggcatacgtatgtaattacttacaaaaaataaggttacattttaaaaattaatatgataatttagatatcaaatctaatttgttgattttaattggttacttttctggaaattaataatgtatttcgtttttgagttaaatttaattaattaaattagtatttgactctttaatttttaaagaaatgaattaatttactctttaaaattttatttctaatggcatacctatataattacttacaaaaaagaagattatatttcaaatgtacttcccaaataatatagtaggatcacttccattccgagttttcttctttctttgatatatatatctacttatttatttactcggtttgattttataataaatttgtttataattattttctgaacaagagatggccataaaatacagtgatgaaatcaataatggtccatgcaaatgtactcaaattatccacttggaaagtttatagtatacaatgggttgttacgtattttagaatctaatttgcatggcgatttaattgacatttcatcatcaaccgagctataacgagagataaaccagaagatgcaacgttcgtgaacaaactcgactgatattctagatggttttatttattttttacttatagaaaggaacaaattagatttaaagataatatgctctaatctaagagtttggaaccactataccacatactatatcccatgattaaaaaaaatctcaattattatagcgcaaatgattggttttcatcagttaatagaacttgctgagtgagtccccaaatttgaggatgattagtaatttagtatcgtaaagactaaaaaagacttaagaaaaatagtaatgattagagaagtcaaacctttaataattaagatagataaagagagacaaggttgctcaaccccacttggagtgtgatgcttttttggcagtgttcctttatgataacacatctcttcacacacaactttagtgtatcacaggcccatgtcactttaagataagataacatattctagtatatgattattttcatatttgtaagtgtattaaattattcatagacacaccatgaattaattgtaataatgcgaaggacctgtatcatgtaacagagacagacgaagtgtgcagaggtcggtgagaagcaatttggtcaccatgctccaactctcttctctaggtcccttttgctttaattttctcgtttaataacaatatcttatgaaagcagttaccatatcaattgaaggattgtataataccgtaatttatttatatatagtacatctaattaaacattaattatttctactaatagcctaaaaccactactaatacaacaactagtacttgtttacgataattattaaacttgtctcgatacctacaacatgcccaaaaaagtaatcaatactttgtttaatcacaaagatctcagtgagatggttctatagatagtatttctgatttgttagtatattagagaattgaccatctattaaaataagagaatgaacactatttgataaaacaatacatacgcaattatcattgtctttaatttttatcaaagtaatcatacgatcgactatttgtatgcaaaaattcatcattttatttgcaaaaaaaaacaaacaaacatggtagaattgtatttggtgtgtgttttaacaaattgttgcaatgtttagtgcaacatatataatccactatatataatcattgacataattaatatttgattatatgaagcaatttctctttaattatgtgtttataaatatagggagaaaagaaaaatagagagaaaggtaaagagtagagctaatgattcgggcgacgctaaaaggttgaatgttcgagagaaacggagtctcagagactgtgaaaacaaaaaatcaaaatcctcagttacagacgatttggtcccctctcttctctctctgcgtccgtcttgtgcgtcgatttgtctccatctccttctctctccgcctactttctcaggactactccaattcgccgactttttctcctctgttctctgcatttggattgatgccactttaatactttgaggttctcactctctctttctctcttcgctgacttcgattgcttcagtaccctttttctcaggtcagctacgatgatagctttattcagacaagaagatcaaagttttgatctttttgttttggttttcttaagagatggttaattaggtcttgagtgcgctgttttgaatcgttcttcagtgtgattaaacaattggttttgatttgactaatcatgttgccattaaactaagtgaaaatctctgctttttttatattgcatattgatgattgagacattgatttcttttctatttctttatttcccagtttctaatttgggaactgaaaagttttctaatttaagcattacaaagtgtacaatttttgtttctggcaagtttttcttggcctaattcgtctattttatgaattcacctttttaggatcaagacttcgtaaaagattgtttctgtaaaacgcaacaccatgcctctgtttgagcttttcaggctcaccaaagctaagcttgaatctgctcaagacaggaacccttctccgtgagtcccattcacttgtctctctttaagtctgccttgtttcaagttcatcaaattcatgtgtttttttgttgtgtgtgaaaaataacagacctgtagatgaagttgtggagctggtgtgggaaaatggtcagatatcaactcaaagtcagtcaagtagatcgaggaacattcctccaccacaagcaaactcttctagagctagagagattggaaatggctcaaagacgactatggtggacgagatccctatgtcagtgccatcactaatgacgggtttgagtcaagacgatgactttgttccatggttgaatcatcatccctcccttgatggatattgctctgatttcttgcgtgatgtgtcgtctcctgttactgtcaacgagcaagagagtgatatggcggtaaaccaaactgctttcccgttgtttcagagaagaaaggatggcaatgaatcagctcctgctgcttcttcgtcgcagtataacggtttccaatcgcattctctgtatggaagtgatagagctagagatcttcctagccaacaaaccaatccggatcggtttactcagacgcaggaaccactaattactagtaacaagcctagtttggtcaacttttcacatttcttacgccctgcaacttttgcgaagactactaataataaccttcatgacactaaagaaaagagtcctcaaagcccgccaaatgtgtttcagaccagagttcttggagctaaagactctgaagataaggttcttaacgagtctgttgcttctgctacgcctaaagataaccaaaaggcttgcctaatatcagaggactcatgtagaaaagaccaagagagtgaaaaagcagttgtatgttcttctgttggctcgggtaatagtctcgatggcccatccgaaagtccttcactttctttaaagagaaagcattcgaatattcaagacattgactgtcatagtgaagtgagttaaactcatgtcattttatgcacattacaatttcgtttctttgttgttttcttcagtttttttattgaatattgttgagcaggatgtggaagaagaatcaggagatggaagaaaggaagcaggtccatctcgaacgggtttgggttcaaagagaagccgctctgcagaagtgcataatctgtctgaaagggtgagtgagtgaagcccctaaagggtttttgtccattctcaaactcacaaaagattgctatatttggtaacttactgtcctcaattttcagagacggcgtgataggatcaacgagaagatgcgtgccctgcaagaactcattccaaactgtaacaaggtcagcttcttctcctttacaaataccattcatgattcatttttgtttgaaagataaggagcaatgccaaataaactaaaacttgcatcttagaacgaattgctaaaggtttttgattggtttccgtatttattaaaccggaaaaacaattgaaaccatattgtaagcaagattgttcaagccgagaattttcgtatttaatcagcttttgtaacatttatatggtttaaaggtggacaaagcttcgatgctagatgaagccatcgagtatctcaagtcactccaacttcaagtgcaggtaacactctcattactctctagagtcgataaaaatcgtgcaaactaataatctaaacacaataatcgccaacagatcatgtcaatggcgtctggttactatctgccaccggcggttatgttcccaccgggtatggggcattacccggcagcagctgctgcaatggcaatgggtatgggaatgccttatgcaatgggcttgcctgatttgagccgtggtggttcatcggttaaccacggaccacagttccaagtctcggggatgcaacaacaaccagtggcgatgggtattccacgtgtctctggtggtggtatctttgccggttcttcgacgattggcaatggctcgactagagatttatctggttctaaagatcaaacaacgacgaataacaacagtaacttgaaaccaataaagagaaaacaggggtcttctgatcagttttgtggatcgtcgtgacataaatacaaacttatgaactgatgtattgtttatttgtagcattcaaacaaatctattttataatcctaaacaaaattaatttgtgttcgttataacagtgaagagctttgtgcttattggtgggttctgttctgtttcttgttttgaattaaaaaatgtttttaatattttcaaaggttttgttccctttttaatgtagcgtggggttcactatatagatggacctggttaaacaagcgtgatgggcttctcagcccattttgttaaataacttaattatgacattttctttcgatttccttttttttctttttttgggccaggactattgaactagtgaagctgaatatatacccacgcgaaaattgaaattattggaagtttttttttttttttttttttgttggaacctatagggtgtatataagttacatgatacacggtgtttgagcgcatcacttagcttgatatgtagtttatgttatacgtagtaagtgattcgctcacgcatgactgttacgttttctttaacaaaaagaaagggaatcgatggttagggttaggtcaacgatcggaggagttgagctagagcctagagaaccatagtttggaagagggcaaatgtgagctcctgatttgtttctcggatgctggaagctatatatatgtccatgattgtatcgattgggagttttgtcgaaagtaaaaaatttcttcctcaattctttaggaagtttgttactttgttttatgttcacaaaacgttgtcaacttctcgtagatgcttgtttctatagttagagatgttttatatacccagcctgccagccagcgagcagacttttattaatagtttcccctatatataggctatatagctttagcgtaaacttaagttctgtgtggtaaatcgcgtcttcacaaacatttttgcaccaaagacttcttaaaagtaatatatagaagagaaatttagatgattctgtcctcgtttaaattgatgagacttattaaacttaagtaatgcataataaataaaacattaaaacctttagtactgaaaaaggtagtctatatagtggaaagcagagaagaacaaaaaagggtttatacttccatttagattttgtatcttctaatggaggtggattagacagctctaactaattacgaaagacaacaagcagtagaaaatggacacgtcgaacacctagggagacaaattaatgaattacacgaggtttagatcgaaacttgaaatagaagaaaatggtgttaatgtggcaaagcaaaagaaaagttaaacatcattttgcttttggctacattaatatatcaagattacctatgattatgtctcttcttctctcctttcttaccagttagattgggccatattagagagaaattcaaccatacaagccctcttttctcacttttaatcaaatctgtaatattatttgccttcttttctaagtttgatatttttctcgaccacaaaatcacaaaacacaaatcaaatgatcagttttggaaaagcaaatgaggcaagcaattagtaaaaatagcataaccacttgggtgtttaatttttttccgtataatccaaaagtattttttcagtagaactacaacataaaataaaggacttaattaacaagtatataatcatcaaaatcgtattataaaaccatttattttatttgaaaaactaactcaatccacaataactcaactaattagaaaagcatcagccaaaaaaatgattaaaaaatataataaaaaaatgattatctttcaatttgggggcataatatatttatcagaaaacattgcttttttattaacgaaaggaatatttagaagaaactttaaaatatagaaaaagataacagaaaataatgaaaagggaccttagtacaaagtgcatgcatgtgctaatgtttccttgatgatgggattagtgctaaacgggccaattaagatggtatacaataatacaattaaggtcacttctcattgggccctctatctctttctccgtgacctcatcctcttaatctaaaatgactaaatgttctatactttttaataagtccctttctccttgtctaattaataaaattctttttaacacaaaaaaaagccgaaaaatcttccatcaacatcgttgtagagcgttattaaaaattgtacacttccacaaacttttattggatgcatattttcgttagtcaatataattggtggttatatcctttaatagcgtaatctagatttgggtctaaaccttttagttatagaaacctagcgtacagagtaaacaacaagatacattgatgaataatgtatgtaaactaagtcggagccaagataaaacaaaaatattagttttgttctccctcgttttttatgatatcgctatgtcaggatcacttatttttttcacgaatattgacatatatttctaaaattagttcgataaaagattattgggttcataaatgattaatggtaaatgtatcaatttttggctaccaaaaccttaaatactaagatgcttattggagttcgaactcacttccataattaggttaacatttttaagaatagcttgctcagagatagcatatgcattcagattgaaaaaaggatggaacaaaaatcatcgtaggtgacacaatcactaagttttcaagttcctatatatacctgacgactattttttataagcttgatcaagagaagccagaaaacaaaaaaagtaatgcgatgctgattacaagttgtaaaatgcacaaccccaagaattctaacagaaccacttattgtgatatatcttgcttttcgaatttttcagcagtttcattttggttgtcaggactcagatgtattataatatagtaacttacatcgaaaccaaattaaagcgccttcaaatcatatatatatttttcttgaattttgatttaaaaaaatgggaaccctaagagaacataatagggcctagatttaaggaaagctatatatgttaatactatgagagacgtgttcagtgtacagcctcttctccgtattttttgtcggcgaagatgttataatcctcgtgagttgtaacaatggcgaacgacaacgaccatatgatggaccctttctcacttctctacttagacagactttcaaattaccttagggcaaaaccaacggatattacagtgattatatatacttaattagctttaaaatggggtgcacacacaaaaaaagggtgaaaaatatatatatgaaaacgagtgataataaggattttgttgagagaacagctcatgtatatcctctattgttctgtatacattttggttttaatgttttttttttgaagggtttggttttaatggttacttcaataatattttccatacatagctacaatgtaaaccttctattgcactgcatgaagatcaacgtaaccatgcaatgatgcaaattataatcatttatcccccaccaaaactagggttcgtattttaaaaaacaaaacaaaacaaaacctagaaatatatgcattccgcagtggtatcattttttggtctttgtactattattgaaaaacattaacatacataattcaaaaacaaaaatttaatggtttaattctcaggtacaaaaatgatacttttcgtaaatggagtttggtaagggaagttaccataatattgtatgtttgttctcaaaaagtagcatcaaaactcttaatattataattaagttcaaaaatacaacaaaaaaaaaaaggtttagaaagagtttctaaagattctggaagaggtcaaaaaaaattaacataattttttgacaaatatctaataacccacaaattatgataacttggatatatatatatatctgaagagattattttgaggtttcgacaaggatattttttaaaactgaagagattaatctgagagcttaattgcaaataacaaatatagaagcatgctcctataaaatcaaaatcaacgcttaaattaaaaaaatctgaaatgagatatggtttgcatataatggaagggctggcggcggatatatgcatgattatcttaaaatcatgatgatgatgatcaatgatgggtctcaatcatgcatgatcctaatcgaatatgttccatttttgaggggatactaatagtttttagttgtacgtagttaacataaaatgtttttcttttccatgatatactccattaacgtgttgattggtattagtttattgagtatgattaaaaagaaactcagctgaattgcaaagtctttccatatattattcacgcttctcgtaattaatcatttggtgaattatataattcgaagtatcttttgacagctctagttcgagatattatacaataaaatcaactagctactctatttattttattgtgttcgataatgagacatttcatgtcggttttgtttaattttataagaagagacattattgagcgagttttctttttgggttcctgcatgaacaatggcaaattgtgggaactttacatatcgcttctctcagactctgagcacttctataaagctacactttctgaccaagacactagtctgactctttggttcggccatttccaaccagcaccagttgctggaccacttgcttctccatcttaatgaagccacaaatgaacacattctcctcaaagcttcctctcaaatttttgcaaaatatttgaaaaccattttcttgttttcctattaaaatttgtaatatatagtaaacttttaacagtaataaagaaaaaagattagtaagttctcttttttaattcatatacgtgtagtcttttttccacgatatttttaggattgggtcccaataaacaaatggataaacggtaagagtctaacgagaggccgtctctagataacgtaagaaagctacaaaaattcaacatgtgaatatttgagggaaagtttgagtggatggacaaagaatataccctctctattatgaatcattttaaggcaaaaaaagggagaaagatgacaaagagaagtgagtcaatttaatttaaaacgtataaagcaaacaaaagagacacttgattattctcattcatctgcaaaagtaaccatattttttaagcaaaatttctaaatttcgttatgtagccatttaattccatttaatcatttttggaaacattaaccaatgatgacaatttcttgctggttatgaacctttcccattatttcctttatttgatgcgttcatcttcacaaatatttagtcctcatttagcatttgcttttaattcattgcattaatctttcatgacgacaacacacaactcttctttgtcctcattcttatctacatatatcatctaaggtgttattttaattgttccattctcactacaaataatttttgcaaaaacgtttctaatgctctagtaaatatttggttttgatccgtgtacgatacacgtatgatgtaatcctatatctttatacgacggctcgctgatttttctgggttgaaagattttaaaattgatcttctaataaatcacaacaaatttatacattagacataaattgagaattactctttctcttgacaaaaaaaacattcaaaaagcttttgggaatcactttttcaataaatcacacatcccaatagcttcaaacagttgtagtaaaatgtacgtcaggttcacttggtgacatatataattaagagagaaaaaaaacacatgcacatcatcattagcaaagagatatccttgtcacagaccaaaatattttaaagagcacacattgctccaaactctcgtcgactttgatacattattaagaactcttaccaatttatatgtggaatccatctttccatcaattataatcttaataaactctacactcttctcgcagctgatttactaataaaaaataaaaataaaaaaaactttttgtttcgatgctttctctcactcggacaaatactaacgatcattttagaataagtcaaccatattgaaaacgactctcaactaattacgtaaacttatattttgaagtagtcattcttacattgttgtaaacacttttccataaatgcatgaagtttataattataaaatatttagacatattcctatcaattttttatagatcacgatttacatgaatctccgaaaagagaaacatcaaaagaatatggaaaaatttccgaaataaaaactctagaagaattgctgaggtcacgccggttttggctgtgtagagtgattcgtaacatcttttaggctgaacatgaatgagcatgtctccactacttagactcacataattttagctctataaaagaaataattttcggtgattgtttgaaattaatatatatcgatcatacttttgtcgtagcgtttgaacgtatgatcataatgggtccatttagagatgacgaatgtatgatgattagagtgatgtaaaaggtttaaaaaactactacatgaactccatttcttaaccttaactttcttaccattggtgcgagccgatccgacgtggaccaatcaaattgtttctacaaagctgaaaaaaatttacacacttttgcaacttttctctcaatccttttttaaaaagaagatttagaaaaggaaaatagtagtaaaagagagcataaaattcaacaaacccttctgaagaaagtgacttttcttagttctattaatactctctctctctgcagatctgttacttcattatctcttcctttttttcattagattccattaaccttcaaaagtttttctaatacattctctctgctcacaacttttttttctttcaatacttgtaaagaaaaaatagagctttcttcttcttctcttttactgttagctttgcacagcattgcagctgtgaataactaaatggggagacattcttgctgttacaaacaaaagctgaggaaagggctttggtctcctgaagaagacgagaagcttcttactcacatcaccaatcacggccatggctgctggagctctgtccctaaactcgctggtaacatttcttcctttattccaagaaacaaacgaagaagctactttttgtaataacaacagctgagtcttcttctacaggtttgcagagatgtgggaagagttgtcgactaagatggatcaattacttgagacctgatttaaagagaggagctttttctcctgaagaagagaatctcatcgtcgaacttcatgccgtccttggaaacaggtaataattagttatcaacaataatgctgtctaagaaaaaatatcatagaaaacagaggatcatgtttatgttttcagcttcattcctctgttttttgctctgctctgttttaacagaggatcaagtttatgtcttaagcctcctctgtttttggctttggtctgtttatactcagatggtcacagattgcgtcaaggcttccgggtagaaccgacaacgagatcaagaatctatggaactcaagcatcaagaagaaactgaaacaaagaggcattgacccaaacacacacaagcccatctctgaagttgagagttttagcgacaaagacaaaccaacaacaagcaacaacaaaagaagcggtaacgatcacaagtctcctagttcctcttctgcgactaaccaagacttcttcctcgaaaggccatctgatttatccgactacttcggatttcagaagcttaacttcaactccaatctaggactctctgttacaactgattcttcactctgctcgatgattccgccgcagtttagccccgggaacatggttggttctgtccttcagacaccagtatgcgtaaagccctcgattagtcttcctcccgacaacaacagttcgagtcctatctccggaggagatcatgtgaaattggctgcaccaaactgggaatttcagacaaacaacaataatacctcaaatttcttcgacaatggcggattctcatggtctatcccaaattcttctacttcttcttcacaagtcaaaccaaatcataacttcgaagaaataaaatggtcagagtatttgaacacaccgttcttcatagggagtactgtacagagtcaaacctctcaaccaatctacatcaaatcagaaacagattacttagccaatgtttcaaacatgacagatccttggagccaaaacgagaacttgggcacaactgaaactagtgacgtgttctccaaggatcttcagagaatggccgtctcttttggtcagtccctttagcttttttctttctttctttcttatttctaacagatgtagagaacataaagatatacaaatacatacaatgtcaatacgtacagtggatttaagtgttctgtatatttcatgggcgagctgtctttatttttatgtttatttttgaagcgtgttttatacgtcaaagattcttctttcttttgcaaaacctttcagtatcatactaaatacttttgtttttgttaagattttatgtatagtattcttgatgattcatcagagaggtctgtgtttgccattaatctgttgaagaacaatgatgaacgcaataaatctgtttctgtctgtttccgtgaacgaattgtgatccatagtcacatccttcaccatttttcagacctgtaattaattaaacgacaaaagaaaacatcaaattaaagcaaaaaataataataaactcaagtggggattagctcaactaattagaagggacacttttttttttcaaacagagccaaatttaaatttcattatttaagaaaatgatttacgtattctgaaatcatcaagtttttttttggctattgaataccctaaatttctggttatgataattttctatatatacaaactgtgtcatatgtttagtctttcttgtctgtctgtgcatttttaataagagtcttatcagagaattggaattgtccccattgaccagaaacttatgtttttttggccggcgtcggaatattcttttgcagtagaaaattcccaatagcttcaggatttgaccataataaacatcgacggaagtgatgggatggttttcaattttcttatccttaagttactttataacactattaaaaaaaaaatattccaatccaaaacaaaacactttttactttttagaaataacctaacgcaataactcgaccggtaagttaaagagtgttgtttgactttaaatgcaaagtcgatagcaaaaactagtttaatgtaatggagaaatatgtagaaatttttggcataactaataataaaaaagagaatcaatctgctcaaattaaaaattatctaggctaagggtagagattattttctgtgctaaacgtgtattatttaccgaccaaaagattaatcggtttgaagatttaaaaggtatcataaatatgcatttgcgttataacaaagtttagtgaaaggcgagagtgcatgtgaaacgaataattggtgctacaatattaaaccaatcattgtgttagctttgattaattggcgtatgttatgtaaggatgattaacagaaacacttgtcgcagtttgttagtaattaaaaaagaggaagatatattatgcttaaagaaatggggaaaaaaaatagagaatgtcgtggaatcttgcattttttttttttatctcttatgatttgttcatgaatcatgacttcatatctatctatatagttgacatctaaaatatacttttaaaagtcgcgttacaatgagaagtaaaacattttgaatgttccttgatagtgtgatgctttcgacaatagtatagcgcattcaagaactttttttcgagggctgggtttgtttatctttcgttcttaaacattgcttaccaccatggtgatgcatcagccaaagccgagaatttgagatttctaattttttaaaattgttttccaacatcaaacctaccaagttttgcaacaaacaaacaaaatgttgccttcctacggcgggtcatgactatctctctcatagcttctagatcggatattataacaataaaaccatgcaacttagtaagatctctaagtgagaaaaaaacttcggaggttttaatttaaacatctcttgtgcgtaacgaaatggagaaaaaacttcggacgctttatgtctatatgattgattgataaggacagtgatacaacacaactacatgtatatttcttctctgcctttgtattaaaacctagattttagttgatggaaatgaagtaaaacaaacatttcataatgacgattcttgttaatgtcacaaagataatcatagtctatgagctattctgttttgttctttcgaaataccaatctccaacagccacagcaatcccctgtttttgtttttccaacaacaaggcacaaacattaattctatttttaaccatgatcattaatcaatcgcaatagtatatttttctcaccttagctttgcccgctccagagtatccaggaaaccaagtatcttgtctctccgcttgacaatgagcccatcccgaggtaattaaaactccattcttgctaaacttcgaaaaggtcttcaacgcatctaacatgctcatcttgaaacctgaaactcaaagcaaggaaattaaacaatattgatcagcttattgggtatagaccggttatcttcggttatgagtaaaccatcctggtttacatttaacgttaagtatataagctaagatatgtggttattaaacacttgagctttgtaacaacatttagagagattaataaagtttgttataattccgtttatgaactccctcttctccgatctgattctccgtttattatggtatcggagccgtaacagttccgatcttccgcttccgtttctttgtaattagatgaaagagtggtaggtttcatgaaaacatcactgttaccttctaagaagtgcatctgagaggcagtgcacctaaagctaaaactgcagttatgccaactgccactcttatcagcagatggtggggctaaactatttccaatctgtaaagaaacaagatatatttcaagagaagcaaaccttgtgattcatcgtaaagaattgaaagatagagatggaataataaataacctgccacgaatcaaatcccgagttgagaataaacaacggggtcttgacttggttgattatgtattgagggaaaaaacactgagggatattgaaagcaagaaaagtaaatgaggaacattataactaacagaaacacaagaaaaaaaactcagaaataaataccaaaaatggtttgatatggcttgtacaagtgggaggaagtgtgttttgcaaaccctaaaagataaaagaacaattcttggttagccttcaacgatctgtatatatatcatcatcatcatgaagacatgataacgttatacctgagtgttcacaacaccagaatacatacgccttaaagaatgacctccagatacatcaacgcttcatttacaaaatagacaccaaccagtctcaacaatcttttagtttccatcatttattggttaaaaacaaaaaaatgtactcacgcgtcgaggaagaagccagcatcgctcatgcattttactgtggtggtaggaggaaacaagttattgaaatcatcgcatcgtaaaatggcagaaagacccccagaagaacatccgctgagcaaagccttaacgtaataatattattagttattacattaacaacttaaatttaacctgggaaccaagattcaaatgcaaagcaatattatatgaaatatatatatgtgtacctgttttgcctgacgcattcccttttccatcaaatcttccatgacagctaaaaatatacgctttcctctatactgaagttgtgccgcctaattgcataaacaacatatacatatgaatcccaagttaattactagtgaaatatataatgatcatcttcatggttttaattaactaaccttgttttcgctgtcaccatcaaaggatgcaccatcacaataccggacttttactttgttccaattgtaaaagtctgccaataatgatttgaaatcaaagaagaggagaatattccttaaccatttcaccaacacatcacatttctgttctcaataagggatcttgagaaaaacctggattttcagcggctttattgcttagtaatcctaaaaatgccaactctttctccattaaggtagatgatccataaccactccctttacggctctgacagttttgtatgctgtcacaccatgcacctccctttcaacaaaattaattacccttatttatatggttatggcgataattaagtatctctatagtttatatacaaagagcttgctatatcttaagtaagaacctgcaactgaatgatccagttgtttgctcctgaaccatacccgcgacacaaatgatatccaggcactgacccatccagacacactgccacaaaaatttaattatttctccatgcgtcatgaaaatgacaatcaaaaactttgtaataatgatgaaaaataatgacacggtacaaacgaaatttcgtaaaaaaaacttgaaaactaacgtttgaaacattggagatctaacatgcatatcagaaatctaaatctcaatcgaaatgaatggtaagaaaattgttacccgctcctttagcagcagcggcttggacgagcgtgagtcctaccatcaggacatttgcatttgttccattggactcgttgaaggttttcatttccccatgtgcaagaatgctgaagagaatgagtcctgcgagactactccaaccccaatacaaaagcgttttcatttctcctcttaatgaaatttgaatgaaatgattatggagacgtactagagttgtcagtatatacgcagccaagaaaataaagcatccgtcttggtcttttgtagtatgcatatgtttttcttatatagaaactcaattataattgaagaccagagagtgagagagagagaattgcattaaagaccagtcatagtcataagagagatttattaagatattttctttccttaattagaaaaagtacatacatcatggacatgattcatgatcttgccatttgtaaatcacaagatcgtactgaagaatgtgactgatagaccacaactttggggcctaaacctccattacgctccattgatcattaggttaagaaattaagattttcacgaaactgccaccttgtatctttcgttgtatattttcatgtatatatttaaggatgatttgacactcatgaagttgtcacttcatttcatcaataggttaggtttaaaactagttttagaacaagtcagttttgtgattgggcttttatttaagtggtgcaagattatattaatagggtttattaatttcaaattcacactattactcatataatagtcagaagtatagagttcattatataattccaattttcttttcaccaaaatctgcagaacagaaagtctcaggaatcttcaaacattttgaaaaaatggtcctgaaaagtggaaagaaatttcagattttgcttgcaagagttcaaaaagctactagacaaagatttcatacaaaaaagtgtggaaaggtcttcaataattgtgattaagctttcaattaccgtttaaagacttgtaaataaaatttaatcaatcttttcactaataaatttaaccaattctattttctctacatcatgcactagtaaaaaaaaatttgcctcgaaacaaaaaaaaacacacgatgccgtataggaaggaagcaataaagaattcaaaacgatttgttgttccgtcttcaatgcattacgcgtcgtattagatgaggcttttaacactaaaaagcccaaaccaacggtatcgggtattatcacctaaacccaacccattaaagacaacgcgtagcttcacgcgcttcacgattcgcgtgagaagaactaaccctgaaacgcggacgttgcagattaacggtgaggcatgaacgagcgtgttaatatataatgattcttctctcacgatgatcaaaatacagaagccaacaagtaaaattagtttatgcagataagacaacatttattacctgatacatactttattaggtgataataattgataattgttttttataagccactaataattaaataaaaataatatcagtaccgtgtaaaagcaaaactagtgtaaacataaattttcaattggcaaagctctgatccatccgttttagtaattcgttgacctttgacatttcacttagacagatgtgtgcaagaaagaaaaacagcatgttgcttgctttttccctcaacgagaaaagtcaccctctcttcaattcttcaattctcctccctttataaaccataattcattaattctcttctctctcaacaactacttgtttagagagagtcccaccaccaccactaccacaatcccaatggcttcaccaactcttactctcctcctcctcctcaccaccgtctccttcttcatctcctcctccgcagatcctgacatgcttcaagatctctgcgtcgctgatcttccctctggtacttgcaaaaacctttactttcatctcttttcctagaaaaagattcaatttctaatctctttcttgtttttcttttttgcaggaatcaaaatcaatggcttcccttgcaaagacgcagctacagtcacatcagccgatttcttctcacaaggattagctaaaccaggtcttaccaacaacacattcggtgccttagtcacaggagctaacgttatgacaatcccaggactcaacacacttggtgtctccctctctcgtatcgactacgcaccaggaggcttaaacccacctcacacccacccacgtgccactgaggtcgttttcgtcctcgaaggaacacttgacgttgggtttctcactactgccaataagctaatctctcaatctctcaagaaaggagatgtctttgctttccccaaaggacttgtccatttccagaagaacaatggtgatgtccctgcttctgttattgcagctttcaatagtcagcttcctggaactcaatctcttggtgctactttgtttggttctactcctcctgttcctgacaacatcttggctcaagcctttcagacttctccaggaactgttaaacacatcaaatccaagttccaacccaagaaatgatcatcacccttcctttatattcattactacagttctgtttttttctaaagggaagatctttttatcttctttgatttgtcttctgtaataaaaaaggaacaataactgatgatcttcagtgtgcatttgagctccatagtctcatgtattcgtcttcttgtataatccatattattttttgttcaaagttgactaaagacaggtaagaagtcgaggttgatctaatctaaaagctttcaaaacaggtaagctaatttatctgacttttcagataaaataatcaacttgagagactcttaacgtatgggtctaataaaactgattacttaattaacatgataacttattttttacttcacacaccatgtgcttcttctaacagaaaactaagtgtacttcatatggccagctaatagatctctgttaagttcgaagaactatgtttgcttcttcatggagttgagccaaagctaattgtttgaaaccaagacttcttgcaacatagtcacgaatcatgcattacctctaataccttaaaagaaggagattatatgaaactagatagaatatttgtttgagtttctgccattatgataaaccatggaccgtaaacattagctcatttctcctatattacttattttgaatgatacatcatgaaaccaaaacactcaggaggagattagatatgcatccatatttacagcttcagaaaagagttcaacagaagatgtaaatggatggatatttcatcgttactgaaatttgaaaacgaaaacaaaagcgataaggaaagttacaagcaaagaacaaccagtgactattttatatcaagccagaccccttttcttttggggactacttgtttgctgcagcgagttccgcagtgataatgaaacttgatttcccagcttgtctcaagtactgaacatctccattcatcagcttcaccagtttccggctaaccattaagctcaatccttcttctgacacatcttcctcagtcccaaacatttggtttagtaaaaactcaggtatcccagctccggtatgcgttaacctgttttcataatcccaatatcctcaatgcactgtttttaacatcatattatgcattctgattatgaatatatctattttacctgatctctagattagcaagatgcacagaacgcccgagctgatccttcctcagggaagctgaaacagttagctgacctccggatggtgtaaagtttacagccatcagcatgaaatctgccaagacttgttgaagcctaatactgtctccatacaaagtgtcagacattacttcttctccggtctcatttgttatccgaacactctttccgttactcttcatcattacttgacttgtggaagcagtcaacacttcatttaaggtgaattctttcatttccaaatccaagcatctgcacagtcaaattccaacataagaacacagataaaccatattttaaatggactttcattctagcatacccttcaatgatgctttcaagatccgaatcatcgaggatcttgcttagttgcttctgacataacgcgctagtttgcaaaatccgtctttgctctggtcctaattcagtaccctctatcattttccttgtaaacatgatcccagatagcggattcctgatctgtctttttatgtatgctagagcctttagtctcttcactgcggttcgctcagctaaacgttgaacatggagcgcttgctgcagctcatggctggcaagttgcaggaaacagaagacacctgtcactacaccttccctgtccagtttcttactcacacacaacagacactccacatacttgccacctcttgtaaagaaagcaaacgatactttctctggatcttgactggtcacagcattgttcagcacaatcccaaggtttacaaaggcttcttgattctttagacgacaacatgacttctgcgtcccaaatacttctcctaagagcattttgtcaatcacttcctctcgcttcaaaccggttaactttgacattgctggattccactctgtgcaccatccaaactcatcggtaccaaatattggcgggatcagcgggtttggattttggatgattgccttgtaatcaccttcaatccgcgtaaacttgtccatcacagtcttctggccagtaagatcatgggctacaaaacacaccccaaccacgttttcatggagatctctacttgcgcatgcatttacaactaaacttattggcccagcatcagccctggacagatgtgtcttgatctcaaactggacattctgctcctcagttcctgcatagataagcaagtgaagttatagactcggcttcagtgtttgataaaattggaaaacaaaattccatcattaagaaccaaaaacaacacattgcatcaagtttcttcgaccacgatactcaattggaacttgaatagtgaaatctagttggaagattcttagcaaactcagcataacttaggaagagagtttaccttctaatgcgttctctagcatccttttaacgatttccactgaagaatcttcaacaagtgtgaggaaatgcttcccgattgcttcatcaaccgaaagaccagtcagctcagcaattttcgtgttccaaccattaaccagtccatcagaatcaaccgccaatattggcaccgtagcagtctcaattaaacgaaccatctcactggtcacagcttctagttcttgtataccatcaattttgagatcatttagcttcgagtaaatgacctttgtattcacatcagtagtttcactatccttgaaagcattcctcaaaataagttgcaaggagtgtatggcatccatctcatagtccttccaaggtaaactccttgtcttgaccacttcaaggaaagccttgaacgatgaccttgggtgcattctccttgcatcatccctatcatctggatcatgcttcgcacctccccatctcacttcaccagcggtatgagaacggaaccagaaaatcatgtctttcgatgatatcctcacagctgccatcccacataccgaatccccgagagatagagccctaggaaacccggcgtcatgcaaactatcagtgctcaaacccgttgaatccatgtggtattcacacaaccatgaagctatctcctgcaggtggaactcacttggagttgttcccagtttccatatcttgtctttatacaagagagctgctccatcacatttcacaaggtccattatgttggggctttgcgacacaatacccagtggagcatcacgcatcagcatatcgcacaagagtgtctgcgtgcgcaaaatgttcttctccaccatctggttatcgagttccacctccttattgacgtgtatggcaaacacttgagctagaaactcacaggcatacctgagaggaaatggaacaaacctcggagtcgtattgtgacaaaccactaaaccccatagtctctttctcttttgaggctgtgtagtagcatcaggagcatccccttctccatcttcctcgttaactacaaccgccataaccagagatgcaattgaatccatgttggccatgtactgcaaatggcagctgtgcggtgctctaagggtggagccacacaaggtaaggtcaaaggaaagcttttcatcttgaagcaccctagcatgttttgcattgcaatcaactatcatccggaccttgttcttcataaacagaaaacgggctgcttgagggatgtcggtggcaggataatgcagcccaagataaggctccagcccaggttttgtaacctcggagacaacctcaccgtgatcatcttcatgaaacttataagccatcaccctgtcataccccgtgagttcaaaaacctcttgaaccattgtatcacaaagcctttccatactcccgctgggtaaagattgcagcctagtgattgctttggcagcgagcttgtatgattgtaaggcaccagcagctgtcatggggacttcataaggcttcacgggttcaaagtcgatgatgatgctccctgtaaccctgtggataatcgcataaaagggctttgcagaagtcctgcagtgcacaagaatgggattcaaaagagagacatctccaaatccaagggctttctgcaatgcagacgcactaggagcagtgaaaagactccttatatctgtcccaatgcctagaacagggtgttcgccaacactaggaactgcatgactggccattgtcaacagctcagatgcattctcgctgtatgcaataactttgaaggtcttctcatccaaggcaagtaaacaaccgaagggctgaatcagctttcccttctgtatatgatgaagataagtcgtggtaactttgtcagaccttggtggctgattctccacaaccgggccagtgacacgcactgaggttgagtaatcaaaggagctgcctgactcctcaaaatcagcatggagtttcgcatctacagtggtctgcgcaatgatcctagcgctgtgccttgatcgccttgagccctcagaggactgagtcggcctagagcctgacatttttttcctgacacagagacaagacaacaaaaaataagtgcaaaactctgataaaagagggaataaaacattcatgccataatcatatgaacacaaaaacattcatcaccagtcatacaagcgaatgcataagcataaacttgaaacactaagaaccaattcagaatttcaaacacacagtaaaaagagttatgaacttgactaactccatcgagaatacatagctaaacccagaaacaggacgcaacagatgcaggaatcatcgtgtcatattccaaggttcaatgatttatcattttcaaagtaactgaaccagtcagattccatgaacacttcctttctaagtcatcctacaatccaaaatcaacaacatcttgactatgaacaagtcgcacaaataatagttgatagttaacagggtaaatccactacacaaatactaacaaaacgaggatctgagctaatatcagcctctcaagattcaaacacagctacatacataaagtagactcaataataaactcttaagagtctttatagctagctatacctttcaaaaggaacaataaagtccccacagggaaagcaatcgtaggagttaaaagcgataaaaggatgagattaattaattggatgcttcttctcataaatgatcacacactataaaaagttgagtaaaacaaacacacatcaagccagatcgaaagagacctacaaaacctttatatcgcagaaaacaagagggtattgatgacaacagaggatagctttaagaaattaacttcaaagttagaatcaatttcagtaagaagagtgagaccagtagctagctggtaagctcccagcagaaatcaatcgaagcaagcttcaatatatatagttaaaaaaagaaaaaaaaggaggaaactttgggaaaaggaaagtaggtacctttaaagagaagaaagaagaagaagaagtttcaagaagccatgatcagatcttgtgactagtcacactcgtcagaggctttttgttatagttaaattctaaatcttggcctcgatcaccaccttctctcttgtgctacgcctctctattatttgtgctccctaacacagacgacgacgatgaatgggaccaccccgaatacgtatgcccatgtctcggagtatgggcgatttgtatattttataatggaataaaataaaagaagaaaaaagcttaatttggataaaagacaaacttcacacacatatcaagaacagggtcggcttcgccggtaacattttcctcgctaaaacagaacagtgggcttaagatatatcaagtactactacttgtaaatcttggcaactttctggggaatattaattgatattttcaccgatgtgactaagactgtgtaatgaggaaaaaagaagtaaagtggaagaagaacaaaatggggttgattcttataaatccgattgaagagaatcgtccaaaggataagagatcaaaagtaaaaaaaaaaaaaaagattattaataaaataaaaaaacgagaaagagagagagaaagaaagatggtggtagttgtttaatgaaggcagtaaccagaagtagaaagttgggttttgaggaagacgacaacgatagtcttatgggcttcacgttttctcggctttttgcgttttgtaatctgtttctgggatttacttcaaagttgggactttccttttttgtatttttttttatcgttgaaagaaagtaataaaatttgtaaaactaatttaagtttattcgaagaatttaaatttgttttattttttatataaaaagggtaaaaaaatcgttattaaggttttatttttttttcgtcaaacaaaatccatatcgttttaacatcattgtcaaacttcgattcgttcttatcgcaaatccacgttaccatgttttcttaggtattttgcttctatcctcttaaagttaaatctccccctaagttttttgcagtaaatctccggagaagatcgaatcgacaacgtcttatctagacagcgcaattcagcatagatattgtggcacagctatgttggaccaaaaatgtgcctccataatgcaaatgttgtcctagcaacacagtatcatccattagacatagtcatggcccatgttgcacatatctgaattggcaaaaggtactaatcccatttcaggaataacactttgaagaacaaaacaaatatgagcttaggagacttcttaatggccggccaagaacgcttcaatcactagggatgtgatggtttggaactttaaggcgccctttgagagctatttcattttcactcttttgatattgaactctcaaaacaactgttcattaccatgtgttttctcggtttttaatgtgtgtatttgtgtgaaacaaggccaataatctatatacgaaaataaagaaaatggttctttacaccaaaacttccgtattaaaaagaacatttaaaatctgttatcgtcactgtaataaacaatgtcaatggttacttatgtataagaagtagaagaagatgacggaaaacaatctttgtcactcttttgcaaggactgatcatcttcttcttcagtttgatgaaccaccggaggacatgaagaaagtttttcataataatcagtccctgcgactctgcaaagcatcctcgagatcaagttctaatccaacacgattccttatagacgcagctgcatgacaagacgacgtcattttaaataacctctccaattccttaaacctctcgcagtcaaacttatgactcttcaacaacttcctctgtctcgacaagaagagcctcttcatgaaatcctgatatgtcggatctctcgaagtcatcaagaaataagcataacccacaatgattccagtcgctgtagcgaagaaagtgattggttccatcacatcccatgagaattcccagaaagttaatctaaaaaagagtccaatttgaaccatcgaagtagctaaaccacaccaaagaatcttcctcacttgtctatgagccaaaacatcaatctcttctttcatgattctcaatttgttgaattcttccttgatttgatcttcctctggattctggtccaaaggcatcgctcttctaatcagatccaccacctgaacaaaacaaaaaagtccagatttttagagaaatcgagacaaaacagagtaaagtgagacaaaacagagtaaagttctgtttttgtgttctaattaagaccttgtctgggtgaagatagactttatcacgaaagatcaagacaacgccagcatcgtcaagaacacgagcaaagacatgagcttcatcgggagatctagcgatacccattccttgagaagcttctaaaagtgtagagtaagagacaacatctctatcagccacaccaacaagcttcttcttcatgtcttcaacattcacaagcctcattagcttcttcgcttccgctatagttatctctttcttcttctcctcttcatcctccgacggtgttttgacggtgacgcagcttcttaatccaccgtgaccaagccatgtcctttgcgaagaagctctaatggcattggacattgccgtacgccttatcaaacccattgaccacattatttgacccacgaatctgaagatcttagctctggatttggtgaaagcgaaattgaataaaagttaggttcacagatcaaacgattaaaagatatgagaatcggagaaagagatggaataatataacgcgcttaattatgattcttctgttattaatatcataagattacacgattaggaaaatcgaagaaaagaaaaaagaggacaagcacgaagccatttgctttttatctatcgaaaagtaaaaagattggtactagccaatggccattgttgacttggcatgaagaatggcttttacgaaaatctcaatcaataagttacaactttttgttaactcaaaaatccacattctaaatttgattttcttgataaagttgtatttattctatccaacaaccatcccgacaaaagaaacagtgaaaatgccgttgttgagacctatccttttcatcggagttgaaattgacgcggaatatatacggatttaggttactttattacccacatgacaaacaaacaacacgtaactgagtttaaaaagagaaaaacacgattagtttacgtaaactcttgtttagtttttcttgtcaaattgtttaggtggaattcctaattacaaatccatattctaggctactagcttgcattcactaatattcgttgtgaaaaactcatatgagcatatatagacatcaccatctttttgcactactatgaaaaacaaaaaacaagtctcattttgattgcatattagaaacgatctaaaacattttcgactaatatattgacatacctggaagtacctgctttcaacagtttgcttatatgataatgtgaatgaagaagacgaaggaaaataagttttagcctttctatccacggcttgagagtttttgcattcttttgaaacgaaagcaataacaactaattatgttctctcttgttttgccctttttctctccttgagaatagtagatttgatcgttatacgaccataagggccaaattctttatttaaacttttttttttggtaattaaaacccaatttcataggaaataaaaactagtacattttaggaccccagctaaatatgatgataattaatgtaaaaatacgacttgggaattcatatgtttttaatgctcgacttttgagctgactttgcaataggcttaccacttccgttaaaggataagtttatgaaattattaaaacataaccaaacaatgacatgacgagttgtatctaagaagagatgcaattaaaaaaacacttaatctaaactaatactacttagttagcctggccatactattattaaagatgttttaatcttatgcaatagtttttttttttgtcaaacaatcttatgtaatagtttaagtttgtcaatttgtcttattaaaacaggaggaactgcacaactctaccaaaaaaaaaaaaagtctcaaagactgtgccaaatcttgcctttatgactccaaagtgcacgtttattcagataaagtattcaaaaaacaaccaaatggaaatgagattagagagcgaggttcagagatgatgggcgactagttgcaaatacaaagtgttgtttaaatgaaaagtgattaattatttatatagatctttattggacccaatgctatcacctcatctcaattatcaagcccatgggttggtctcatcaaagcccaatcaaagcttcccaaacaaaaaggaattaagatgaacaaacaaaaaaaaacacttcggagcaaaagatctggccaccacaacacaacgatcgacgaatacaataggaaaatttgaaatctcgtcgatgaagatgactgctaagatgcgccgtgaattcccgacggcgttccttctcttgtttctggttccggtgatgattccggtcggtgaggctgtatggctagatgtgcctcccaccggaacaaagtgtgtatctgaagaaatccagagcaatgtcgtcgttttggctgattacctcatcatctccgaggatcacgaggtcatgcccactatatccgtcaaggtaagtgtcttcgattttctgttcctatcatcttgcttgttcagtgatttgaatctgcattttgtgttactcgatccataatttcaactgattcatgagtcacgtttaggaattagaaaggcatgtattaattctcgatccaagtttccttatttggaaaattatgatcatgcatgtctttctttgattgtttgttatgatgattttcggatttgtataaatgctcagatgcttgtgtatagcttaatccctgtgaatacccttttttttttgccgtaatatcagtaattagctgtgagattgagataagaaaaattgaaactttatgtggtcttttaatgaagtctgtgtttttgatgtgtatgtttgggaacaatgataattattacgaacaagggagtttcttttattgagcaagtatcatttggtatttagtaatcattgctatgtgctagttccagatagtttgatggattgtttaagatagtgtcctttggattgagagcagtctttgaagtcgacttgaaaaaaggaatacaatgtttctgaatggtaacctctgttcctttttattcttggctctgagttttgagaatcattatggtgcaggtgacatccccatatggcaacaatctgcacaatatggaaaacgtaacgcatggccaatttgcatttacaacccaagaatcagggaactacttggcgtgcttttgggcagatgaaaagagtcacggaaacaaaaatgttagcatcaacattgactggagaactggaatcgctgctaaggattgggcctctattgctaagaaagagaagatcgaggttagctttcaagagattttacagttcagagagtggtattgcttataattttgcttcaaaatatttctaaaatttgttactctatgacaattgcttaagggtgtggagctggagatcaggaaactcgaaggcgcagtcgaagccatccatgaaaatatactctacctaagaaacaggtaaagtcatcttcagctgcatgaactgctcttgccttctttgctgactctcattatcaaaatggtaattgcagagaagcagacatgaggacaatgagtgagaaaacgaactcgcgggtggcttggtacagtataatgtcactaggtgtttgcattgctgtctctggtttccaggtactctacttgaagcagtactttgagaagaagaagcttatatagagattccctgatattcaggtcctttaatgagagtttcttcttaaagaataatattcaattcatctcctttctttcctctttacacgcctcctttttactgacgctgtaaaatttttgttcatggattgtttatgtagcttctctctgataagaagtcattatttctgattctgaaataataatattaacttcttgtcatctccaaagtccaaacgaaagagattctagaaccattgatattgggttgtaactgatactttatgttagtttggggctataacacgtaagtttgacagtacaagggttaagattacaagaaaaaactaatcaaatgggtattacatacaaatcagcccaaatttctgacccaacaggcccgttaagagcaaaccctaatttcaaagagaatatatataaaccctaatcacatttcgcaaccaccaaagcggaggaaaaatgccggctggacatggagttcgagcgagaacgagggatctgttcgcgaggcctttcaggaagaagggttacattcctctatcgacttacctgaggaccttcaaggtcggcgattacgtcgatgtgaaggtgaatggtgcgatccacaagggtatgcctcacaagttctaccatggtcgtactggtcgtatctggaacgtcaccaagcgcgccgtcggtgttgaagtcaacaaacaggtctgatgatctctcacttcccttaaacttttgtgtccttgaattaggatttgagcttgttgtgctatttggattgttgatctgttgatttgatgttgaaatatgtgattgagtattaggtttgtagaatgtaaaccttctactgtgctccaatttagctcagattgttagttttggctcaaagatcttatcttctattatgcagtagtgtggttcttgatcctgtttcagatttgaagtttgattgcttaggtctcgtttagtctttagccttagcatgcattgcgttgtatcaatttggccctttttgcatcacagttctagctaagcatctagttttacttctccattgaactgctagtatgtttggtttcatgactatcgcattgctctagttttgctttaaatgaccaccaacattcgtatattaatcttgtttctataagtgtcttagagatgttattgtgtaatgctgattagcctatgaccagaacacaaacatttttgctagtactacttatattgggtattatgactgacatatgatggtggggttgtttcagattgggaacaggatcataaggaagaggattcatgttcgtgtggagcatgtgcagcagtcaagatgtgccgaggagttcaagctgaggaagaagaaaaacgatgagctcaaggctgcagccaaagccaatggtgagaccatcagcaccaagagacagcctaaaggacccaaaccaggattcatggtcgaaggaatgaccttggagactgtcactccaatcccctacgatgtcgtcaacgatctcaaaggaggctattagttctatcttcttgtgctttagaactctttttcatttgttttgtagcagacttaaaactaagaattatgatttactatataacaggagtttgcaatccagattttgtaaggatggtttatttttattattggtatttttgatcttccaactattgttcacttttgtcaacggtgtcttacgaattttaaatatgtctgaaattgatttaattatgagcctcattttaagatacgtttgacttggagcccatggaactccagcacgatgccacgtagcgtctgagcaacagaacctaattttgaacactgaactcaaaagagaagaagaaaagagtcaagtcttgggtgtccattaatgggagatctctgttatgttcaacacttgctcgagagacagatagaaaccaggctgcttcgtcattgtttctcctctgaagcattttcgttatttctgtttgctgtattaaaatttcctaaaatagaaagactatgaaacctcatttccctaaaatctctcatattcttgataggctcttcgtaatttcaggaatcactcacaattccaaatctctctctctctctctctctctctctccattaatctcagcatatctctttctctctaacccacaagtcttcctttgattctttgatttcaattcgttttcttcatacaaaaacattgagacacatatttaatccatatttcgagatcagtcttgctgacctcaaattttccagtttcgttacatctacagaaaaagctcctctcttttttttttgtctcccatttgattttaagattagcgtctaatccaacaagttccaacaaggtctaaagatcaaaagctcaaatctttgttctttgttggtggtgtgggtgggaagatttcattttcagtggagaagaagaaaaaaggaaagattaggaagctaatcaaaacatacagtttcctgattccggtcaggaaactgtggagcattgacggaatcacgaagccgtggagaattatgggctgcaattgcaccaaaggaacacggcctgataatgataacgtcgataacagcaacagcattgtcagcaatgtcaatgtcaaggagagaagaagcaagcctaagaaaacccccaagaagaagaaaaaatcaaaatctgcttcttcgagcaaagacaacaatgtaggattcgaggaacgaagcaacgacaataaagaagcctccttgacgttgttgatacccattgatgccaagaaggatgatgagtccgagaagaaggtgaatctcgagagaaagtcttctagattggtgtttcagagacggcccaccggtattgaggttggtgccaacaacatagggacattgcagcaacctaagatgactagaatatgcagtgttagtaatggagaaagaggagctcaggttatggctggttggccttcatggttagcttctgttgctggcgaagctatcaatggatggattccacgaaaggctgattctttcgagaagttggaaaaggtaagttctttttgttcattataactattgagatgatttttgattgattgtcttgtctaagttgtacattgttggattgttactgttagattggacaagggacgtatagcagtgtgtacaaagcccgggacctagagacgaaccaattagttgcactgaagaaagtgcggtttgctaatatggatcccgacagtgttcggttcatggctagagaaataatcatccttcgaaggcttgaccatcctaatgttatgaagcttgagggtttgatcacttcaagagtatcaggaagtatgtatcttatatttgaatacatggaacacgatcttgctggcctagcttcaacccctgggattaacttctctgaggcacaggtaatcctatttctccacaatatatgcattactattatgtggtttgattttcatctaatgtattgtgcttctgcagattaagtgctatatgaaacagctgcttcatggtcttgaacattgtcatagccgaggtgtattgcatcgtgacatcaagggctctaatctgctgcttgaccataacaacaatctcaaaattggagatttcggtcttgccaatttttaccaaggtcaccagaagcagcctctcactagccgcgttgtaactttgtggtatcgtccacctgaactattacttggttcaacagactatggtgttacagtagatctgtggagcacaggatgcatactagctgaactctttactgggaaacctatcatgcccggtagaaccgaggtagaacaactacacaagatcttcaaactctgtggatcaccttctgaagagtattggaaaatatcaaaattgccacatgccaccatctttaaacctcaacaaccttacaagcggtgtgtagctgaaacatttaagagtcttccatcttcagctttggccctagttgaggttcttttagctgtagaaccagatgctcgtggaaccacagcttctgcccttgaaagcgaggtaaaagctatgacattgtagattagaaatttgtgcctccactcgctttatttatcggaatgcaagtgtatacacttcttgtctcacacttttgttctttttctgtttctttagttctttactacatcgcctttggcaagtgacccatcaagtttaccaaagtaccaaccgagaaaggaaattgatgtgaaggctcaagaggaggaggcaaaacggtaagatccagatcgtatcatagtgttaacaataacaaaaagctcttatatgcttgaatgaacactgacacgtcccaatttcctctgatccaccagaaagaaagacactagcagtaaacagaatgattcaaaacaagtatctagagaatctaaagctgtgccggctccagactccaatgccgagtctctgacatcaatacaagtacgtctggttctagcataatacacatatagatatatatgattatattcgtgtgatcttacatatctgtctattttcttgttttgtaaagaaacgtcaagggcagcataaccaggtaagcaatagtgacaagttcaatcctggtgaagatgcagctagcttccggatagaaccactgaagagtggaactgcaaaagacggtcacactcgttatggtgtgtcctcggtgaatagaaatggagagaatgttatgatgggctcgagtcggtctcctagaaaagaactgaggacacaacggtcttttgtccaacgcggaacagcccaattgtcaagattctcaaactcggtagctgctagagatggatcacatttcgctatagcaaatccacggtggtttgaagatagttataacaataataacggaaggcaaaacggaggtgcttggtcccaacgtttggtggttaaacacaaagagtttacaaaacacaaagaatctataacggtaaaaagaacatttgaactgtgtgtaattgtgcttctctttgcaatggaattctttgtgggctaatcacaatttgtttggttatctttaggttaacggtgaaaagaaagagagaatgcactgctcagggcctttggtttctgcaggaggaaacttagatgaaatgttgaaagaacatgaaaggcagattcagttagcggttcgcaaagctcgggtggataagaagacgaatagaggcgataacagacagactcaagcgtttcttgctgcaaatggcaggtgagatatatcaggaaaggataagaaaggaagaaacttttgggatatcagacaaaaagagaaagaaagtgttgcggttttgcaatgtagagtcgactgatctctggtggggtcttgtatgatatttgtgtattttgtttattcttcattcttgtatgatattaagatttattagtcctagtagaatcaatcattattgttattttggtatttcaattgcactaaacggtctaacagagacaaatatcgatccaactaccaagaaacttaaatagaaggcttcactctcttgcttctttttgcagaacctgaaattagctgcaatgtcttcttcaagtacccttatagcttcttttgcttcatgtctacgcataaacccaacttcctctcttatctcagcatttctttatatagttatttaggaacaagtcgtaacttctgtagaattcaagttcttaaatttcgaagcagacaatgaggcctaaagcaaatcaaaaccacaagctgaaggttctccttgtttttcttcttgccaccttaattctcatcttcatcgtgagatcaactctgacatcttcacaggaacaccagactccacaagagacaagatcaacgcgttgctctggtgcctgcaataagctaccacgttccctcgcacaagccctgatccattactcgacctcagttatcacaccacaacaaacgctcaaagagatagcggtaagcagtagagtactcggcaagaagtcaccctgcaatttcttggtgtttggtctaggccatgacagcctcatgtggagctctctcaactatggaggccggactgtgtttcttgaagaagatgaagcatggataaaacagatcaagagacggtttccgatgctggaatcgtaccatgtaacatatgacagtaaagtcaatcaagccgataatctcatagaagtcggaaaaggacctgaatgcacagccattggagatccaaggtactcaatgtgtcaactagcactcaagggtttgcctgcagaaatttatgagaccggttgggatctaatcatggttgatgcaccgactggctactacgatgaggctcctgggagaatgacagcaatttacactgcgggaatgatggcaaggaacaggaaacagggaggagagactgatgtgtttgtgcatgatgttaacagggaaatagaagacaagttttctaaggctttcttgtgtgaagggtacatgaagaaacaggaagggagactaaggcattttattatccctagctatagagatggatcagaatcagaatcaaatagacccttttgtccatagtgacacatgttacctagagatctcctctgtttctccaaatatggaactctttatcgtccttgttgttcacctacttgtccacaaccagtattggagagcctagacataaagctatagcaagaaactagactttcttattacgttaaaccaagtgttttgtaaaaaagaccatttaactttgtttcagcccagtaaagaaatctagaaagctgatcaggagaaaagagcagaacatataagcaaacttgaaagttgaaacaaggatattgttgaatcaataagagagaacagatgatattactacacaataccagaaataaaagagaaaaactcagcaaagaagtcaaaatagtccaacttgtataaaataccaaaaatcctgcaaacttcttgactagtagttgaaacttgtcccacgcttttcttttgaacaacgcttttaggatggagggcagacacttgtgctggagcatcgaagaattcgttcagtttagttgaccagaaacaaaaagagtttccatgctgcttctattaagaagcaattgtaatgaaataaatagcttttacctggtcacaaagatggcagttgggctgcctggagatggaggattctgcgtcagcagcgaagcatgtggaccagctattgaaacatcatcagggtcacttgcagaatatatttcaacctcttcaagaccaagttgccgcctgatcaagtccttgttactctgaaggacttcgatctctccaaaaggtaacctcaagttcagagcctgagtgccaatagatattgcctcgtccttcttgaatttaaggaaaggcatgcaaaccttttgaatggctttcaagttttttccctcctgcaacaatgttgcacttagttctgcaagcatctctgtatccggggggaaactacaggtttgctggtcaaatctactttgcagaatccgcaggcagtgagctctccatccatcaaattgctcattcacatatactaggccttttagcttcccctctggcacagctgttacttgagcacctttcttagcacccttcttggaacctgagagttgtttttgaagaagctttctcattaacacaatagaatcttgcaaatatttgtttgcactcttgagcaccaaatctggctcatttgatggtggccagcctgctgtgagcacacaaccttccttattcaaaactttcctccaaacataatctgcaaaatggggacagattggtacaatgaggcgtgtttgcacatccataaatttcagtagcaagtcatggtgcatgcctccagttccacaagagagtctatactcatcccgagcagcttgtaagtcgtaaaacccatttttaagtgcctccctaaacagacaatctttgtacgctctttcagtcaatctgagagcaatgttcatgtcattttcaaacactttatcagcatatgtagatggaggtcccgttcttaaagaggattcgacatccagaacttcttccatccatgtgagctcttttgtcaaccgcaaaattgcagcatttgcagtttcaaatgcaaaatttgcatcatcaacaccatcaccagcatcagccaaacaaaaccttgtaccagtggcagagaattc

SEQ ID NO: 26 - DNA, 146505 bp, Arabidopsis thaliana
gaattcgttcagtttagttgaccagaaacaaaaagagtttccatgctgcttctattaagaagcaattgtaatgaaataaatagcttttacctggtcacaaagatggcagttgggctgcctggagatggaggattctgcgtcagcagcgaagcatgtggaccagctattgaaacatcatcagggtcacttgcagaatatatttcaacctcttcaagaccaagttgccgcctgatcaagtccttgttactctgaaggacttcgatctctccaaaaggtaacctcaagttcagagcctgagtgccaatagatattgcctcgtccttcttgaatttaaggaaaggcatgcaaaccttttgaatggctttcaagttttttccctcctgcaacaatgttgcacttagttctgcaagcatctctgtatccggggggaaactacaggtttgctggtcaaatctactttgcagaatccgcaggcagtgagctctccatccatcaaattgctcattcacatatactaggccttttagcttcccctctggcacagctgttacttgagcacctttcttagcacccttcttggaacctgagagttgtttttgaagaagctttctcattaacacaatagaatcttgcaaatatttgtttgcactcttgagcaccaaatctggctcatttgatggtggccagcctgctgtgagcacacaaccttccttattcaaaactttcctccaaacataatctgcaaaatggggacagattggtacaatgaggcgtgtttgcacatccataaatttcagtagcaagtcatggtgcatgcctccagttccacaagagagtctatactcatcccgagcagcttgtaagtcgtaaaacccatttttaagtgcctccctaaacagacaatctttgtacgctctttcagtcaatctgagagcaatgttcatgtcattttcaaacactttatcagcatatgtagatggaggtcccgttcttaaagaggattcgacatccagaacttcttccatccatgtgagctcttttgtcaaccgcaaaattgcagcatttgcagtttcaaatgcaaaatttgcatcatcaacaccatcaccagcatcagccaaacaaaaccttgtaccagtggcagagaattcttcaatagactggcgcagggttctgaaatttccagtagactttgacatcttttcagaattcagcatgatatgaccattacatctgatcccacgtggccagttacgattcgccattagtgcagtgtggttgtagatgaaaaatgtcaaatgattctgaataagatcctttcctgaaactcgaagatctagcgggtaccagtagtcaaattcctgcttcatctcacttaagacagctgatggaatatcagatgatttagggtacgggccatcacagaagagatactcccaaacttcatcattcatctgctgagggcggatcagagacttgctacctttatacatgtctccatcgtgaaagatatgggcaactgtgtaataggccatataaagagatgaatcagataaggattccactaggaactgttcatcccagggaatacgagttcctaaaccaaaagatcgtgagcaagcccactgattgagccagctcaaagtgtgctcaaagccatgccttgtttcatcagagtagagattcatctttgataggcattcctcagcaattttccgccattctgattcgccgtatgttatgtaccactgatctgtaagagccacaacacattcatcacccgatcttgacatcaccggcttctcgggttcactgtatatgattgcctcgccagtctctatgagctttgtcttgataatgggcttaatttcttgaactttcctaccaaaaaactctccaataagcatggttccttcggtaaatcctttcaggtaagtcaacctcttagcctctgcaagcttttccttatcgttttggcttttaattttcagatccaagcagaccttttcagcagctttatccccaaattccggaatgttgatgatcggtatgatttcagtgggcaaccattccgttttcacaccatacttatcttgaagagcaggctttttgattaaatcttgtaaagccatgtaatcatcaggagcatcactaggcacactggtgacaatgccagtacctttgttggtcagaatggtcaacatgggcagagcatagatgatctcgttgactgacagaggagacctcaaagggagtccaatcagatcatacccggtcaactcaaccaagcaggaaggctcctgagggttcttcgaaaagttctggtacgcaaggttgagcgcagctctctcagtaaggatgaagacctcagtttcgctgatttcataagctccatatttcccatcaggtagtacccatgcgtttgtttgtccatacatggtctcaggcctcaaagtagctgcagccaaaaacactctcttgccttccaaaggacccagtttcagagggaatggcttgactacttccatctttatgagtgtatactcttgaggctgaacaccttccccagtagcacggtcgtgatcagcacaaggctggccatctaaaggtgagaatatagtgtacctgcggtctttaacaatctttcccatagatttcaacttcctcatctgccacctcacaaaggcatcgaaaaagggattaacatcagtggtcacaaacgagcgtctccaatcacaacccaatccatatgcccttagatcttcaacagccaaagggggaaagtaatacaaccattcagaaggctctcggaaatttgcaatctcactgtcagtaagaccaaaactgcgcataatctcccactgataaacctgtccaccagctttggcagcaaccttagacttctttcccttgaactgacccggaatcggtaaagctatagtatcactgctctcctcctgaacttcaggaactttggtggtgtcttcagcagtaaacacaggagggttaccaaactgttcaatctcacgacgaagcttatccgcagaagccttaattggcataccagtacaatggaaaccaaatggaagaagcacattagctcctcttagcctatggtaagcagaagcaaaatcaaccttggacaatgaaaaggcatgcccaatgtgtagataaccattcatatacgggaaagggaaggttgagaaaaacttttctcctggttttggaagattctcacaagattcggctctgaatacatcctcgtcttcccaccactttcgaacagtggcctcaatctcaagaagacgatctctcctagcgtagcttttcgattccgatgccattaagtgacagtgcctaccccaaaaaaacgcaaacctctaatttagatatcggcttcttaagtgcaacacaaaaatcggtagattgagtctaccagcttggggagagaattaccttagggatgatgaactttgaggaatcacgaatcgagcccaccgcgaaatcgatccgagatttgacagagacagagccagtgggagagataagtaatggtttctagggtttttctttaagactaccttcttcagtctttggattcgacggctgattattaaactgaactagtctcgccaaaaccggatccaagtcaaacccatttagaatttgggccacatccactaaaaggcccagatatttggggacttcaaagttttttttttttttttttttttaactagtagacgttcaatttctttttctttttttgtttttttttttttgttaaataatattcatgttttctttctcctccccttttcaaatgttactggttttttattgtgcgatgcttatgtcgtatattatatatggtggattgtttaatggtataatttcattgtatttgcagaaatttagatttgcatgaaaaaaaatgttgagaaatttgagttacacctcaaacttgaaagattagtaatggaagcaaatctaagagactaatagttaaaagaattctcgactttggttctagagaatgtgattgattaatcctttcaatctttcatcaacaccacacaacatgtttagttagttatgataagataaagaaaccatacatagataacatctttcaaactctttagattctcaagagtctaacctttgttaaaaataagaaaactatatgataaaaacaagggatgcaaaacaaatatattgaaaattttcttcaaacgagattattatttggcttagcttgtgccttctcgttcgtcttgctcttaccatcttctttcactggatccttcttctccaaagttacagaagacgacgctttaccatcttcttctatctcaagaggtttcgagcaccacctatcgagcaaattgcataaaaccgtcaccattattattcctgcgacgataatacaccatccccagattgggatctccatcttttttatgtatttgttttcagtgacaaagaaacaaagtaaattgtttgttgatgattacaagttgcttaaaagttgttgatattataggaggcgggaactactcgaaagacttggaaatttaccattttgacaaaaaacttgctagaaaataactaaaataaaagtaaatcattcttctaatttttttcaatttatcaactttaaaagtatatttccttttcttcataaatctcataaactagcaaaaagataatgtcataaactaatactataaaatatatattttgttttttttgttccgtcaaatatatatttttggttttgcctgtattcttgttgacttccgttttttttttcccccttttttttaattaacttcctttctttgcttttccatttcttcttgattgaaaaatgtatattgtgtgattttgtctactttatttaaattatctttgaaatcgaagaatttctgctctattaaaaattcaaactatagtctacgttggtatttgtttatttcattttatactctgcttatttttctgatactacattacaactaccactcaaaactacaattaattccctaaaaatatttttcgtttccaaaatttgttttgtgtgaacgattccgaactccacaattgatataaaaaattatctttgagttatattatcaacaacagaaaaaagaaagaaaacaaatacaacgcaagccttgaaataaagtctcatagatatttggctttttttaagtgcaacacaaacaaagcctttcaagacgatgagcaacaaggcttcttagcgtttgattcagaagtagcagccacatcaattgtttggccttccttgatgttggcatttgcagttgtctggtctgaagatatcgacttcttgctgatgatcctataaacctccgagagaatcgtctgaaaagccttttctacgtttaatgcctcgagagccgatgtctcgatgaaagataagccttctttctctgcatagctctgagcatcctctgtggcaactgctctgagatgcttcagatctgtcttgttcccaatcaacatgatcactatattggaatctgcatggtctcttagttcttttaaccacctgcttacattctcaaacgttgttggcttggtgacatcatagaccaaaagagctccaagtgcacctctgtaataggcgctagttatggctctgtatcgttcttgcccagccgtgtcccatatctgagctttcacagtccttccttccaccttagaacaaagatcataggttttttaataggttaattcagatctaatgagcagcagactctatgattagtgtgtctgcaacaacaaaattagtaacttcgcagctaaattccacaaacaacccagtaagaaaactagaaactgtgaaacaacaaccatgattcatacttcaaaagaaaatcatgttcgagatcaatttcagatgaagagattcttagatctgccttaaacaaggttttagatctgacatgtgagggagccttacactaccacgtaccagagtatcgacaaatttgggaacattatcaataaaacgcttaaattaagagataccaaagcaaaaatctcgaccaaatgaaaaaaacaggcaccacacatgtaaacatcaaaattcaaaaccaagcccaaatgttcctacacacaatgactgcttccgagtattcatacgaacacagatacggatcgaatcgaaaagcaccggatgctgcttaacttagaactaaacctagatccagcaacatttcgattacactatatactatatatatagagagagatgtgtgcgtacttggagagtacgagtagcgaattcgacaccaatggtggatttggattctaagcagaactcgttgcgagtgaatctagagaggagattagacttgccgacaccggagtctccgatcaaaaccactttaaacaagtagtcgtattcttcgtccggtcttctcgccattgttacacttttctcgaggagtgctttagatttgggattttgaaatagaaaaggagaagatgacagaaataaataaataatttaatttctctttccccttggatcttctctattcaaccttctcggcttgttattgcccaacgacgaagaccttttcttgtcaagttgggcttactaaaaaagcctacatatatgtaattcatttatacatgctaataaaagggaaagtaattagagcttaaccggaaaataaacaaaaatcagaaataaaaccaaacaaaaccgagccaaaccagaggaatacactcaatacagattttaaaaaccctacttcttcatcatcatcccttcaacactcctttatagcttttctccgcctcaactttttgcttcttctctctcgatttgctctcacggaagattcttcagaatatctggtaagatccatcgatcgaacaatctttttttctccagttagctcatattcatatttatgatcatgtcaattgcgagctcactgcttgattttttttccttggaaccagatccgatatcagaagccccaagttcgcttgaattccgtctgagcaatggctttggtgagttctctatgattgtctactgttacgatcgcatcatgtatcgatataattgtagaaacgttagatttgtaaattttaggatctaagtttatagaacgattgttcatacaccaaattgattaaaattatgttagtttggatatgtagctactctattgttaagttattgatttggaatacgtattattgtgctgatgatgaattacgattgcaggtcttgcacacgtacaagggaaacaaaagtgctgagaaggcactcattgcagcagagtacgttggtgtgcagatcgatgtgccctctgactttcagatgggtgtcactaacaaaacccctgcgttcctcaagatgaaccctattggaaaggtttgtcatcactggtgtttgctaaatttctggactgagtattattaagtctatttttcagctaaccaagagttattgatcttgctaggttcctgtacttgagactcccgagggttcagtatttgaaagcaacgcaattgcccgttatggtaaagcattcataactttctcctttaattgtctctcagtgtctagtttgattgcttgttgtcgtttgggtttaatggatctgttgatatctcaatacagtaagccgattgaatggtgacaactctttgaacggatcctccctgatcgaatatgtaagtagctgttttttccctgggggctactcttctctaatccattgacacctcttctattgtttgtcattctatttgttagtattctcaatggttatctgcatgttgttttttcgcaggcacaaattgagcaatggattgatttctcttcattggagatctatgcaagtatcttgaggtggttcggcccaagaatgggctttatgccatacagtgctccggtaagcttttttgactttcattggttgtttcattcactctttgtgatggcaatctaggtattcttttcactatataaatagtctcatccgtgattgttatataaatgaaggctgaagaaggtgcgatctctacgttgaagagagcacttgatgctctgaacacacatctcacgtctaacacttaccttgtcggacactctattacccttgctgatatcatcactgtctgcaacttgaacttgggatttgctactgtcatgaccaagaaatttacctctgaatttcctcatgttgagaggtacttctggactgtggttaaccaaccaaacttcactaaagtgttgggtgatgtcaaacagactgaagctgtccctcctattgcttccaagaaagctgcccagcctgcaaagcccaaagaagagcctaagaaaaaggaagccccagtagcagaggcacctaagcttgctgaagaggaagaggcaccaaagcccaaagccaagaaccctcttgacttgctaccaccaagccctatggttctagatgattggaagaggctttactcaaacaccaaatctaacttccgcgaggttgctattaaaggtgtgtggtgatatcttcctctacctagtttttcagctttgctatcagggaattatttagctattggaatcaattgttttttatcatgtctaatattgtggctcaaatgcaggattctgggacatgtatgacccagagggatactcactatggttctgtgactacaagtacaacgatgagaacatggtgtcatttgtcacgctcaacaaggttggtgggttccttcagcgtatggacttggcacgtaaatactcctttggaaagatgctgatttgtgggtcagagggtccgttcaaggtgaagggtttatggctgttccgtggaccagagatcccaaagttcataatggacgaggtgtacgacatggagctgtatgagtggactaaggttgatatctcagatgaagcccagaaggagcgtgttagccagatgattgaagacgcagagccatttgaaggtgaggctctcttggacgccaagtgcttcaagtgagaagagagaatggtttggtacttccatttacaggttttgcagctggggctttacatatctttctatctgtctgtctcacataggggttttgctctgtgacgtgtcgcatagactgtttttttcttttctaatcgagtgtcaaggacaagtctttttagttctttgttaatgtttcgcctccgtccagaattgtttactataccagttttcgaaatcctgaccggccagtctaccctggcaataggcaatacatggtctggtttatttgttttacggtaattttgccttgattgattttctttgacgcgtttcggtcaacttatatacattggtctttgagttgaacatttagtggtaaagtctttttggcacatatattgaacatttttccaattttaaaaattgctgaaaaagcaaactcttgaagaataataagtctagttaatttcgtagaagaagaactggcatgttcatctcgaaattaactaacgaataaaaaaaggtagacaacttaatacgccacacaactctaataaaagaacatgtaacttatgacaaaataatgtaacatttgttcataatatttttcgtatcagattatatatacaaattgctgattataattattattcgctgtttgaccaaaaaataaaaaattattgtttcgctgagaaatgtatagataattatattatacgttagattggtaactaccaaaaatattactatatgttagattggtcacaaaataagaaaagaaaggtagtgtatatcaatttattaatgacgtatttaataaagttggtctcaagcgaaatgaattgttctttactgctacaaggcatataatcctgtaaagaaaatctgggtggtcgaattgttcttttccctttttctaatttcaacatcaaaagttgttccaccagaagaatttgttctctgcagcagtaaagatcgatccgttcttgcttacaagcagaaaaatcatatcgacagagagagatgagacagaactcagcaactggtggtctttcatggcggcgtttactgttcttcgcttcgattggtttgcagttcttcttaggttcgtcttcttcagatctatctgatttcatttcacttttttgtagaatcctcatctgatttagtattcctttgggattttaggttctcaattcgctagatttatgttatatttagctcaacttggctctttctaaatactacagtgtgtttaatctttacgcattaggtcttttgcgatcaggatcgaaacatgcagataggaagattgtatttctcttttgagtagatcttggccaaatcactaactttgtgcttaacatgttagtgaagagaaaataagcaaagaggattttaccgttcagttcatgggtttggtgtggttatagtttcttttactaacttcactggataatagttgtttacctttgtcctaaatgcgagaccatgtcctgatttgaagaggttgtctgcaaaatctattgcttttgtgacaagtatttatataattcctcagttgtttcatggtgatgctgcagttgactaatgagatatgtatttacttgttgcctatagttttcagacatttaaagttcttacataagctatttatacaattggccaccatgtgcttttaaaagaagtaggctcatctctttctctttcccgtaaatttctttaaatgcatgttgcaattgatcttgttctctgttgtctatgtgtgtagctgttgttgttcccctttagtcgaatataagaaacatggtaactatttgaggatagactgtgtagctttagctgactagtgagtgtctacacgacaagattttacagtcacgagtgcacttgaggacaccataaaccttgatttttttttgttgtatatgctaagagggcatctagtaactaagtcttctgatatgatattttcaggtctatcgggtgattccaagaacacgaatgcaggagttaagacagaatctcatacttcttccagcaaaacaggcacaaaagttatccttgttctagttggatttgtggctgtggccatgttctcgttcttcctatacaagctatggcaaaagaagaaaagagacgagcagtatgctcgactgttgaagctgtttgaggaagatgatgaactcgaggttgaattaggtcttcgagattaaaaacgcaaatttgtcaacaaaggcctcatgtttgtttgtgttcgtttgtctgagcatgtaggtggaacttatcacttatgggtatttaaatttgaagtatatatatacgcatactttgttgggctagtaactgatgtagctgtcttgtcactaatcatcatcagttcatcaattatcctctccagacgattgttttccaatgttgtacaattcatttttctttctttcacttttttttgacaaatagcgtgagtttaggttctaaacaaattcgatgtaagtttaggttctaaccctctagacaaattagttaagagatctgtgtccctgtcttaagattcctagaaaattcttactcaaacgattagatttaagaaacagaaagtgttgagttttacttttccttagaccatctccaatggagatttcttaacatgtcttttttttttttttttgaatttaatattaaattatattcaagaaaaaaataaaaactggtttataaatgaatgcatactgtttttaaatagagtacaaaacttttaaagtaatcctcaactttgtcttgacgcaaaccatatttgaagtccgctcgagtacttcaaatcacctctgctttgaattgtactttaattgtacatatgtgtttcttaaatctctttgttgtctaattgtggcggacatttgaagtaatttgaatctgaaccttaaatctcaaaaccagtagataatgaagagtaaaatagacacatggagaaattcaaaacttaaaatgaaattaatgtttgtgtttcaaaactcaacacattatacagaaattatcaagtggcttgttcctcatgtcccactgacacacaaagaagctgcaagcaaactccctcctcttatcatatttttgtctgcctacaaatattatgggcaacaaccttcattagaaactccctagtgtataccaaatcacagatgttgataattaaggagggattaacattcatgtcaaaaatatgaatcaaacaatctagcctaaaccaagagagaactaaggattacagaggaacggccaccgaataaatccaacaaaaatacaaaagaaattgaaactgggaagatatatattcatctacatacctgttcgagttcattttcgtcaaaaacggtcaattgcaagaagggttggtacggttcttggctcctttcttcttctcagctttctcatcaagcggatactttgctttatcatgctccggcaacagtagaagatcctctatgtttatgtttccatactcatcaagcggtttatgtttccatgtttttaatctttttaccatggattcatatgcatatgtttcaaattctatgtttgtaacctaaactatttttcattaactatgaaatatttacaatttagaaaaaaaaaatgttaagtagataataggattaggagatctgtgccgcgcgcgtgagaggaagatcctttttccttgatctgatgaaaaggaagtgttgagttttgagaaacggaaagtgttgagttttgtcttttctatagaagatttttgttttcctgttttatctataaataagcctcttaaatctcttcatcaacaatgacttgtctgcaattacaagaatgtcgaaaaagcaacgttgcttgatgatggaatcgctgccccacgaggtcgtagagtgcatcctagagagacttgatgcggatcctctgctgagattcaaggctgtatcgaaacaatggaaatcaactattgaatctccattcttccagcgaagacagttcacacagcgtcagcaatcaggtaatccagatgttctcatggtctcccgttgtgctgatattaattcggaaatagaagctcttactacattggtgttgggttcatcatcatctgtcaagatccctactccttgggaggaggaggaggaggaggacaaagaatactctgtttcccaggatagctgtgacggtctcgtttgtctcttcgataaattcaaatccggttttgtgttcaatcccgccactagatggtatcaccctcttcctctctgccaattacaacaactccttattgccataggcgacggtttctacgatcttggatacagagtctctaggcttggattcggtaaagacaaactcacaggcacatacaagcccgtttggttatacaactctatagaaattggcctagaaaacgctactacatgcgaggttttcgactttagcaccaacgcttggaggtatgtttcaccagctgctccttataggattgttggttgccccgcacctgtctgcgtagatgggtcgcttcattggttcaccgagtgcgaggaaaccaaaattctttcgttcgatcttcacaccgaaacctttcaagttgtctctaaagctccctttgccaatgtagatggattcgatatagtcatgtgcaacctcgacaaccgcttgtgcgtttccgagatgaagctgcccaaccaagtgatatggtcattcaattcaggtaacaagacatggcacaaaatgtgttccattaatctggatataacttctcgttggtttggtcctactcaagtatgcgccgtcttgccactagcacttttggatgggaagaagaagaagaagaaaaagttgttgttttattgtcgtgtacgaaaacgaacaatggtggtacatgatgacgaaaccaaatcatatgatgttgctttcgaggctgactccatcggtcatcctgtctgttatttcccgagtttaatatctatttcataaagcttctttcaccatccgtttgtttgtccaagtttgcaactcttaaagctgcctatgattatgtttcagattcttgttttatgtaagaagggcttgtttcaacatgtaccaacaatttttgtcgtgcttttttatgcgcttgttatgcttctaatttatctcacacagtcggatgatgtcgtttttccttgcatactttcagtgaccacaatatgctctagaatctttaaggcaccttataggtttctcaacgatagcccaaactaggatcttgttgctataaactccccgaaaacaaagtcttaaatctatgtatctattcaaattctgaagaaatgttaaagaaattgaaacaaggtaacgaatctctccgaaaccaccaatcaaataactcaaacaactatctgaagcttccaatgactttgttctgtaattcaattgaaataatctccttttacatggcatcagaatcagagccataatcaataaataattgagaaggagattacattttcataagcaccattattagtttattacacactggtcaatggtgaatctctttgttgtctaatagtttccgacatttgaatctgaaccttaaatctcaaaacaaactgataatgaatggtagatagacaaatggagaaatttcaaaacttaaaatgaaataaacgtttggggtttaaaacttaaataaaggttacaatgattgagaaggagattacaatttcataaacaccattattagtttattacccactggttaatggtcatctcagctaaccaacaaaaataaagaataaagttaatgacaaaataaattaattcaagagtccaaacgttagaacttagcaaactcatgatcctgcccacaagacccatgcactagtggtttctcttgatcatatctctgtcttagcacgcttgctgttgaaaggggacatgctggggctcaaacaagggctcaagctcggactcggactctcctcccttagtgtaccattcaaagccgctaactccttcagctgttccctcttgtagtgatccattgactcgtcctgtagagagagaagaatcaaaaccatgtgaacaaaatagacatgtttggacttttgtgataagaatgtaccatcggcttcaggagtgattccaggaaatgcactgcatgctccaatcgagagtttattatgtcttctggaagctcggcctcgatcagtacatgtagtggctcgcagagatgctcgtaccctggcttaccttttaatttttcctcctgcagggaagtaaagaactaaatggataagctttcacaccgcatggtagattgtcagagaatatataagagtcagaaaaaaatgaatttcaaaactttctctatttacttctgatgatgtaagaacctaaaactttaacagtttatttcttatacaggctgccaaaatttacatatcttcaaatgtaaacaagagtagtagctgctgatgcagtaaaaaatgtatcattacttcaacaataagcttgatatgctaaaagacgtaagcttatacacaaaaggaaaacaaattgctcctaaaggccggaagaaaattgtgcgtattcaaaacatggttataaaactgattaacaggtaaaaacatgacataaagtgaagttttgaactgtaagaataaaacagagacaaaatggaatccttcagagaattaataaacaaggagccataccttgacagtatccttcacagatcctcgtcctctgataaacaccctgcagtgggttgctagctcaactctttttagggagtttccacgtggcccaagaatcctcccaacaaaattatactgcaacgctcaatggatttaaactctagaacaatccaattataataacctatttgggtaaagatttaagacatacgcttggatatttatccactgggacatcaagtctaatcacttttttcacaatgggtgggttagggagtcccggcatcccaatccagcccactggggaaggaccgcgaaatggagaagctctctggaggtgacagttttcctgaagaaagcaaaagcaatcaatatcggtaaagcccactcttgattataaaaattattagtatcaccattacaattcaacatgaatcagttaattgactacaactatcagcagtggcttacctcggcttgcatcatcgaccatccctctaaatcaagctttccatttgtcggctgaccaagcgatctaaatggactgccatgctcatatctatcaagatcaggaaaactagagaccctcctgatttctgcacagacgtcagcaatgttggcagttaagcaaacgtataaaagaaactgtaagagttatacatcaggggcatcttcagtctcttatctttaatgccaataatgaaacaaaaggctcgggttctaataggttagaatgatgaaaacttcaaacacatctttgtcttttaaggttcacacatcccttaagggcatgatggacaactaaaagctaggtaaacaagtctggaaacaagcttctaatcaccatatgcatatttacggacaaataggcttcctagtataaattagttggtgatcatttgcttaacgatcattatcatttgcaaacacatagacttaattcattttcacataacataactcatcaaggatgatcatttagcaataagttgcaattaaaaactgtttctaaatgctaaaagtaacatagactttgattggctatatatatattaagaaggccataacaaagagaataaaaagttgcatgtagatacatttttgttactcaactatccttacccaatttctgtaaacctttaactggaaaaaagccagggtgatgcgcactaaggctttgttcacgtgggaaatttcttaagttcgtgtgcacacactctaaggaaatactaaattcaaaatcacatagcttaataagatagctcaccatgattaagcagtctgcagcaatttggcataacttgcaaaaagggacccaacttttgtctctcttgcaataattcagtcaagtacctgcacaaggttaagaacaaaaaaaacttaagtttcagtggatgttgcgtgtgaatcgagtgggtgacattggaatcagcactcagtcacatgtaaactaagcttctaaaaatacatcagtacgttcatttctaaaacattgataaaatatagctatcttgttaaaatccttaagagtacattgtatagaatccaataataagtgagctaattgtgaaaaaggcgacatgttgaggtgagagagtatgatcgagaatttggatctgtgtaagcagttcatgaaaatacaaacttgacagaatcatttttaaacactgatccaatcaaaggcaacaatacccaccaatcacaaagagacacacttgaagttgtgctaaagcaacaagtccagaagaagaaacgggtccacaacaatcaagctaacacagattcacaaatagcaaaaaggttgagaaagaagagagaaaatagaaacctttcacgatcagagggaggacaaggggatcgattaggagaagcacggaatccagaaagaggatactggaagaaacttccaggagagatcctctcttccatggccacgaaaccagcgccagattccatcatctttaacactgtaaatccacttagaaagtcagattgtgcataaagtagagataaagaaaaacagagaaaaacaagttgtgaccggagatagtgaagaggagaagcggcggaggatctgacgccgatctcaaggatgagaaaggtgtcttgaagtaggtgtggactgtgtagagtggccacagaggaagaagaagaagtaggcaaagtagggagggagtcaaaagccctactcacgatgagagactcctcctctctctctcatctcattttcgatattttctatttttgtgtttagttttttattctctagagattctgtcatcttcttcttaaaaggttctttgcgttttcattattattgggcttcaggtcactaataatgggcctaccttccctcagggacattgtagcctacttccaatccgtgtaaactaaaaaaatgaagatgatggattcgagcccttccgaggcaatataactattctttaatgggcttaattttttttgttttgctttagacaacaaaacacattgggccgggcctggtctacctagtacctttcttatgcatctaattcatttgatcctcaacatgccaaatatttattattttatttatctctacgaactcttgaaaggtcatcatcattcacttgattgcatttgcctatatttttagtgggaacgtagttagtgatgtcccctgagcgatgatgtcacctcagtgatgtaatggatgatttattttacttaaaaattctaaaaagtaaaaacaatggacgaaaacaagaattccgtctatagtgaatcagttagaatatctgaacggtgatttccatgttccactactttaatttattttctataaattataattacattttacaccaaacgcagtttacacacatactgtatatgatagatgcagtcacatatacactaaggaagctagttactcaagccgtgatttatatacaacttggaagcaaagaaataagatgctgcataattcacaacacatttgcgcctacttctatcttcaagatccttgatcgtcttccttgtttgtatcctaaatcttagctattgttcatgtaaatcataattttcattaataggatatttacctattacttagcaacaaaaaaaaacggccgggttaaatggtgtagttggaagttggctactataagaaatggaaaaaataataaaacgcaacttaatgaagattctgccgttttgccaatgagaaataaagaagaaacagcataaatctttgttcccctttttaattctttatcctagggttcccttctttctatgctttctgtttgttagctgttctacacatgtatacttttaatttgcagccaacatgaaacttctcctttgtcagcactcagccttacggaacaacatgtaaccctaaacaaaattctacatgacctaggggatttgaaacatcccaagaaatttcagtatattaggtaaatggtattattctactagaatatatgtagtatttactttatcaaatgtatacataaaaaggttttcattaacaatcacagcccaaaaaaaaaaaaaaaaaaaaaaatccatttcttgggatgtttcaaatcccctaggtcatgtagagttttgtttaggggtacatgttgttccgtaaggctgagtgctgacaaaggagaagtttcatgtttgctgcaaattaaaagtatacatgttgtagtacaactaccaaaaagaaagacctaaaaccaaagaagaaaacggatagaagttcgacattggggaaaaatgtgggtagtagctagtaggtggtggtgagaacaacaatgaggatccagagacaagaaaaaaccaagaaaaaaagaaaagtgaggtctgcttctgctttctctctccgcgcacgtgcgccaaaaacgcttttctacgatcttgtattaactgtttgggattgtgacttttcttcctcctctgtccaatttttggaataatcaaattctgggtccgccactgcatttacgcatgttaactcaagaaagttaatgacaaagttcctaacgacgccttccctccagtaatatcgataaacctaacattaacaatgtacctaaaccctcccaaatcccaatatcatatactataaattaagctcttgctaaacatcttagtaaccattgttccatattacattacaaaacttgtcttctgtccaaacaaaattgtataagagtggaacaaagtctaaccaacttctcttcattgctcacgctcacaactaaaggaaattaaacaacatgaaaaggagtagtagtaataggaagatccaagtgttcatcaatttccggggagaggagctacgctgcagctttgtgagccacctcgttgacgcttttaaaagacatggaatcaacttcttcatagacaaagacgaacaaaaagggaaagacctcaaacatctctttgcaaggatcaagcaatcgaggatggctctcaccatattttccaaaagatacgcagagtcaagctggtgcctggacgagcttgcaaggatcaagaaaagagccgataaatgcaagctacgagtggttcctatcttctttaaagtgaaggcagagtctgttagatatcaaaaggctgagtttggtcgcaacttctggaggttggctaagacttcgagtggagaacaaatcaagaaatggaaggaagctttagagtctgtttctgacaaggtgggcttaacgttaggcgacaaaaggtaccttagcttactcatcatccctaatctaatattgcgacatttttcagttgtcggtttcccttttggttgtcgttaacagaacaaacaaatgggtccagatgtacataaatggctaaagatgtaagagttgaaaacgatgacttggcttatttctttgtagtcgttaacaaaatatgatttcttcactgattcaataactttcacctttgtaataaataacacttcattctgtgaaactattgaggctgaactacttttcaaatactttgcagctccgaggcggatttcataaaggaaattgttggagaggtcaaaaagagtagtcgtcgccgttgaggaaatgggagattgatcctcttacataaacagactaaaatcgttaatgtagccaagctgaccaaatccagctaaagaaacattttatcaatagttttgtttatatctcatttccatttttgtaattattggtttactatatatttcatttcaacataccactagcttacacgatgactttagggtcctatccaagcacaaacagtcggaagttatctgttccggtgatcttttgaagctctatctagctcattgactattgatttgtaagaagccaagtcagctacaatacctatctccggtttctgtatataacgcttcgatgaatttgcatgtctatggtgaccttccaatagagtgttgtatgtgatgtcatctggaacaacccctatattaagcatggcatctagcaacatatcagcattcttcatctgtcccaatttgcatagaccattcagcagaacattatacgtcacaacactaggaacatgcccatcgctctgcatttccttgagcaatttgaaaccggtctgagcatcacctttcttacagaatgcatccatcatcattgtataggttacatcatccggtttaataccagctcgcagcatctctcttaaagctctttcagcatcaatgactcttccttctttgcacattccacaaacaagggctgagaaacccaccctatcgagttctatcccattctgatccatctccttccttatctccaaagctgtttctacatctcctcctctacaaaatccatctataagagttgtgtatgtaattttgtcgggcctcagacctctacgaatcattccatcaactatattccttgcagccaccaaatccccgttcttacaaaagccatttactaaagtattatataaaacaatatcaggctgcagacccttacttaacatcttctgataactttctttcatcaagtcaatctctccattcctactatgaccatgaatcaaagtagtgaaaataacatcatttgggatcaaccctctcttacacatctcatcaaacaggccatgtgctccatccattttgttctctttacacaatgcattaatcaaggcactataggtgaaaacatctgggcgtgttctgcttttctccatctgatgtttgagcctaaacccttcatccaagtttcctactttacaatacccatttatcaaagtgttgaaactaaccactgtaggctgcaaactccttttagtaatttcgtcgaacaccttctgtgcatcagatatattgccttctttacagaatttgttcatcaaaatattgaaaacgtacacattcaagggaaacccagcatccaaaatctccatatagaatccccaaatagtcccagttggattcagcttcatcatccgatcaagcaaattgccacagccacgaattggaacatcaaacctatgcttccgagatagcctaaaacattgaatagcatcgggtatgaaacctagatccgtgtacgtgatcatcaaagcatcaacaaggaaaccacacataggtgttactctcatttctaccaaagaaatgaaaactgaagaagctgagtttttgcctttacgagagacgacgagctcgataagtgactgtgcttcggtgaacatttcgtgaacagcaagaaaacgagccaagacgaagtaagtctcaacggtaaaacgaaatccaggctgagatgagatgaatttgaagaaagcgaagatagaacgttgtgggagggagagagggttatggttgatgagatcaaccacatgatgaacgctgagcgaaggcaggacctttctgatagaggggcagtcagtgaacgaagagaactccaacggcggatccttgtaagaatctctgatggcaactgagagtttaacaagaactgggtcatcgtcgttgtctgccgcggagacagattcttgagagtaccatgttgacaagaggaatgatgcacgagagaatctctgtgggtgagattgagagagtgtgcatcttagaatttcgattctgaacatctctgagactctgactctcaatttctccggaaccggctatttccagtgagtaggcagtgacttttgaatgaaaagtcgggttcttaatgagtaaccggacttctgcgaagctggttcgttttggttagcgtttaattttccggttcaatgcgttattatttcgaattgaatcgaggaagactgtaacagaaaggcacttggcaacatcgactaggttatattgtaagatgctataattagaaggaaaatgtctccttaaataatctcgaaaatttgttcaccaaagaatttgactaatcactaaataaagatgttaaatgtaagtaacagaagagataatgaaaatgatagttataaacgagataaaaagatctgtttcataaaatatctggagattctacagaaattgtagctaagacacatgaagagaaactcaaatacggaagcaacaactgcaaaacactgggaagatagaactaatagcctcccttgagatcgttgacgacatcgtacgggattggagtgacagtctccaaggtcattccttcgaccatgaatcctggtttgggtcctttaggctgtctcttggtgctgatggtctcaccattggctttggctgcagccttgagctcatcattcttcttcttcctcagcttgaactcctcagcacatcttgattgctgcacatgctccacacgcacatgaatcctcttccttatgatcctgttgccaatctgaaacacccccaacatgtgtcagtcataatacccaatataagtagtactagcaaaaagatttgtgttattgtcataggataatccataatccatattacacagtaacatctatagagagacttataaaaacaagatgagtaaaaaaggccaaagtttaacaattaaatagtcatgaaagaaaacacactagcagtttaatgaacacgagttgaagtattgaataactgggaacatatgaacactgcgtgctaaggctaaagactaaacgagaccaaagcaatcaactttcaaatctgaaacaggatcacgaaccacgctactgcataatagaagataacatctttgagctaaaactcaaaatctgagctcaattgtagcatagaagaagatttacattccacaaacctatactcaatcacacatttctacatcaaagcaatagatcaacaatccaaatagcacactaagaagctcaaatcctaattcaatgacacaaaagctgaagagataggagagttcatcagacctgtttgttgacttcaacaccgacggcgcgtttagtgacgttccagatacgaccagtacgaccgtggtagaacttgtgaggcatacccttgtggatcgcaccattcaccttcacatcgacgtaatcgccgaccttgaaggttctcaggtaagtcgagagtggaatgtaacccttcttcctgaatggcctcgcgaacagatccctcgttctcgcccgaactccatgacccgctggcatttttcctcctcgtgcgacaactaaaaccctagatcgccgaagaaatgaaatgaggaaggcagagtgtatttatatctctgttttgagattagggtttcgtaaacggacctgttgggtcagcaagttgggcttctgttttttagaaccagcccacaaataatcaagagtgagggtaatgaaccttctattggacttttgttttttagaaccagcccacaaataatgaagagtgagggtaatggaccttctgttgggtttgtgtttttataaccggcccacaaataatgaagtttgagagtaattttcatttatatgtagatatgaagcttctgttttgcaaccccacattactttattcgaatgactcaatcgaccaccaaattgtaccaatcatattagttttgattttccgctcaaatattacttctcttcaatctgtgaattactactagactagataggaatcacaaaatggctacgtaaccatatagtaactatgacaaactcacaagactccatcttgacactgttatgcgtggcttgcttctgtctccacactcccaaatgctgcctcctttaacccgctcatgcatgaagaagattccagatttggcgttgtctcaattttctctgtctccacactcccaaatgctgcctcctttaacccgttcatgcatgaaggaggttccagatttggcgttgtctcaattttctctgtctccacactcccaaatgctgcctcctttaacccgttcatgcatgaagaaggttccagatttggcgttgtctcaattttctctgtctccacactcccaaatgctgcctcctttaacccgttcatgcatgaaggaggttccagatttggcgttgtctcaattttctctgtctccacactcccaaatgctgcctcctttaacccgttcatgcatgaaggaggttccagatttggcgttgtctcaattttctctgtctccacactcccaaatgctgcctcctttaacccgttcatgcatgaagaaggttccagatttggcgttgtctcaattttctctgactgatcgttttgacaatgatcagtaggttgaggagggatgataatatcttcaggatttttagctactgtgcgttttcctttctgagctttcttcttgaactgagccttcctggctttaagagtcttgacggtttctttaagcgggatagctgcctgtattgtcttcttctcacaaggaagtacagtaagctgagtgttgtagttggcaaggttgtttttagtgtctgactggatcgctaaaagagcagttctcccagcgctaatctcagcatcttttttagttcttgttgcagctcctgtgtactttatgcctccaatctctacagtacatgtgaattgtgtaactctcccaagagtttcgaccttctggcactgatacaatggaatcgcgtaattcatcttttgagcgtattcttgaagtaggttcttgcataatcccgtttcgtgctgcattaataagccattcaaagttagacaagagcaataacttacagaaacagcctaagaatcttccctctagaagttggcaatacacataaatccgataagacagaagacactttattaatgagtggattctttaaactcttgaatctcgatcattgtccaaccaagagcctagacaaatacagaatgccccctaacgtattctcacagctcccctttaaaccttcaactctgaaactaaccatgagcttccctttaaaccttcaacgctcaaactaagcataaggactactgctgagatggcaaagctacaattcgctgctaaacccctaggctaggttcaatagttttgcagtgaacttaacaataatcacgagcgaaataagaaagatgaggtgcttacaacaggttgtgaaacacattggcttagctcactggattttgctaattcccggagagcaacctcggcagctgattgctctgcagccttacgattgaagaatccaggcaaagaattatatctgacaccatccagtatcacagtcgattgaaataaagatttgtgtgaagggccttctttaacgatctcataaacaggcgttgggagcttgtacttctgagcatactcctgcaaccgacttttgaaaacatagcaattggaaacacctgagcaggaaaaaaacttcaaaatgaggcaaaagataaaacagaaacagtgatgatgctatccactacagcataaattgcaaataaactcaaaacgacaacagggaacagcagtgaacgagttctgaataaagctgacgactttcacaaagaaactatacttatccaaaaggggagagacagttttaaaccaagcttctatgttccctaacaaattgagtcaataaatcatcatctcaaaagagtaaacttgccaattgccagagagatctacgcttaaacccacaagggacagatacacttgtaaattctaactaatcaaaacactgcaatccaatttccaagaagaaagaagtgagtaaagaacagaagaaaggggaaaaagcatgatctggtttcaaaattaaaacccggaaaaaacaacccatgaatgttgaattagagataatgcagacatgatggtgaagaagaagaagaagaagaagaagtaattcaccagaggaaacatcagtggaggtcattttcacgagcagaatgtagctgaagagacgaataataggttagtagggcacggcgaagagcaagaaagaaacgtgctgctgctgcgaagaagcagagagagagagatgattcttcttcaccaaaaaccctctcccctcgacttcctcctctttactgatttttatttttgtttttttttcacaagggcaaacgaaagaaggtggttcttaattgttatgttacaaatgttaatattgaatttaatttcaaacctttataaattatattatattccataaatttacctttttggtcaaattttccataaatataatttacttgtgaatattatatgaaagcaaaatgtttttatctttgaaatatttaatttaattaaaaaactaattacatatagcctaatttcgtatttcatatgtagttaactaatgtatatatccacaattgattaacctttttatggctaactttattcactagtaatccctttgttatattcacacagtttttgtattcacaaataattaatttgttctccaagtaaacatcaataatgataataaccgtttaataaaaaataaaaacaatttgagcccatatttgagcccacttgagcctatgtcccttaacagaaaagaaaaatatttgagcccatatttgagcccacttgatcctatatccctttaccagaaaagaaaaatatttgagcccatacttttcgcttctgataagcgtagaataataatagtcgaatttaccaccttccttttcgttccttttttttcttctctcttccgaaacacctctgccacgcgagtactctccacgctcttcgacagtcgtgaccatcttcttctccgatcgtcttcaccggttttcttgggcattccctcgtgcgtaagtctctgtcgtttcgtttcgtctataactccctcgggttttggtgaaatttgattcctttgtcctgttctctgcagaattgttgcaataaatacgacgaagatggttgctaataataatactagtagcaatcgcaggaagagaatcattactgaaggcgacatcgccactcttttgctgaggtaaaaatatctcctttttttgttttctctttccgaaaacgttagtggatttgggtttagtcagtgtggccggggtttttgatttattgacgcagatatgatatggagacgatactgagaatgctacaggagatatcttattgttccgaaaccaagatggactggaatgcgttggtgaagaagaccactaccggaattactaatgctagagagtaccagttgctatggcgtcatctttcttatcggcatcctctcctccctgtggaagatgatgctctacctctggtacttattctgtctctcctctttccacttttgatgaattgtaaaagactcaagtttatgttgtagagttagttagttttcttcaataaaaactcactactactttgtgttatcagtatcatctagaagtgagtgtgatgaaatactagtttatgttctatgtggcagtggatactaaaacttcttggtagcattagggatcgatgagtgtctctcgctggtgtagtttacagattttttaaacgaaagttgcctgtgcaggacgacgatagtgacatggagtgcgaattggaagcttctcctgcagtcagccatgaagcatcagtggaggctattgcacatgtcaaagtaagaacggaatcatagatttcattcccttgacagaatttcagaatctgaagtccctaggctctattcaggataacaccttgctgttttcttaatgattagtgtgttggttacttgttctgcatatcaatctgtgcttatccagagttcccattttatccaaatatcattaagttttcgtttctcttgtattcccaggtgatggctgcttcatatgttctaagtgagtctgatatactcgacgattcaacagttgaggctcccttgactataaacataccttatgctttgcctgagggttctcaggaaccatcagagtctccttggtcgtcaagagggatgaatatcaactttccggtctgtcttcagaaagttacatctaccgaggggatgaatggaaatggttcagctggtattagcatggcttttcggaggaaaaggaaaagatggtctgctgaggaggatgaggagctgttcgccgctgtaaagcgatgtggtgaagggaactgggctcatattgttaagggagactttagaggagagagaaccgcctcccaactctcgcaggttgtgatttctcttattcaatattgactgctcttttttcattagtttctttgaagtcattttgtagtgtatcttatagtcttgttctttgtattacaacctgtttatgcatcattatctatattctgttgacgatgaatggtggatattaccttccctctttcgtgttgttggaggtggtggctctttacagacgaagtaccactttggtaattactctagaaatatatctgttgtcatctagtctggtatggacgtggggtttttccccatttttccgggttcgaatcccggcaacagattctttggatgatatgagtaatagtcttttggcaatcatagaaggtagctaataagactaataagactaagttttatgatatttgtatccatctttgtattttttacgcatatactttccatctgataaaacttaacaatactttagctacttggacgagcatgggacattttgcaattgcttactctttttccgttattggtggtaacaactgactattttctttgtagaggtgggcgcttataagaaaaaggtgtcacacttcgacctctgttagccaatgtggcctacaaggaactgaagcgaaactagcagttaaccatgcattatctttagctctgggaaatcggcccccttcaaataagcttgcaataggtacaagtagcagaagatccttccctgctaattctagtatttatgttataacagaggatgctttggtttggttaccactggcttgtctaaatcagaaattagcttacctgtttaactgcggtggggtttgtggttataatatttgggtaattttctttgtttatttggttcatcaattagactgcattttatgcaggtcttatgccaacgacgtcatcttgtaccatcacagaaacggaagcgaatgggggaagttcttctcaaggtcaacaacagtccaaaccaattgttcaagcattgcctcgggcaggaacatcacttccggctgcaaagtctcgagttgttaaaaaaacaacagcaagctccacttccagatcggatcttatggtaacagctaattcagtagctgcagctgcatgcatgggtgatgtattgactgctgcatcaggacgaaaggtcgaacctggaaaaactgatgctccacgagtgccaaagactaaacctgtaaaacatgcttctacagtctgcatgcctcagccctcaggtagcctctccatgccaaaggttgaaccaggaacgagtgttgccgcctctatacggtctctagctaatggaaaattgaaacctgttatggcttcatcatcttccaacaaacctcctctcatagctcctcgttcagaaggatcttcaatgctttctgcttccgcccccttggcttctctatcaaggattgtctccaatcagagagtttttgcaggctctgtcccagctactgagattgtcacttgcaaaccagatggtggacagaaagggcaagctcgtggaaatgaagcaagctcatcggctgcaatccagccacatcaaataacctcaagaaacttggagattagccagggaaagcaggctacacaggctcagtcccctaatctcttgcctaggaaagttccagtagttcggactgcagttcattgtgccactaaccaaaagttgatggataaaccatctgatcaaactgtagtacctatcagaggagctggttcgcaatctaaagccaaaggtgaagtaaacagtaaggttggtccggtgatcaaagtgagtagtgtttgcggaaaaccccttgaggttgcaactgtggcagggaccggacagggtgtttagttctttgacaaaatcgttggatactctgttttggagctttcatttgtagtttttattagactgaaagaaagatatgatgtaaaggaagccattcagtacattggtactaattaataagaatctcatatacttacaatcttcaaactctacagcatatagttagatttgaatctcaggactattaaagttaagggagatcacttcttcagcttcttttgacatattcagggagctttgcaggtgggataatgtaactacactgtttgttcagagctggagatggactgacacaagagaagattgttgaggtttgcttcggttgttgtttatacttctttaacttgacaccaaacaagaatgaccttagtggaatcctaggctttccagctgatgatggcattctcttgctcagagatcttgtagccgtcccatccaaaatcccaagattctcttctagtttgcatacaactctttccacttcagctctcagtgctcttgcacgatcaaggcctgcttgaagttcgttgaacacccttttgttctcctgtttcatgttaagtatctcaccatggaactttgcagcctggtaacctcttatctctgtattgcttacttcagttgcacccgattgagacgtgacccttgaaacttcatctttgatattgcaaagtgttgcatacctaccctcaagttcgtctctcagaattgcactgttctctagccataactgcagctctgtccgaatctctctaaggtgtctatatataggctttgcctctgatgcaagtgcagtgttactactgctcccagcattaccttgttgcttgctttcaattttcgatagctctgctttcaggtcttgaactgatgtgtggtacttctgtatctgatgaacagatgtgctaaatcttaaccagaattcaatattctcttccagcaccgcatcaatatctccacgcactttttcttccacagttggaattttctttcttaggctgtcactaatgcctgcaaatttcaccttaaacccgtcttccttttcttgttcagatgctctcttcaagtctcctctttgaggaagtggtggcatggagaatgaagagttagagctatgagagatgctcacactttcagcccggtttctttctactggatgaggaaaaccctggccgggcaattctggtttctggtgtaagaaatgaaaatccacgtcttcgcaagaaacagcattcttgagctctcgcaactgcaatgccagctcaaagaagccatcacggttcttcttctcaacttcactcaactttctcttcacttctctatagtctcttagtactgatgagtattcatccaatagaaccttctctctatcctccatgccatctgcgggtaacaactgcctccagtttctcctctcctcatcttccgcctctgtaccaaagcaagtgctttctgtttctgataaaccaccacaagagtctcttgtctctgatttctcttcctgcatcgactcttgatctctgctctgtttgattaccatggcctctttaatttcctctgcattctttatctctctctcgtttgatattgaatccgaatcctcaacagtatcctcctcctggatgtcctctgggttaagtccatcaccttcgacatcttcatccattttcacttcctgtaacttccctgataagtccttagctgtactattagcttcagtcaagtgcttgtgaagattcttgttctggtcttccactctttggaacaggtttttaacttttcttagctcatcttcaaggaccgttatccttttcttcatgtccatggagtctgatacaagacatgccttgtctttctctacatcacggatatggtcctgtaactcatttgtctctgatcttaatgtctttaacaaagccgtatgagacaaagctgttgtttccagagaaaccactttctctacaagctcatctatcttctctgcaaagtcaacattactcaagttctcattcaaatcaatctgtctcgattctttcacagattcataactcgattcttgaccatgaaaagctttcttggcttgttcttctaccttaatctcaaactttttcttcagtgcttcacacctttctgttgcagtatcaatcctttccttctcaattccggcgtcttcagaaaatcgcttctgcgtctcctcaagcttagcaattgtctctttacaagagcttagagcagcggttgccaccagcgtcctagcttcaccatcttcgatctctccaccaaccccaaactcatcttgtaaactgcaaactctcttctgcatttcttcaacttcattctccaaattccaatacctatcataggactgctcataagaacttctcacaaactccttctcagtctgcagcaccaagatccccttatggatcttatcgatctcctccaatgcctcttctctactcaatccggaactcaccaatgcagaagatgtttccgaactttgcaaaacaccaggttcctttctcgacaacaccatcagagattggctcttgaactctttcttgggaacctcagggacttgtggtatgttagttccactgggaatgagatgaagatgcttaggtggtttcttgggattatcatcatcatcatcgtcatcatcatcaacaagaggaaatggaacatgttcagggaaagcggtagcgatcatatgattggcactttgaagttctgtggacaaatgatcatagcgttctgctaaagcacggtatgaacgaaatgcttcttccacgaaattgacaatctctggccttttacggtaatacatctccgctcttttagcaaaactgtctccatctccatcaatgatcttaagtgtgtactttaccttctcctccatatctaggaaagttgaaaaattcagaacattgcattgaagaatatgaacattgttacgtgaaaacatgaaagaacatcgtaccttggagattgtgttcgagccatttggattgttttgtgcgtatgtggctggcccaccaccatgaatacgcattgctcgctgctctctgcaacatcagagtttcttctttatgatatgcatcctcctttttcttttgttatttccttctctgttctcatgttaaatctttcttttttataagattctcaagacttttaagtttcttccttgtgggatttaactagaacacccaaatttagaagatggtaatattgttttcttttgttaatttaaaatggtaagatgtttcactgtaaatgactatataagacttggcagtttaactggtttgtaacagaagaaaaaaatggccgataattacattgcattattgttacagaatacgtcagtatccaccgatgtcctcaagaaaaagaataaaacatacacgtatgaaactaatttggattcagctgttcaacagataacaacaggtttattcacattcgagttttgatagttttcaaacaggggaaaacagcccgggccaagatattcgaccataatatatatgtaaaaaattactcggaagaacctcaaataaaaaccacaaaatgggctatatattcatcaaccctcttaagttaacgtatcgaaattttacataaaaaacgatgaaagacgttattctttcctttttcttcgtaaaatactcctacaacgttataaacacttcctaaaggtggtttgatataaaccctctaagtcgtctaaccatccaagacccaacacaaaacccgtggtgtgttgatatagcccacacaatctctatttctccatctcctcagcttcgccagtgggagatgatagcctcggccgttttgcagctcgcttctcatcttcttcttccattggctccttttgatcacaatcatctccaacatcttcactcgtcttgtccccaatttcaagatcatgctccaatggcttctcctcatctctgtcattctgactcgatggaacaacaagctcaatgtgtgtagaaacgggctcttcattctcagtggtatggtcagcagtgttagaacccacggttgcagattttaaagagacggtctctcttggaggactctcgtcgatttcttcttcatgagtattttctattgggttgtcttctatgataccgattgaatcattagaactattcgaagtttcagataacaaatcagtctcgtcttccttctgcaccaggggaataccaaggttccatgaagagaatgaattagatgctctcggagaggtagtttccgtgatgcattgaaagttgccctctccagcgttcaaacacataaactgttcaccagtttccatgtccacttgctatccaaaacagagcatatataagaaaattaaaattggcgtgtcaaaaataaaaagattttgtcattagcttgcggaacttttagtacctctcttgccgacgagtcgttactaagatgataaaacgaagacggatcctcgaatggttgttgtagttgttcaagtaatgatcctgtgttattggatcctgaatcgaataaatctcttagtaccatacccgaatcattagcagcttgtatgtgcctcatggaagatctttcaagcaaagtcatttcgattccttgatcgtcttgcgtctgtgtcatatccccgttacagtctattagggggctgcatctctcagagagaacctcaatgcccatatcgtcattgacggcaactggactttcacaggactggttttgttcattactaacttcccgtgaccggttttcaaggagttcaaatattaacttctgaatcagagtacgcttcaatgatgcctcggcaggaggaaaccagttcagataaagctgagaaaatcagagaaaaagcattatcagcaaatgaagatactgaaaaaaatacagacccagcagctcttagaggcatttcaacttctttcaaacggactcatgaaatcaggaagctcgcaaaagattctattttgactggtctgcaaagagaccacttctacagtaagcaaaaaaaaaaacagaatacacaactggagacaccaagaaatctaaatatcctagcaagcatctgcgaaatcattgcgggtgaaaaagattcagtttggcaagcttattaaagtagcaattagaatagacttacaaagttggaagcattatatatcttgaaaggactaaaattaaggggagcttcagcaagaaatagctccagatagtgcagcagaaagaggccacagtcaaatgagttttcctgctgtggcaactgaaatagaaagagcaaacttgccatcacataaactatcattaacagctgcaaaaaatatctatcatttagcaggaaaattgttgaagttaaaaatatagtaaagctacaaggttacaaatgataaaggcaatggacgcttgcatatggcagatgaaaggcgaaacatcaattgctagctatcaagatttatccatcaatgacagaggttaccaagtcgtttgaagcgatttcagatcacgtttctataatgtaaacacatgcaaatgtagactgcttttaatattgcaacaaatgcttctgtcaacgtagtagtaaattcatggagggcagctactttaatttcgtagtggtagtaaattgccttaaagatcaacaagaaaatacccacgagtctatctttccattaaaagaactaaaagagtaacagagcttggttagataagaatatagtttgctaatttaacatacgaaatcatatcatataaaccaaggaaatccttcaataacaaaaagggggatttcacaatagtgaaaaaagtcttcaggagtttctcatactcctcattatctgccctggaaatagtaaaaagattttcaagcatagaccgcacctcaagtgagacaaaccgcaaattcatgaatctggaagaaatatcatccgatgtctctttatgcctctccttccactcctcgcacaagtaactaaatcagaaaaaatgttgttgtcagaaaattgcactacccagcttaaaacttgaaccacacttaatttgaaaggatcagaatatggagctagaacattttcttcagaaaataagataaagagagcatgaggaaaacataatatcagctcgttggcaagtgagaaacgtaaatagatgacggatatgcaatgcaaaatgagaatagacaggttagaagacaaaaccaaatagggttgtaaagagctgacatacgtttggactagatttttaagccctgcatggctcccttttatagaatccatatgtaatatgcacggtactttttttgagtcatccaagtctagatctgtagaatgatacaacataaataataagaaactggatgatcatgacttagtaaaaaatgaagtgaaatgtgacattacctgtacgattagccacttcaccagggtggcatatgactattaaactccagtgaaggctgttataagaatttagcaatgtcagatttcgaactcatataattataacaaaaagagaactgccacagtttttcgtacttgtagttcacaggcacaaaaatgtagtcctttccaaacatgtccactttccttgtccactttcggacacgtagaaaagcagcctttccatcagctatacttgatggatctttgtcaagatcagcgagtttccggaagaaaaagctgttaaagaaatggaatctatgtttttcctccgtttgaatctgattcttcaaataactgtaaataacagaaaaatacaccaaaaaaggttaaataaggtacattaagtttatagtatgactgcaagcattgcactagtaaaattgtgagaaatagttcacatcaaaacagcaaacccaaaaatagttcacagcaacacatgccagagtatacgcattgcaagaaattaactttaagaactcacttaatatagaagtcaatgattgtgtcatttacaaatgtctctggctgcaagagctcaacatctcttttgcaaatggaaacagcatctgggtcaccctttggatagacaacatcctcaaaaggttcatcaaagctgaaaagacaacataaaactagcaactcaatatgaaatgtcacctctcaaagagccataaagtacaagtaatgatgtactttggtacatgtactcccgaagtaaaacagaagacaacatcttaatagacaaaatacatctcctatagagcagtttttaccttggaaaataacgcttctgttgattcaagttataccctgatacttccacgtcatccctacaataaacaaacaggacgaattgcaacaaaaagtcacaatagtgcctaaaatgtaaccaaaactaaatatgaacccagtgttagttttcttaggatttggtccagttttccctcaagaagtcaaaattatttccattcatatgcagattgcttttcacttaatgctttgtctattttttaagctttaaaggcttacagtcgaatttccttattaagtttatattctcatagtgttctaaccaaatgaatcatactcataatgtagttcacaatttcccagatatcagacatccagcaaagaatatttttccttataagagcatgcaaatacatcttctaaatgaaaatgggcagaaaaaaaagtaatttttagttagcacttcataataatataagcttactcgaggtcagtattccacacagccgggtatttcacatgcagcgagtttatcttttgttgcttattaggccaattatgttcttttaccgcaatctttaactcctccatgtctggaaaccacatgaagcaatataaaaagttagaagagggaacctctatgttggaaagagtagatgcttaaaaagacagactcttcgttttgcagaaatgaaattcaataagacatctctctcttaaaactcttagccatcattaaacatgaacatacatgaagcggcaattagaaagacactatctgttcggcaaacaagcgaaatcgctaatatagatccatttaaagaattgcatgtaaagaagaattaaatatatctcactaggatatcagttcactttatattctcctttctatttaccatttttctactaaattaaaccaaaatcgaatgaaagcatgttctcgtagaatcaatagataacaaccgacaatgaaaaaaccacagtatcaggtgtctaagatgactaaccaaaaatcgtaatggtacttacaactaacaagtccgctttttacaggaagaattttatgataacctaaatggcaggtatacataccttcatggcaattttcatccttcagtagaactcgaattctgagaatgatcaatccaacctacaaaattgaccagcaaatattgtcagagtgatagaacctatgcccataaagtatccttcaaaataaaaaagtcgacataatgaataactcacattttggtaccaattgtattgaatactaactatgtcttcaactccaaattcacaagaaaatggcacttcttcattatttgcgaggaaactctttattttgatgccattgcatgaaaagattactagggatgcagcacaatgcatatccttaagtataacatactccgaagtcattataacagcggtgcttaagtcaatctgcgaagtggaaaactggaaatcattatctttttgcaaaaaagaatcattaatatcttttggcaaccacatcgttgccaaacaaattctggcagtagttttttaagccattggttaagaaactagaaaactcgttaccttttcctcatcgttgaagcaatgttcagtcatccaatctttcagcgcatataacattgaaatcaagacacggtcagacataggagatccaagcatatctataaggaaatatagagagaaggtgtagcatgtaccttcttcatcatcttctgaatcagaagcttcactcaacgcagatcgatcactcaagctttcatcaatagctgacatcatatcaatttgctcctcctgcaaatgtgaaggggttaaaaatgcaaggtaaaacttataaagtctttagcatacattaaaaacaagatagattaacatacactggatgaagaatctgaaaagggtgagtttagctggcgttgactataagatgaagtttcagcgtaaaaactatttccgcctagctggcaagagaaactctccactctatgatccacatctgtttcttctatgtcgtcttcgctattcaaaccaaacatcaatccatggttatcgtgatctatatctgtttcctttgccaggtcttcagtttttaaacctaacatcaatccctgattaacgtgctctgcatctgtttcttctaaatggtcagtggtttccaaaccaaatgtgagaatcgttctggactccttagcttctgttaccaaagtcgaatcatcttcacattgatgatcgtcagactctacagcagtagcaggctctgcacaacttggaccttccatttcttcttcctcaacacgtttttcattgcagactggcaacaattaaccatttccataagaactcactcatatatgataaaaattatttgcttctgaacaatatagtacaaatcattatagtgcctcccataaaattgtagtatcacaacagcattagtatcattatttctcacatactgcagaaacaaagcaatgttcattcaactatatacaagagtctggaaaactaaaataaacagaagaattccaaggttagcttaacttctctccgtttacaaatatctcaaccccaaaattatttttccacaactgaaactgaagcgagaatttaaatcagcatttgaagtttagagatgaatcagagtaataacttacagctttggatgcgttggcgttgcagaaccggagaattgcaaggactagggtttgtgaatttttccaataactttccagctgcagactcagcgagctcgtcctcttctttgaaatcgaatacttcaaagtttttcttcatcgctagggaaatctgaggaaaagccccaccggaaaacggagaatccaagccggagatcggcgatcagaaatcgagggggtcgagtgagggagaaggagagagagaaacgtctaaacgaaataagtcaacaacgaatgccagcgcgtctgaaactcacgcgcggacgtaagtttactctatttataatagtacgtaaataatttaatattttcattacataattcggctatggaatgacaggtatacccttttgtaagccgcgaatttaaaaatgggagacgtgaaagccatcgtcctcttgaactttccaagagttgaagaaaatcacagaaagccttagcacagagaagagagattgaagaagtcatggatgtttcaggaagcttgaattgcgttgttgtggcggtagatggaagcgaggtgagtatggaagctctgaggtgggctctagacaacctcaagctctcttcgtcttcttccgattcatcattcgtcgtgctccacgtccagccgtcgccttctgtagccgccggcgtgagtcccggcaccatacctttcggtggtcccagttgagtctcgttactactaattttgtgattgtttaatgtatatatgatctcgaccatgtggtgtttgactctgggaattttgcgattaaggtggtcttgaggttcctgctttcactgctgcaatcgagcaacaccagaagcggatcaccgacaccatcctcgaacacgctagtcaaatttgtgctgaaaaatctgtgagtagagttatttcccttgtgtcccctgtgagaatgggatattttacctcatagtccagatctagtagtgtaattctataagttttatggattagaatatttctctttcactgatggattagaatctggagcaattacttatgtgttatctatagaagtgtatattgatttgagggtggtcattcatgaccaagttgtgatggtttactctcaggtgaatgtgaaaacacaagtggttattggggatcccaagtataaaatctgcgaagctgtagagaatttgcatgctgatcttcttgtcatgggctcccgggcttatggccgcattaagaggtaccaaactcttcttccagtactctagtatcttgctatgttgaacactgatgaaagcgctgtaaatcaaattccaggcgtttgatcttggttactatgctgaattagttgttccatatcggtttactctagtttaagattgtttcgctttcgcttgaaatggcatatagatatctactgttatttttttcaactcgtgcggtcaaataacagaagaaatgtttagttaatctttgaacttgtgtgaagacaaatctctgctcaaccaccaagtagtgcttcgaggaatctttatccctttgaaaatgtttataccatatcactgtcactgtgtgttctttagtgagttaaatcttatttagtgagcaaatgccagtgttgaatccagtttgttctttctttcaacagaatgtttctgggaagtgtaagcaactactgcaccaaccacgcccattgtcctgttgtgataatcaaaccaaaagaggattcttctgcataaagaggtaaacaagtttagcttcttgcaagtcacttcattcgatgttcaccatgcaaaagtttgttaagtcatcaatcagaacccacatgatctacttttcatatccaaaccaacctcaataaagtttactactctcttttggtacaagtagcctatgtaaccgagtatcaaaccatcttcacttctcaggatatatatgtacatatgcaaagggatatcaagaccatctgtaatcttttgaagttttgtgaagctatagaagccaagcaagaattctaccagattacttcccaaataagtggtgtgaatgtaaattaataagagctacagaaacattgattggctcagtgtatgtgttgtattcatattcgttgttttattttatacggttgagaattgaataatgttgttgcatcaaatcactatgaaggacatttacagagccaactggttgacaatgtgggctaactcaccctcgttgatatgttaattggaccgcaggcatggataagtagttgagagaaacaaagaattcgtgtaagaaaaatctgaaccgatcaatcaagcctcgcctaaaggtccaagattttcttgggacttttggcctgcccttagtgatcatttttccatattatgggccaaaaaaaaaaaattgcaatatctgctacacttaaatctttgaaacaaaacttatccaaattgcttggaatttagttggatgtagatgtaaatgtatattctactgtagcgacaaaaggtaaaagaaagattatgacaattttcaggatataaatattatgacaattgtagatgtaagtatttcagaggtctcgtgaacgaacaatgagagtaaatgacgaaagaggcatcgtcggtttgtcactgtcaacacgataagggaggctcacgagtcacggacttaaaaatattaaacactgttctttttcattagagcaccaagatttttatcttagcattgtaccaagataagtgttaaaatttaacatcaagaccctacaaaatttaaattgcgaatcttgagaaacaagacgtattatgaaatgtatagttcacttgtcccaacccaaaaataaaagaaagaagaaaccaaataacagactgttatagtttgtcctggttttggcagcacaattatttggttttgttttttttaatcactatccaaatcacacttcacttcacatgcaatattcctttaagctcttgaccgattcactggctacttcacaccacactccatgtcccctcgtgacttctctcaactctcaaaacttacctcagcataggaaatgtattcaagattttactatcccccctcaatcgaaataacaacatttattcaaaacaaaacaaaaattatcagcaagctaattaggtgttaaaactataatgaaatcagcggatatagtgaaccaagtcagaccatttttgagaaaattacgaaagaaaaatattataccattttatctcacacacatgcgaagaagatgtgtagacaatagaaaaaaaaagtttacggagtagtagtactattgccagatagaccggaccggatcccaccaattataaatcgaattcgagggacattttcgcattttcaatacctcgctggccatatataaaggccacatcacactcgaagaacattatctaaatatctctacacaatcacattagccaaaaccatggcctcctcaagtctccatttcttcttcttcttgacacttctcttgccattcactttcaccaccgccacacgtgacacatgtgcgaccgccgctcccgatggttccgacgacctctcaatcatccccattaacgccaaatgctcacctttcgcacccactcacgtctctgcctccgtgatagacacggtccttcacatggcctcctcagactcccatcgactcacctacctctcaagcctcgtcgccggcaaaccaaaacccacctccgtccccgtcgcctccggtaatcagctccacatcggaaactacgtggtccgagccaaactcggcactcctccacagctaatgttcatggtcctagacacaagtaacgacgccgtttggctcccttgctccggctgctccggttgttccaacgcctcaacttctttcaatacaaactcctcatccacttactcaaccgtctcttgctccaccgcacaatgcacccaagcacgtggcctcacgtgcccatcctcctcaccacaaccgtccgtctgctccttcaaccaatcctacggcggagattcatccttctctgccagtctcgtccaagacacgctaacgttagcccctgacgtcatcccaaatttctccttcggctgcatcaactccgcctcaggcaattctctaccaccgcaaggactaatgggcctaggacgcgggcctatgtcattggtctctcaaactacgtcgctttactcaggagtgttctcatactgcctccctagcttcaggtccttctacttctccgggtcgttgaaactgggtctcttgggtcaacccaaatccatcagatacactccactcctccgtaaccctcgccgtccatcactttactatgtgaatctcaccggagtgagtgtcggttccgtccaggtacccgttgacccagtgtatttgacgtttgacgcaaattccggcgccggtacgatcatcgattccggtactgttatcacccgttttgctcaacccgtgtacgaagccattagagacgagtttaggaagcaggtaatttcgttaatatcacaattagtataactcaagaaatgggaaactaattacaatcttgttaatgaaggtgaatgtgtcgtcattctcaacattgggagcgtttgacacgtgtttctcagcggataacgagaatgtggcgccaaagataacgctgcacatgacgtcactcgacttgaagctgccgatggagaatacgcttatccacagcagcgcgggaacgctgacgtgtctatccatggccgggatacggcagaacgcaaacgctgttctaaacgtgatcgcgaatctccaacagcagaacttaaggatcttgtttgacgttcctaattctcgcataggaattgctcctgagccctgcaactaagagaggacatatgaatgatctctctctccctctctttttattttacgttcttcgtacgttttgatttgaagaggtgcttaatggcgcttgaccttctacatatactttgtatgaacggctatcttcactacgcataacatggcctgcagtttcatctcttgcttcagcgatgtgatttcttttctaaattagtttctcggtaattgatgatattgagtgacaagatacaaaatactaagaagaaattctaatgcgaaaagagcataagcaaattctgtgtgcaccctcgctctccatgccaatgcagagacttaaaaagactacaatcctctttggcattctttttaagggttcaaaacagatgcctcgagcagtaaatagtttacaggttccaactgttgcgcatgagttcctaaggaagtgacagaaaccgtacaggattgccagagaaaacaattgctgtgagcattctggagcagtagctacaacgattggaggggcaacagtcacgctttctattcctgtaaagacaatatgcaagagatttgtcggtcacactgaatttagctatccagatttcttgaacaaggagcaaaattaaaaagataagcaaatacctccatgggagcagagtcatttgtggccggatcaggaattatcaggccagcaggaacctgtccaaacttcaaagcctatatatccacaagccaaaaaaaaagaagactgtcaaaatcaatcaaaaacaacatcatcaggcacaaatttgatattcaaaagaaaaagcaagggacctgttcgagtctggcaatttcttctatcgtctgagaattgataattgcagcctggaacatcatggaaatgaaatacagaaattactatcaaccacacagcgttgacctacttattataaagacaacaaaacagtgaatatgtttggtcctatataatttccagtttcgcaccttgatagctaatatttgctccgctgttggcgccaccactttcggagtctctggattttctgcagtttctgacacttttttaacctcctcccgagaaacctttttaacttcctcttctgcttctttggatgaaaacaaagatgcagcttcagctctctcctgttaggaaccaataatgtcaggtaaaaggtcttgctataaccattgtaaaatttagatatacaacagtgggctaaaggataaagccaaactattatccgatccaaggctacaaggttataacacgaggaaattaaataaaaacaccacaccctacatcaagtctggtttatatttatgccctaaatacaaaaaactttaagataatcaggcaaccaagtcatcaagacccaaactatatatactttaagcaaacccttttagctaaatgttgttaatattagtgaaatttcttatttcagcatacagatataactgtgcacaagaatcttaaacaacgtaagacaaaaggcagaccaatttcttgctctcagatattctatttttcagatgatattaaggttagctcccggtgacttgtagcatataaaataacattaagttggcatctagggtaagcaaaaatgaacagttgataaagcatatgataaggtccttaccttggctttgattttaatgaaatccagtactcgaagtgattttagcttgtgaatcacataaaggcgataatttgcctttttggtgatattattatccaacaaactaaggtactgcagcttgggaatggaggcaaggggatcaatctcaaccaaattcacaagcctgttatttgtaagaaccaaagagtgaagcttcggtaggaattctgcagatgtacaaccatacgataaatacaacacaggtaaccaacaaagcaaacaatgtgtttgaattgacatttcttacaacacacagatagatgttacctccaaggttaggatttatccgggtgatacgattgttattgatgagtaaagttcctaaacggttgaggtatgggaagttttctagcttaactatctcgttatcagacagatcaatggtatcgaactggtcctgtaagcaaaccaagacaagttaattagagaacctcaaacctgcaaataatctacctaagccaaacacaaaatttatgggaggcctttcttagagaagactggctctcaaaagtaaagaatccacagtaagaaaaaggtactattacacgaagccacatatactcctaaagagctagaaaacagatactaactaagacaaaggagcaatagctacttcaacaatgtttctgtcaatgattttcaaaatacttgaatgccgaaacccaacaggcagacttaagaacatacaatacaaccgcatcaacaaattcttcagctaacagacaaagaggaaacgaaaatcgatagaaaaaagaaatacctcagtagcacccaagttttcgattacaggaatcttgttacctgcaacaaattaacccagaaaaacgaacgattaaccagagcaggtgcgtttagggttacaaaaccctagaaaatgtaatgggaaagagaagaagtgtacctcgtagatccaattctcgctccttgatagcattgaagaagtgaggacttttccagatcaaatcagccgtgagcttcaccattattctactagggttttactgcttcgtcgagctctgtcgctgctaagcattcagaggaaagagacaacaacagtggctagagatgacataaaaacgcagcaaaatgacctttgctattaatttatcacttaaataaacggcccattgaattggcccagtcggttaggcccataagtgtatcccgatatttatgattttggaaattaaaaagaaaaaacaaataaaaagaaaaggactagtgaacgattgaatcttttcttcttcgttggttccaaccctaatctagggttactctctctctcgcttccttctgttcttcgttcttaccgagttccacgagcattagcttcagagaccttgaattggagtgcggttggatcaaaaacagttgagcgaagatgaggattatgattaagggaggtgtttggaagaacaccgaagatgagattctcaaagccgccgtgatgaagtatggtaagaaccaatgggctcggatctcgtctcttctcgttcgtaagtctgctaaacagtgtaaagctcgctggtacgagtggctcgatccatctatcaaaaaggtaagtcgtgttcgcgttttccttctcttaactagtagtgttcgaaaaaaaactatggatctggcgaacatttttttgtttggggatttggccttttaggtagtttgttagcttgttactaggtgctttagttgtatatatgtattgatttgcatctggaaattcatagaaagtgtaggcagtaatgctaggagttttggagtattcgaaggttttcttatgtttttgaattacaactgagtttaattttgtgatgttaatgtagactgaatggaccagagaagaagatgagaagcttctacatcttgctaaacttctgcctactcaatggagaactattgctcctattgtgggtcgtacaccatctcaatgtcttgagaggtatgagaagctccttgatgcagcatgcactaaggatgaaaattatgatgcagcggatgatccacgaaaattacgtcctggtgagattgatccgaacccagaagcaaagcctgctcgtcctgatccggtagacatggacgaagatgagaaagaaatgctttctgaagcaagagctagattggctaacacgaggggaaagaaggctaaaagaaaagctagagaaaaacaacttgaggaagctagaaggcttgcttctctgcaaaaaagaagagaactaaaagcagctgggattgatggaaggcataggaaaagaaagagaaagggaatcgactataatgcagaaattccttttgaaaagagggcacctgcgggattttatgatactgcggatgaagatcgtcctgctgatcaagtaaaatttccaactaccattgaagaacttgaaggaaaaagaagagctgatgtagaagcacatttacgcaaacaagatgttgcaaggaataaaattgctcagagacaggatgctccagcagctatattgcaagcaaacaagctgaatgatccggaagttgttaggaagaggtcaaagctgatgttaccaccaccgcagatttcagaccacgagctagaagaaattgctaagatgggctatgccagtgaccttcttgccgagaatgaggagctaacagaaggcagtgctgctactcgtgcacttttggcaaattactcacaaacaccaaggcaaggaatgacacccatgaggacacctcaaagaactcctgctggtaaaggtgatgctattatgatggaagcagaaaacctggccagattaagagactctcagacacctttgctaggaggagaaaatcctgagttgcacccttctgacttcactggggtcactccgagaaagaaggagattcaaacgcctaatccaatgttgaccccttcaatgactcctggtggtgctggtcttactccaagaattggcttgacgccatcaagggatgggtcttctttttctatgacacccaaagggactcccttcagggatgaacttcacattaacgaagacatggacatgcacgaaagtgcaaaacttgagaggcagagacgagaggaagctagaaggagtttacgctctggtttgactgggcttcctcagccaaagaacgagtaccaaatagttgcacaacctcctcctgaggaaagtgaagagccagaagagaaaattgaggaagacatgtcagacaggatagcgagggaaaaggcggaggaagaagcaagacaacaggcattgcttaagaagagatccaaggtcttgcagagagatcttcctagacccccagctgcttcattggcagtaattaggaactcgttgctttcagctgatggagacaaaagttctgttgttcctcctactccgattgaggttgcagataaaatggtaagagaggagcttctacagttgctggagcatgataatgcaaagtatccgcttgatgacaaagctgagaagaagaaaggagccaagaaccgtaccaaccgttctgcttctcaagttcttgcaattgacgattttgatgaaaatgagctccaagaggtatgtagatgaaaatatctatccaatttcagtttacttttgttttgttttttggttgattaattcgttggccagcttctggaatccttagttctctcttggtttaggctagattgtttgattgataatttttgcatgaatgttaatccctccttaattatcaacatctgtaattaatttggtatacactagggagttttgaatgaaggttgttgcttatgatttttggtaggctgacaaaatgataaaggaggaggggaagtttctgtgtgtgtcaatgggacatgagaacaagacacttgatgattttgtagaagctcacaacacatgcgtgaatgatctcatgtatttccccactcgaagcgcttacgagctctcaagtgttgctgggaacgcggacaaagttgcagcttttcaggaggagatggagaatgtgagaaaaaagatggaggaggatgagaagaaggcagaacacatgaaggccaagtacaaaacttatacaaagggtcatgaggtaacatatagtccacattgccttaaatgttaattctgaaactatattttgtttggtgtcaatgtttaacggatttgtacatttgacagaggagggcagagaccgtgtggacccaaatagaggcgacattgaagcaggctgagattggtggaacagaagtagagtgctttaaagcattgaagaggcaagaagagatggctgcatcttttaggaaaaagaatttgcaagaggaagtgataaagcaaaaggaaacagagagtaaactgcagactcgctatgggaatatgttggcaatggttgaaaaagcagaggagataatggtcggtttccgagcacaggcattgaagaaacaagaggatgttgaagattctcacaaactgaaagaagctaagctagccactggagaggaagaggacatagccatagccatggaagcttctgcataaaaacttgagttttgtattgcttacaagttttaaggagacgtagcttgactttgtattggtaagtttttttaatatgagtcatgactttgtaaaaaggttatgatatattctctgtttgtatgctttgcaagagtcaagaaatttgaatgcttcaggatctatttggttccaaatgtaagtacaatctgaagatgtttaatcctcctctctttcaatgcaaattttatccttggctagaagagatcgtatgggagagaaagaaaaaagcttgcatatcattcaagatggaatttcaatgtttttggcctaaagccaaaatcaaaaatacaagtagtctgtgtgtaaactcttattattagaaaagcaacaaaagataactagagagtttcagccctctcttcaaaaactgataaggctctcaattcttctactccactacttcaatcagggtgggctcatagtcagagggagccacaaatccatggaggttcatcactgttgcagctacatttgcaagccccggtgtttccagatctttacggaatctcactccttgagccaaaccaggacctccaatagcaattggcacctacaaacaataattacaatctcccatcagatatggtccaatggtttatgttatggtaataacacagattacagatatggacttactggcttgagtgtgtgagaggttagaatctgaagcttcccttccttatccaaagcaggcttgccagatttatccctcttcaccatgtcctctgcgtttccgtgatcagcagtcacaacataaattcctttcacttgttcgattgcatcaaaaatcatctgcaacaaccaaaccatttgtgggctaagtcacacactcacacatatcatcattaagacttgtcaataaacttataaaacataccttcacagcaagatcagcagcctcgcatgcaacaaccgtggcttcaatatcacctgtatgacccaccatatctccatttggaatgttaactcgcacctgaaaatcaatattgaaacataagatgatcactgcttatttcctgggatgttcgattataagatcataagactatgcatccatctcacctgatcaaacttgccactaaggattgcatcccttgccttctcaccaatttccagagctttcatctttggctggacattgaatgatattccactgtcacttgggatttcaacatactcctccaatttctcgttgaaatatccagatcgatttccattccagaagaaggtgacatgcccaaacttgacggtctcactgtttcagtcacatacattaatatatatgatcagttcaagcgtgatacactattggcaaaaatgcaaagcatagtatagacctataatgagcaagcaactggaactatactaaacaaagcatataaccattactcaaagtgagaaaaggacagaagttgaaatacctgcaagcaaaagtactgacgccattgtgagtcaaatattcaccagatgttctatcaatctccgggggagaaacaaggtaacggcttggtagcttaagctctccatcatactgaagcataccagcataacgaatctttgggtacctcacacggtcaaatttgtcaaaatcttcgtactcaagtgccttagcatgcataaccatacgatcagccctgaagttgaaggtaacaacagcatcaccgtccacaatcggaccaactgctttccctgattcatcaacaatcacaaacgggggcaaatactggtcattagcaccaggctctttcctcaaagtcttcacagcttcaacagcgtttttgaatttgtgaggagcttctccaagaacttgagcatcccaacctcttttaacaacttcccaatcattctcatatcggtccaaagtcacatacatacgtcctccaccagatgcaatctgagcatccacaccattctcacgtaatgcaacgaggtcggcttcaagggtttccacaaatccaacactagaaccatccaaaacatcacgaccatcagtaagaatatggactctgattctcttagcaccacgttcagcagatcctttaatcaacaactgcgcaaaagcaacaacaagtttaaggaatcatcaacaaacattaaaccagaatttgaacaaaataatgaagaacatatcaaatcaaaacctgtagttgatcgagacgagagtgaactccaccgtcactgagaagtccaacaagatgcaaagtattcgtctcgaaagattcagaaacgtatttaaaaccttcaccttcaaagattttgccagaagcaagagcttggtcacaaagcttagcaccttgagcaaagatacgaccagcaccaagagcattatgaccaacctcactgtttcccatatcatcttcactaggaagtcctacagcagtaccgtgagctttgatcaaagtccaagtatcaggagctccctatagagaaacaagagtaagttcaatgaatccaaaaagcatcaaaaatcaaagattaaggaggtaacatacatgtttaagagaatccatggctggagttggagcgttgtggatacagttgtactgatcaggggcagattcaccccaaccatctaagacgattacggcgatggtcttacccttggggagcttggggtggtcatcgagcttccaagcggaggaggtagccatagctgagattttttgagatgcaatcggagaatctcaaagcagatctgagagaaaagtgaaggttggtgtgaaggaagaggcgggttttaaaaagaggcgtttttgcaatatgggcccgtcaattgggccacttgtctctcacgtaaatataaaattcttattggctccgaatattctttttccttatttttcttatgagattttacattgtgatgacacatgccattttgttatttatatgtttaggaaaaaaacaaaaaaaaaacattgcgacattcaacttttattctttttttttcacaagagtgataattttaatgcgacattcaactttttttaacaattaaaatttagaaatattgctttacttccattttattagagcttagaatacatgtactattgccttattcatttacttggtttacaaggacttcgtaagagtaattttcctttccacttatagaacttcaccgcttgatatggtgggccatatataactagtttcaactttcaatatgacgaaccggctttgtgtattggttaataaatacaccataaatatcttaccttattcttagttcttttaaatctcaaatggtcaagaaatgtgaatggacatcacagaacatgcttcctaaatcctaatactgtatattaatcctttttgatgcaagctttattagaggctttgtttcttggaaaagtcaaagaagcatggaacaatgtaggttcaaatgaaagaaacaatctcatcaaactagtagaagaagatgatgaaggagaaaacagaaaacgactgaaacagagctaataacagcagaggaagacgaagaggaatgagcagattttggcagccttggaaagtcatctggagaaggcataacacattcatcaccattgaacaagattctccttgggaaagcccaaccttctctgaaagtgaaatttcccatatccttcttcagcaataactctgtttgaacattcccaatctttccttcttgaagcaaaacatcattataaaactggactccccaaaacatccctgtgtcatctgaaataacaccacacgaagaacaagtgatgttagaccaataatctaagagactatggtgtggtttttaaagaatttccttactgatgctgttttgatatggtgtcaaagatttgtagttaaagctaaagacttgttggacgcttttcaagtttggatgaagcaccactaagttccaattagtgtaattcttcattgtgttgaaatttgttgctgtgatcttaaccctccaatactctctatagttcactttcacatgccagtggatgcggatgggacacatatgatccgaacacttcacgacaggcgatacttcctcatctggatcatgtttctgttcaagatatggcggcaactctccatccctgatcaatcaaatgttgctctctagtatatattatacatgttgttacatctatatccaaaaaaaagtgaaaggtttagaaaagtgaattacttgacacaatgggaactcgagcagccgcagctacaggtaggacaaggaacaatgttttggtagtagaaggcagagagtgaaacgcagcattttggcgatggtgatgaccgaaactgcgagtatacacacactgcctcccatgttgctgcactcaacaccacatatcttatgttacataactcaaaaaacctatgtataacatgtttctacatttctcaacttctttttgtaattatattgcaatttatataattttggttacctagagcttgtgttttgcgacggcccttatcagtactaaacttagtcggggacacggatgtagcattgtcgcagctataacccgggacccctatatcgaaattagaaggcatattgaactcctcagggccatcaggagagcttccaactgtcatgtgaaaagcagagacgtgattggcgtggtcctgagacatggaagtcaagacgcctccacggcaacaattggcaacttgaacgttgagagaagcaccgggaagaaggtcgactatggttggtcgctcgagacagcagtgaggaaggttaccgctggaggcaaaggcagagcaattaccttgctccgtcgtctcagctcctttcatgtcccatatcacttcttggttgagccaatgccagctaagcttccaccctggcttttccacgtgtcgatactcttgcatgttctctaacgttacttgtacctgcaacattacattttcaacattccaagcattataagctttagtttttactttttcgtttgcaaaattaatgtaggagtatctttcaattttaggtaaaatcagtaaacctaaacttaacaatatataataaatttgaatcatcattgaacaagggccacattactttataagacataacagatttcataaaacgtcaagagaacaaaaaaaacgagaaaagaaaaccaaactttacaagctttttataatcagaaaatgattttgacaaaatcaactttgcaggaaacaaaacaaacttttgagtaacttcttcgtctcaagcttaatattcggacactaatttagttattttcttttgttatatcattaagtatttttttttataaacccagattctcccaagaacaaaaaaaggaaccccagattatctgaggctcatgcgggtcctataatcagacacagaaataaaacttacgagaaaatatggagaggaataaaaaaaaacaagagaaggaagaagagttacgtggtgttggccaggtgatgataaaagaagatcccatttgataatgatttttccgaacggatcaagaggatcgtatccatctgcaaccattttatcaatcataatcataaaccctacaaaacaattttcaaagattcgttttgtgataagaataacaaaaagagtctaaaagacttacgtgtgggtgataagattgaacagagaatgacagtaacgacgagcaaaagatttagcattgcacccatttttgtctcacagacgatgaacaaattaaacgagaagatcaaaataaactagtcacgtcgaatttcagattccgatgaaaatatttttttctaaaacgtgaattttgatttggctttgggaataagaaagagagagataaaaatctcaagagttttaagtgtgacgcctcgggtttctctgtgttaagagagagagatagagagacaattaaagcaaagaagtcacacagtgactgtttagtgtttgcaacgaagagttttgcatttgtgtacacaacaacaacaacactcttcactctttttctttctatttttggatttttgacttacttttattttttattatcaaggctattagctgtaaaataaaatcatttttaccttatttgtacactcttctaattcttcaagttttctggtagtttagtaggtgccagctattatttttgaggaatgattcacgtacgttatcttcttgtaactttttaattttctgtatttttatggaattcaatccaggggcattagcaaacaaaatcatttgattttcactaggttatcagattaatttttgaggttaacaaagatttggacatcactacatcagtgaatatatatagcaattatttgattatgcgaccataataatattgtatggtatcagttattctagagcgagcagcttgctctatctcttatggcattgatgaaaactttttaactaagcaaccattatataaaattacgaatagaggtcacaaatgattcatatgcaattaaacatgttgaccaaggggaaataaataaagattagaatttaattagagaagaatgtgtcagaaagagatgcgtttttcatgagcgtcaacaccaaataagctcttttcacgccttccttaggcatttcgtttaataaataacatagagacgaaatttaattaacaataatatgccgttataaagaaaataacagtttttattgacaatgtaaaagcacaacgattattaatttattatctttcaatttatatcttaaaatggaaaaacaaaacccaatattaatctatcaattattcatcttaccaaaaaaatctatcaattattcaaaagtagtgattagtgaatgaatatatttcatccttcatttgaagtgtggtgcaagacgcgcgaaccagagaaataactctaatccggtttggttcgatttataagatcaaaatggtttaaattttggttcattaagtttgatcggtttggttgtggttttttattgtttcccaaactgccgatgaatagtcaaagttatgtcaagtcggtgatcggagaactttttgacgccgagagagagacagagaagaagcgagagcgagagagaaatggcgcaaccaagcaaagaaccctgcaagaaagaggcttgtgacatccaagcctgtctttccaaaaacaattttcttcctcaaaggtgattgattccttctctttcttttttcctttcattatatcccgcagattgattattcatcgcgattgtccgtgaaatcgattttgatggtgaagtgctttttgcatttgaagattccttcatgtttcttatgacttatgaggctagtgaattggatatccatttaattgaagatttgggttgtgatcttagttttgggggtttagggttcatgtctcgatcattatgttttcagctaagttatttctcttgctagcataagatttgatgaatccttgaaggctttaagaatcctttttcttagtaactgtgaggtttggtgtggagattattgaccaaatttccaagtttaggtactagtgttataacttacctagtttgagaaacagagatggatgagtagaacctgaatcatgtcgtttcgtattgtcggatgagcaaaatcaggctggttatagatatcctcactatatattgtatattcgtctttggattgtgttaaaagttggcttctcttgagggaaaaaaattgaatgcattgtcactttgtttgcatgtacttaccttggtttcacttatgagctactataagaaaacgaatctggttttcttcttttgattaacgatttttcataaggctcttgactctttgatctacatgactacaggatctccaggttttatcatgttttgtgcatagaattatctttagtaatcattcatgtctctatgccttactttagacagttccatgaaaagtttgagaaatagcatcatgattaactcagttaagagatgttgaagaacaacaacgacaacatcactttcgatatgatagttttctacataatgttatcattcaaataatacactgtagaatagttttactggagatgctaataagacttttgtgtggatttgttgggggtggcaggtgccagagagtgatagagatgttacaggcatgttgtgagagatgcaataacgagtcaacacattgtggatctgtagctgctctcttgaagcaaatcaagaagtaacaacaataagcaaaggactaatccctctaaacctgctagaggcatcagaagagactacaaagcaaatttctctttctgtctgtataaatattaaatagcaaataaaaaacatctttgagtgtaataaataattccggctattattttttaattaaatttgaaatttgtgagtatccacgtgtacactgggatatttataacggcctagctttgtgcaattatatccgccgaccatctctctcctccgtcaccgagggagagcaaccatgccaatctcaattccccttaacgccactctacaatactcgtctccttcttcttcttcttcttcttcttctctcgtaccttcttcccctcttttctctccgattccttcaaccactgtttcccttaccggaattcgccagcgatgcctcaggatggtcacttcttgcgtctccaacgctcagaaatccgtcctgaatggtgccaccgattccgtctctgtcgtcgggcgggagcagattcgtcttggtcttcctagcaaaggacgcatggccgccgattcgctggatcttctcaaggtgagtgttttggggagtggttgtgtttcccttacaaaattgaggattgtgctgacaaatttccatggagatttggagttttttttgtatctgagttgccgaaacttgaatttgttctgggaattgctcctcacaatgctcgccatttttggcactggagtctcctttaattctcagtttatcactggagataatcgtagattactgggatataaaatatcactggagaagatatagtagggagctatacttactcaaggactagtctttcttatatttgagctattgactctgttttgaagcctaaatattgattgctgagcttgcacatcgctcccttggggaagttaggtatttgagtgttctactgttgtggttttgtctctgtttgatggtctcttgcttatagatcacattctccttgtttgctttcttgggtttttgcaaggtttcattttttgatcctttgatttcttaaatgatttttcactctcagtatctcttagcaacgcatgattttcaatctcatagatccttacaactcttttactttcccctttctcatgaaggattgccaattgtttgtcaaacaagtcaatccacgacaatatgttgctcaaattcctcaggtatgcatttagagagaaggcaaacgcgtattgacttactaatctatcattgtttgtttggtgtaacgcaatttgtaatggtaatctcaatcttcttgtcctccagttaccaaatactgaagtttggtttcaacgaccaaaagacattgtcagaaagttgctatcaggagatctggatctaggcatcgttggtcttgacatagttggtgaatttggtcaggtaaatgacatcataatcatatatcttgattagcagacacctgttgagattctagggtatcttagtgctggtgcctggtgcttaatgattatactgattttcatggtagagacaaagaaacgagtctaatcttgttatttgttcttctgcggttttccttgacattgctaaaccatactgtttgcgttagcttatatgacttagacttgtcttccgaaggccatttggcatcaaaatttagagatttcgagttctattttcagggaaatgaagatcttatcattgtccacgaagctctcaactttggagattgtcatctctcccttgccgtacgttcaaatctattgtagttgtggcttatcatcaatacagatgacttcttgattgctcttttcatatgatttcagatacccaattatggaatatttgagaatataaaatctctgaaggagctagcacaaatgcctcaatggaccgaggaaagacctttacgagttgctacaggattcacttatgtatgatgagttacaagtgttcctttggctcattattgtcttttaatctttttccggaatgcaatttaattgttttgaagtttatccaacttgtgtttgcagctaggccccaaatttatgaaagacaacggtataaagcatgtgactttctcaactgcagatggagccctagaggcagcgcctgcggtgagatttacaatgttttcaaatcagccctagatttcgaactatgcacccttattagactaccaagtttccattaggattaaaaaagcttggaatttgtatgaaatgttgagtacatttagatatttttacaagagagttatcggattcttctcttatcttttcagagttattcttgctgatatgagattaacgttccaaattgtgaaagtattttgctattatgtcccatcagcgtgagatgatggattatagttatagagaaagaaactactgttgtgtgcagtgtttgttgacacatatgctcttgttaattagatggggatagctgatgccattttagaccttgtgagcagtgggacaacccttaaagagaacaacttaaaagaaattgaaggaggggttgtgctggaaagtcaggtatgacatgaagatctttggaattgattattttttcgcacttggcaaccggtgtaccaatttttttttctttttacgtactatcaggctgcactagtggcgagtagaagggcattgactgagagaaaaggagcactagaaacagtgcatgagattctcgagagattagaggctcatttgaaggcaaatggtcaattcactgtacgtgcatattaattgtgatgtttcaccttatttctacttttgctttctttcatccgatgttttcactccaggtggttgcaaacatgagaggaacggatgctgaagaagtggctgaacgtgtgaaaacccaaccatcactatcaggattgcaggtaaagtttgataacatttggatatctttcgatgtagttccactgagtttgtaggtgatcgttcagacgattgtgcttattttgtgatgtgcagggaccaacaataagtccagtttattgtaaacgagatggaaaagtaacaattgagtactatgccattgtgatatgtgtaccaaaaaaagcgctttatgagtctgtgcagcaactgagagcggttagtaatgatatccacctttgcttccacctcccccttttactctaagattgtcattatttaagggatttacaaatacatggcaaaccacattgtttttggtactgagatcagtcttttgtctcaaatctcggatgtgttcttaagtaatgtgtcacatgtgattgcaggtgggaggaagtggggtactagtttctcctgtaacatacatttttcatgaggagactcccagatggagtcagcttctgagtaacctcggcctttgatgctgcttctcagacatactttggtttagtcagatgcattcgttggaggaactcttttggtcaaacactacaatgtctttcttttttgggttttatctttgtggatcttatagtagaaaaaacagaggttgtctcttttaagccttttaagtccatctatgccatttcagtttttcaggagtcaacacttttaaaaaccaattttatcaaagcattcgtagaaggaggtcaaaacattccaaatgaaatactcgaaattgatccgcccgtacatcactatttccagttcattggattcagtaactcaggagtgatggtgtaacacataagaactcagtatctctatctattcagctaatcagcttctgaacaaaaaccaatattggtgactcctcgcccattgttgcggaaatgaagtaaattcacgtattcatggaaactcatatctgacacgggcaagatacagaccagatgcaggagccatgggttttgctgcactcactgtcttcgcctccaggattcgttcaactgaagcaaattcatagataacccaatggatgttttaaacattgttcaattccaatcaaacccacaactgtaaactctgtaatgacagagacaatgacataccgtctgagaccgtcaattctccagtgcctacgcatttcagtgctcctacaatcagtcgaacctgcacagcataaagagactaaaaatcaacacaccacatagagcatcacaattcgtctcttacactttcaaatcaaattgatatgtttctcattggaagtttcacacacaacaaaataaggacatgtggacaactattactatatgtatcaatcaagagactacagttgatacacatgatccaccaagagatacagacaatgaatagaaatcaaacctggtggtacagaaaaccccgggaacgtgctgtaactacatagcagcggtggcgtctccttctaccaaaagaatcaccctctgtagagccctccacttctccaacattagtagtaacaccagcagtctcagacttgggttgattggaacatgcgagaggatctccattgtttaggttactcaacgtcctttccgtgatagatggaaaatatggagttgatggtacttcagtgatatttagttcatctaaagatctcataggtgactttgcctgcataacaacaagtcaccaaaaggtttatcaggtttccggaagaacatcagtctacacatggaaaaacttcttcatagatacagacagttatcttcccatttctacaaatcactgagacgaaaggatacatatgcatcttaaagaaccaagattgacttgcacatctattgactacagaaaacaaaacgagaatttacaagattaatttgatatgttgtgactgagaatactacaaatgaacaagctttgccaaaaaatagagcaggattacacaaaattatattctgcaggagacatcaacccgctagagctaacatacattcatacttggtcacatggtcacaaacacaaacaaatatataaggtctaccaagtaccaatctacaattgagatgcattgatcaaggattctatgaatgggaatggaaaaatatccaaccattcaaaaaaattcatattgattgtgtatcagtatgatataaagagatatttaaacaaaaacagacaaagaaacttgacctggcaaccagctgccctgaaggagctaaaatcatgagatccaacaagaactctgcatgcttcctgtacaccaatcattgatgatgttgttagagatctcttattctcactgtgaaaaggactcttcgtttaagggaaaataaattttttggatcagtgctgatatttaagctgacaatacagtagttagtaagtgaacctgcataaagcgaagatttaactcctcaggaacatgccagcaacggtctttttcaaggattgataatggatctgacccggatagcaagcggtagaagtatctacaatgagtgaataaattctcaatttccaattgaagggaatatactttcaaatcataacctagtactctacaatactatcagcacacatatggatcatcaaaatctctagaacaactgaaactaaattagaatacctacgtgcgctcctgggccttatatctggcatgataattacttgggacacaccgaacatcaatcaccataacatcaccatcttttctctgcttaataacaacataaggattttaatgagataacgaatagtagataggtcaaagtagatgaaagtaagcactaaggaaaagacaggttggagaaacttaaacgaaattgtcaacaggtctaagtaaatttggttaagatcactagttacaggataattttgtgggagtggccatggaatgagaagaaaacccattgtatctaataggtacaattcgaaaagaattcagatattaacctgtaaaaaatggttcaccgctctctggaccacaccaggctcatgaggtggtaactacagttaaaaaaatagcgtccaagtgagaatgcaaatgtatctgtccttaatagttcgcaagagcattaagcatataagatagcatgtgtttgtgaatacacgttgcagaatctaaccatattcatgtataaaccagactacaattgggacatatgagattcaaaacaatgtgtatttataatttatgttaacatggacgtgactcaaataattccattcgtaagccacaagataaaaagaaagctgttggcgcaaaagaaataccacttcaccaggcttccttttactgatgcgttccacatcaacatgacaaacatttgacagtgcatgcactccggcatcctaaaagacgctatatcaatgtcagataacataaaccataaaaagaaatgagcatttcattgaaatatatctaattcatcaatactaactttctatagatatcaatttactgcaaagcatggtccttatgaatctatagtgacaaagggcaatccaaaactagttgaaacgtttcttcagacacgaataagagattgatcatttatatatatgtaggttctaggtaataactgctcgaacaaaacctaaaattcttaactcgctggccaataaacttatgtaagaagctcgtaccgttcgacttgagcaaaagatctttactggttggcctataaacttatgaaaagcctcctgcaatgtattgcaaaaatgtatcaattcacacatgaatcctcctaagaaacttgtcagccaatataaactaggcctaagctcgctctatggaacataattagctgtgaaatcaatcaatgccaggcaaatcttgaaggaacagagcagtagtataagaaattacagacacgcaacaacctgcaatacaccgacgacggtgcggtccttagcttgctgttgtgaaccggagaaacgagttccgatgtactcaatggcaaccaagtaacgctgcactctagggtttactgggttcatggactccaagtcggccaatccctgctgttcctctgattcttcgtcactaaatccctcgattctcgcaacctttgagagtctctcgagtgattcctcactagctgtacaatcgagaggatgcttcagattatcggacatgactcactcactcactgatttatgatatctcacaccgtctcaagctcagtgccaatgtctagagggtttaagaaatatggtgtcgtttggatggatgctcgattaatcaaatttcggtttagctttcatttggtatgctctccaatcatattttttcagattaatatattcactaattatgaatgattttaactatttgttgatgggatgagccaagcccgtgcagtagtgcaacgcatgggcgactcgcgaaagcccagatagcaagctatcttagtgggctttctccctttaaaaatagagttaatatcgtgtgggccgatggcccacatatcagatattaaactgataagaacagatactacacttgatcttagccaaaaggccgagaaaggtatgatttgaaagtgagacccagcttcctttatatattatcagacttgggagacgttctcttctacttgtcgatgtgggacaaaaaccaaaacttatgaaagagcaaagaacagtttgcttagtttctgagaaaattccgaacacatttgtgtgcatcttcttctaatgatcatgatttgtttactttaccctaatttcctcgctgtatctgaaaagtgatttatcattgagatcgtgaaaatgaatccgtgggcctaaagacatctgaatatgaaatagaaaaaatagaaaccaaaccctaacaacggaagaaaaaaaaaccctaatgattcctgaactgactaaagcaattcatgaatgaataaaataaagaagacgaggaattaaagattgacgaatgtcatctcatgttgaattgccagtgttcttcttgtaaccagagtagcctcttatggaaagatacttggtttgattgacaagagatgcttgtgttttgctattgctacttctgttccaattatatcctctttcttggtgattcattctcctgttgccttccatctcatactgattcaataaacacaaaactcggggtttagataaaaacacaaagttgtagtatatatagagaagatgaactcaagttagtcaaggtcgtgagcatcttacgtcatagtctttctctttgaagagatccatgcgaagagtggctggtttatgctccttcttcgctcgaagagacttctctcgctcttcgtagaagtccatgtcgtctaacaaaaatgttaccgcagagtacttcttgaatatcgaaagcatttggagaccttctttgagtttgatctcgtgagtatctctcgtatgagtaactggcttgtcctcattgttgtcgaggatgatatggcgtagttcccagttaggaatatctttaaccacatgccattcaacagggaaaaagccactccacttatcaacctgccagaaatccaaatccttgttgaagtccacatatccaaccatctcagctaatcccacaaattgtctactcgcattcacctgtataaaggacgggtaagacatcaaacatgagactaacaaaacacccttagccatacaagaaaagaagacacatctcaagttcactcaccgagaagaagagaaatattggacgtttcttgccatcctcgagtgtttttgtttcagcatcacggaaagctgcatcgagtttcttgtttccgttgatagtgcttgaccacacagaatatttgatactcttgtgaacatcatcttcgctgtacgacttgattacgaaaaacttggcatcttcatagtcagtctgaaagtcagggaggttatacatctctctacgaagagccaaggcaaacgaattgttttgcttcagtggtgacgactcggaaggaggacgagtctttgcattggctctcggaccacatttcaattcaaccaagtagtcagactctccatttctctcaggtttcttattatgatccctttgatcccagaaaccattatttgagtttccattaatgtaaccagaatatgggacacagcttgtcttctgattggagaatgttaagaactgtcctgcggcttcctttccctttaaaaaggcaaatagaatcaattttaatcaaaccttttacattaagaggaaaccttaagtaagatattgtcatgcaaaaatcttgacttcaactatttataaatagatatgtgtaaggtaccttaaatggtggtctgaatgcatgtgcttgtgtattgggaggaagtctaccagcaccattgaaatttccaagaggcttaggagccgaaaaagaagtttgagacaaacaattgcttccttttggtcgatctccacgcaaagtcgaatcagcatagacatctgagctgtttttgtcacggtgatttccctatgaaaatgacccagcgccaaacatgatagcatgtcaaaacaaagaaattacatcagatctataaaagcaaatggacaaaatcaaacctttcgaaaatctgtagtatgtgcttggccattgtcatttggctgagaagatactacatcagatcctgcaaaatgcatcacaagcaacaatcacttaagaaaatacctatatatagatcattcactactgagccataataacagattatgcaaatagaaatttaaaaatctatcaagaataataagaaaatagcagacttattttaggtggttgataagaaccaaacccttaataatctgtcttaccattagcacaagcagtgacagtaagagacggggtactctttggaggagactgaaaagataaccaaactttatgtaaaagcattctttgctagcagcagattgagtatgtggctaataagattgtaaatacctcatcctgtttctttgttgtagaatcaagagctggtactgtttgcgcaaaagtagcctcagctagagttaatattaaggggcaaacactaattgatataacaaggaatttgaaatcaatcacaaaagcattgtcttaataaaaactcaatcaagtaaagaagtacagaacaaaaaatgcgctagcatttaaggatacaatccagagtattcttttcagtggccattatcaattttgaagatacactgcaaccattgaaagggaacaaaagaaaaaggttagtatggagaatcaactaatctgtttatggtagtcagcaataaacagccatttagattcatcacttcctcggtaaaagaccacaaaagagataactactaaagttctacgctttgggttagagtctgatgcaataatacaaaacaaaagggcagtcagaattatggtctctccccagaaagaacaacgctaaatcgcaggatatgcacaattttagtaactttagtcaaatggaaaagatataaactgttcccagtgatagagattacagaactaaggaccctaacagaacaactttctgcagaattataggatttctgaagcaaaacggataattcattcccatgagttaacgttacaagggaaaacatgacgccgggagatactcaacgagcaattccaataaagacaaaaactctgagttctaatatctctacttggacagaactcaacatgaacaaatactgtcaaaacatgcccttttacttcaccataaagtttccaaaacataacacagtttacaatggaaactaacagttccaatcttaatgacaaaacagagaattctgaagaagaagaaaaaaacaattcggagcatatgggactcagaattgtccaagaactaaacagatcaatgattagttggaaacagaaagcgggctgataagaagcaaacctgagaaaacgggtttagagccgccgtaaaaccaaacaggggaaaccgcttgaagaggttgtgtatgtgttaagtgtactttggaattcacaagtgggggagttgcgacgacgaccaaaccgaaccctcacagaaaaagagaagcttccgacggctaagattatcttataacttttcctttcaggaggaaatcttcaccgttggattcagatgttcatggtttgggcctcaaaggcccggtcaatattaagactataattatccattatgtattcaagcaaaccccaaccaaaaaaggccgagatagtagtacgtaagtcatttgatgccatatgatacaaaccagttaaccatgtgcatgcatgtatatatagacgccaggtttaattccatgacctcgcaaacgcaaagctacaaatttggcgattgttcatatacatagagtaaaaactgaacaacagcagtcatgaatgacagtagccagtagctaggtctattctttttttccattagctttcgattttttttttctttttaatgagagtttagggattcgcgacgctagaaaagttatagtcaaaaaaggaagacagcaaaatttagaactttgactaaaaagttcattactcacacaaatttatttttacggactctagtctaattaagtgctatttaatatttctaatatgtgtattagtttcaaatcccgatgcgtgtgggttctgacaatttaatccgtatcagagatatcttgatccgaatttgcgaaaaaagcaaaaaatgtaaaaaactcttaaagctacatttataaaatacttgacaactaaaatctaaacatatcactaatgcaggaacaattccctatatatattaatatatatacatataatttaattaagtatgtatatggttcgacgcatacgagattctattattatatgatagcatgcattcagaagttcctgcattagtttcgtggaagaagagatgcattctttcttgtattttaccattactctccggttatatttttattgagttgtgttttgctaatgaaaacaacaacaattatacagttatgtagtcttatgttcatgtctgcaccttcataaatatagccaaatttgttgtatccatcacagagtcggtctggttggagaaattcctttaggacttacaaaaagagaaagaaataaaagaagaaatggttcaaataaagacagcaaatgcaaaagaaaaagctaaagagtgaatagaagaagagcagtcacatgacatgatggcctttttttttttttttttgtcatgaatgatctgtgacaatgagtcacaaaaggcaaaatccccaattctcttctattttctacattaaaatcattcctacttttgaattttgctttgctgtaagttcacctaagcctccactattctctaaatgccaaattttctttttaaataattaggtccctaattaattattaaaacgaattttattcaccaactccagttatagtagcatatatgatacagtaccagcatatcacaattcacaattgtatcaaacgtttctagtaacaagagtgttttctattgttttaaccgtaataccaagaacaaaacaaaacgctgtgtgagtttagacattcgtctcatgtgcatggttatatagtcttatctataggtcagaggtctctccgcttttgccgcagctagctaagctattttctttcctttgaataattgttttgcgtataattattttgttttgagaaattcactcgattgcgatagatttgggacatcattgccaactagatgcatgtgttaaactttttggcataattttcgaattgctgaaaaagcagttgttagagatttagattttcacctaacttataaggttccactattttttactaaaactctatttagttttcttacatacacgatgatatcaaatggcgtttattgttagagctattctcaattattaatccacaattattggtgaaagggattcatatgattaaactctcgtgaaactcctaacgtttatttgatgaaatctagctaagttcgtaataagaacatgtgaacatataaaatataattttgatcactattcacaaaaaatcatgttcgatatacatgataaaaatgttattgatgttgttatattacggcagagctatacatgtatagttatgagcagtgtcattggtcataacctagcaatgaaagacaattttgtccacaaaattcaacacctttatttttcgaaagtagaatctctttaacattatgtgcattttcacttaaaaataaaaactgttattattttattgattttcttgagtgtgctatttaagtatttatttatggcctcaaattgctgaatgtgcaaattaaataaagaaaatatttgtttttctacttgttctttatttttttttggacaaatttgtacttgttcttttaattaagaactttatgttgcagacgtcaaagaaaacaagaactttaaaatagaagttttctcgtaacgtagatgaattatgtatgttcatgcaaatgtgtatagagatacgtaggtctacattaacattacatatactaaagtgtatagagatatgtatactgattagggttttgacagatttgaaatgaaatgttcaattaccgtataaaagtgggtttagctgcaaattattatgcatcattgtttccttaattaggataactaattgaaatcttactgtgataattaattcacaaaactaagggtaaattatacaacgcttttattaaagcagccaataggttctctttgttgttcttttctgatgacacgtagaccccatcttcacttattattgtgaaataacaacaaaaagatgtcacactatagctagtaaacaccacaaaacttgcatagcaatttcttaaagtagacactagacaacgaatacagtccgtataggatatactgtgtgttattactttaaaaaggaaagaaaaagaaacagttgatatacctttttctttacatttgccaatataccaactaatattgtatacaactcaatttcgaaaggtttaacgtacgaatcaactaattattaattagggttgtaaattaagttctaaatcctgaagttgtcagcaaaagacagtgaaagtcctgaaggggatgagatcataggaataaaggaccaagattcatgtctgttcctactacttagggaccattattacactaactctctgttaattctccttttcatacttttatctataaatatatatatatttatcaataataacaccattttgtaagtatatatatatacaactcattatcaacatagaacagagtgtgttttgtttcttcttctctgctctgcttttctcttccttcacatacaaacaaaggaataataaacgaaaacgatgtcgttgattgcgtgaatatatctcaattcttttctttcttttcatagatcatcgaatttccaattgtcaatttttaacttgattcttgataaaagactcatctgttcttctccacgttcttgaaaacaaaacagaggaagaagaacaatctgaaggagttcaggctcctgattcttctttctccagttcgatatttgttctaaaattctccaaagagttaagaagactcatcgacttcaaatcaaggaacggctcaagattcgcatgccacaaggagaaaatgaacaagtcaagctcatggagcatatacagtcccagagagggagatagtgaagggccatggagatcgtcaacgtcgatgaatgcgatctcatttgggtttgtagcgacggcgatactcatctccatgttcttgatcatggccatattcgagcatctctttaggcctgagaattcttcatttgattcaccacatcagatcagacaaagacagagagatgggtccagtcagttccagaaacttgctgatcaagcatccatggtaagcacaaaaacaattaaaagttattaaagcatttctcaaaagaatttttgtcctttttataaagccgagccgcattaacttgccactgttgagtttagtttttcgtttgtttctgcaaaataaaattgcttttcttttcggtgcaaaaacctttgaaaagtcgaaaacattcgtcaaaattaatacaaaaaatataacccaactttggaaagtgaaaagcaagacacacaagttgtagtttaattctttgctttcatatagaatatttttttttcaaaacatctttacgtacttgtagaattgttctttgttttatagaattaagtcgcaattaacttgttttaagttaatgataaggaatgtaacggtggcaggttccggtgagtacggtggtggatgtatcggtagtgatgccaggggagaagttgccgtcgcacatagctttgccggctccgttaccttgtcggagagaaggcattcattggcctctccgcctctaaatattactatagctattttcttcttcttcgtcttctgtaatttttatttatttatttctgactcataaagtagattagtattcgtaatatatttcaatatgcattcccgttacgtgaatgatcggccaaaaaatatttccttttttttttttttttttttttgtcaaaatagatactcattgtaaatttaagattaaacttttgtaattatgctttttaattaacattttatgtctaactaatcaatttgggataaatcacttttagaagttagaaccagagtttttaatagcttaaaaagttaaaatatactgtgtatccaatataatgaagctccattacaaagaaagagatttcaaccccactatatatatactaggttcaagtgtagtgacatagtgttcatgagtacgtgtagtgttgagtacgacaaagttgaatgatttacgccttcacatgtattatcaacagttaaattccaaatgtaataaagttatgggaccatagttcaaaactttttatttatatggtttctacacaagtggaaacaaattaaggatgaaaaaaatcccaattagatttacatagagggattcttgatcttatttcgtatggtgcaatatcatcctagattcagatgtaacttacaggattttaaagatacagtatgatttctatcaatttttcttctcgaattcgaaaagtataagatacaatgggccgataatgaagcccattactatcagtgggcggatttataaggccgagacaaaaaaggcaccttttctatcaatcgtcgcgtagaagctaaaggaaagctgactcaaagattcaaaatttgaactgcaacgagagagagagagaaagagaaaggaggctatggcgacgacggcgaagaatttgaagggtttctacaagcagactaaaagcaatatcaccggaggtatctccaagtccaagccttcttcccggaaagtggctcccaaacacgcggcggctcaaggttctgatgttacccagcccgccgcattgatttcacacggctccgtcgatctcaacggtacggcttttattttctttgtaaattgtaacttattagttttttttttctattgatgatctgattccttattcatggtcgaaaattagggtttaattttccaatcccatatgagatttagggaacaatcgaaacttggcattttattaagttgacttgttgtgattttcttctgactgataacattttgtggtattgtcgtgttttaattaacagaggattatgacaaggaggaggagatgcttagacaatttgacatgaacatcacttatggtccgtgcctgggtatgacgagacttgatcgatgggagcgtgcagtgcgtcttgggatgaaccctcccaatgaaatcgagaagcttttgaagaccgggaaagtccagcaagattgtctgtggcaaggtcgtgtctagataggtgttctttaatcctttatctatgcccttgtatgatccagtacgagttgcaaaactttgtctgttgtggatgggatgtttggttcagtcactggctggatccaccccacatgtagtgtcctcgatgtttctagtttcaggcgataatgttaaaaccttggtaatggaatgcatcttgtttattgatcgaagcttcagttactcgtataatcttattatcactgacaaacttctacaaattcactatggtggtgtcatgtaattacaagaacagtaaagttacaagatctgaactttctctcagtttccaaatgaagctgaatcatatatataacccaggaacctgtgggcatagcagagaactacacaatccagtataacgccatataatctaggaagcttgactggtctctgatagaacaagattctgcagggtccggttctgtgagagagagagattgaattatggtgaaatcaggaagcaccgtggagcaaagcaaatcatgcatgaaattgcttctcatgatggccactgaaagattaggatttggtagagacgttgaatagatgcccttcaatgtctgggacgaaaccttgatctaccatttcttctttaactatctcataggttattcggttcgggactagacctttctctaacatctcattcaaaagcatgtttgcatcctccaactttcccttttgagaatatccttgcagaagcacattatatgacgctacattcattcgcaaccgtctttctttctccatctgtgtcctcatgttcgttgctgccttcagatttccttccttacagtagcctttcatcacaatgttataagtcagatgtctcggtttcagccccatctttgacatttctttcaaaagcattgctgcttttctcgattcaccttttctgcaatatccctccattagtatgtgaaacgtcacaaggtcaggaagtcctttactagtcaactgatcaaaaagcttcttagctgcttctatgttaccgtttctacatagaccagcaatcaagcaattataagttccaacatctggtacaatcccctcccgctccatctcttctttcagtgcaaagccatcatcgattttgcctaacttacaatacgcatcgataagcatgttatacattctagtagtgggaacagctccttggcctttcactgagccaaacatatcaagagcttccttcagcatatcgttcttgcaaaacccatttataagagcattgtaagtaattaggttaggctgcacacctgcacttaccatcttatcgcgcatactaatagcctcgctgatctttcctccattgcacaaaccatttatcaatgaattatacgagatcacattcggtttcacgtcttgatccagcatctctttaaacaccttcatactccccggaaggttgtcatctttccagaacccatcaatcaatatattgaatgtagtcaagttcggagacacatcattctccaccatttccttcaaaaccgcgtctgctttgtacattttcccatttccaccaagcttacaatacccatcaatgagagtgttgtaactaactacatttggagaacacccataaactttcatgtcctccataacatccctagctttattcattttcccagttttgcacaacgcattgatcacaacattgaaagtgaacacatttggttgaatcttcctcctaatcatctccttatacacatattcaacatcagcagaacgattctccttcaacaacgcaatcatcaaaggcttacaagacaaagccgacaacttatacccataataacctgaacgcttaaacgcctcaaatcctaactcgaatctcgaattattcgcataagctaataccaacatatcagctataatcgaattgacacaaacattgtcacacatagagattgcatggaaaatcgagtgaacttgatgatcagatccatttctcacaaacccatcaaggaaagatcggatttttgagtaccttttcgcattggcaagagaatgcaagagcttaaatgtgagctcaagtgaaacagagatgtcactgttcttcactaaccaggaatagtacctgagacacaaatctgggtcaagctcagaacttatcaactgtcgaaacagctcgttagggtttatgtctgtcacatgaactccgagctttgaccagtgctgcttctctatgagatcagcgatgacagctacgtcatatctaggtgggcaagggctcccggtgatggtagatgaagaagaacagagtcttcttaaaccagagactccttttgttaaattcgagttttttctacttacggctaaggatttggggaacattgattcgtgctggacaggaaggagacttgggattttgaaatttagggtttgtgaattttgcacccactggcatctctctctttcgttttattttcgacctcaaactttacaatatacaatttcagatgtttctttgcgaaattttacgaaactaccactgaaacttcgtaaagatcagagtgtctgctgcttcctaagttcatcatttgtgctttgaagtggatttgaggggtttaacctacattgcttatcttgacacaaattatgtaaacaaaaatgttattttgaatcatctcttaacagattggagtgagttttaagtttttggattcttggtttacaagccattacaacaaaattccttctcatcactcttctttggtcgccacttgtttctggcgaagagctctccaaccaatatcatgcctaaagaaacctccaggccagttgatctgttgtactgccgagtacgctctttcacgcgcctcttccaagtctttacccttcgccgtgaccccaagaacacgtcccccagttgctacaacattcccctctgaatctagacccgttcctgcgtggaaaaccttcactccaggagcaactctttcagcttcttcaaggtttttgatgattgatcctttctcataagaaccaggataaccattgcttgccattacaaccaccattgctgaatcttttgaccaatcaagtgatacaccacttagctcgcctttacaagccgctagcaaaacttttgctaggtcagactctagacgcatcatcaatacctgtatttaagcaataatctgcattgtttagagcaataatcataccgagactaaacaaggttttttcagaaaaggtggcgtttctcacctgacattctggatctccaaaccgtacattgaactcaataagcttaggcaaaccggatttcttctcgatcatgagacccgcaaacagaacgccgacaaacttacatccttcttcagccattcctttaacagtgggatggattatagactccatcacaaaatcctgaagctccttggtcaagaccggtgcaggagaatacgctcccatgccgcctgtgttaggaccggtatctccatctccaacacgcttgtggtcctgagcagattctagaggaatggcgttttctccatccacaagtgcgaagaaggacgcttcttctccctcgagaaactcctcaacgaccacctgacatcctgcagaaccaaacacacctttgaccagcatagaatcaacagcttcaaaagcctcctctagttccatggcaacagtgactccttttccagctgctaatccatccgctttaatcacaatcggtgccccttgttcttgaatgtattctttcgcggcagatgcatcagaaaatgttttatactgcatttgaattccattcaataataccgtattagccacatcaaattggaatccttaagataatatcaaagctacgaatctgctactacttttattccaccgatttaccgagccctcaaccacatagccaaccaaaccatagtacacctagcactcactaaccgctctctaaccaactcacaacagctataacctgctacattaagtactaggctagattaaagcagacctatagctaacagttgaacacttcaaagcttataatctttacatagcaaccttatggatcctaacacagcaagggaagaaattggtaaccatcagggataaatgaaaaagagaaagcgacgcaaaccttagcagtagggatattgtacttgtggcaaagattcttcataaagttcttggaaccttccaaagcagcagcttgagaagaagggccaaaggtgaggataccggccttaacaaggtcattagcgagaccagcaacaagaggcacttcagggccaacaaccactaaaccaacattccatttctgacagaaagagatgacagctaaactgtctgatatgtcaaggtcaggtacacaagtggcatctccggaactggatataccggcgtttccaggtgcgcataacacagaatcacaagaaggagaccgcttcaaggcgtggcaaagggcgtgttctctccctcctccaccaattacaagaacattcactctctcttctgcagaaatcgaaatcgatattactatataatcaatggcgttcaaattcgatatctttacaataacattcaaccaagtttgttaattcataatgagcaaaagggtatttaccagagccgccgttaccgatagaaagagacggctgagattcttctgaaacgcatcggagcaaaaaaaggcgtctttggattcggttcgaagagaaacgagagttactaaggacgtgattggtagtagagaatttgagaggagcaacaaatggaagagaattggaggaggcgaatctgagggagagaagaaagggtttagttgggttgttgttgttggagaagagattgatagaagaagatgaaggatagcaattagatgcacacaacgacgacatggagggagactgtcaaagtagaggactctggactcggaccagcgtagacaagggtttaaagtggttcctcccttcttgtttttgagtttacttatttttttggtagttaaagaataaataccaaatcaaatcgtgaccaataaaacatcttcattgtatgtgtaattttgttgtctattattatttgtagacgccggtcctgataaggcccaatacaaaataattttttctttaatgagttttgttgataaaagttaaaaattaagactaaatcctataacttttagaaaataaaaaatagataaatttaaaaatggagactaaatattaaaattttagaatataggatatagttttgcaataacaaatttttttggaggcctaattttgttactaaaaagcttaaacttttggaggcccaatacccatgtatcttgggtcaaataatattttttaattgataatcacatttaagaggaagagacttcaactgtttcgaccaaacatcaaaacgttgtcggatcagctactggatcaagattcaagagagaaaagaaatttaaacttggtgggtttgatgggctgaaaagttttaatgttgttgggctgagattgatccatgactctgtcatctaaaacaggttttgtctgaagttctgaacctttgtttatgttatgaggttttccttgatatatactatacggttcgccatgactgaaatattgcttctgagcttttgaccggtaagtatgaagtaccaaattcacgatctggaggaagacacggctattttcacgaaggaatcggtttgattttcacagaaacacaatgtgcaaacacatgagcggcaaagtcattaatttttagttgatttttcttttctatttgtaaaactaaacgatgcaattaattttggttagtaatttacatgctttaaaacagtttgcgatagataaggttatatggtggccgtgaaacaaacaagtggtctgtaaccagcaaacctcaagtactgtttgtattcatgcatcctcatcgacatataaccaaccaaacagaaaaaaaataaagaaaaagaactcaccaaaaacaaaagccaaatggctgaaaactggctgctccaaatattgatatcaagagagcttgcttatacagatgcaaaaaccgataagcgtcttacgaatgcaaagccatgaagaggttctgcttacgggcatgctctgggacaagcctgttcacgatttcaggaggtatgccagatagctctgcaacaacacataaaacctcagttcatgattttgaagtactgaaagttaaggatgacaggttcatgtctatggagaacaaagtgtttatatattttgcttagtaatcatatatttcagaggccacaacggcaccatacttgttcaatttatttagcatcctcaatattcaaagagcatatactaacactgaatgatgtttatatgtattaccaatcatgaacacaacgcaacatgtcaacaacttaacggagcatactacatatgttagatctcttaataggcccaacaagaaaaataagggaactgtaccttgcggtttaaagttgaaaagtggaggaagtggtcggccattgggaagacgagtgtttgggtcccttagctcatcaaataacggatggatacaagcttccaactacaataacaccagaagagtgtttttaatgaatttagatcattagatgctaatatggagggaacggaacgaattaacttacagctgtacatctcaaattgggggaatattggaagaacctacaaagaagatcaactgcttctggtggcaaacgtttttggaacacctgagcataaatagaatattcatgcagtaataaggattcagagagaagcgaagctcaaggagataattatcactgaagtcaattaaacctttttttactatgggaaaataaaaaatcctagatacagcttaatgcaaagtgcaaaccaccaagttgtagaatgtcagagaacaaaatcctgaaaaccatttccaccagagagaaatactcaaactagaactaaagccacaatcatttagccaattgttttcaactctaccacagatagttttataaagcagaggaaatgacaacattaattttatttttgatatttactcttgaatgattcatactccaaaccatcacaaataccagaactcctctttgaaaaaatgcattcaccaacaaaaccactgattaaagattattctggtaggtgataatcaataacattagaaggcataccttgtgccatggatgaggttttatctgcggaaacttaaattctgtatagtttggattcatgcacttgatttcttcccttgttggtgtacctaaaacctgcatgacatatcaaagcaaatgaaataagaaaaccaaggtttcctcgaaatcagactgagcaatccaaaggttactgctttcttctatactgaatacgaactcaacaatagacgtaacaaattgtgatgcctaagcctaataatcattcagatataaagttgacaatctgcacctgtctgctacgtaaacaaaagttctaaaagaacttatcactttatcaggacttgatgattttagataaatttaaagaattaataaaaggctaccttaatgatttcaacaagctgatcaactccgctctcaccaggaaacagaggctgtacgacaaattagcaagggcacaaaatagtaagacaaggaataaactgaatgaatagaacaacatatagctaatgcaaaaatcatgctttaacctgtccaagaagcagttcggccatcacacaaccagtggaccatatatcaattgcagttgtgtattcactggcaccaaaaatgagttctggagcacgatagtatctagaacagatgtaagaaacattgggttctccttttacctacagagaacgagaacatgtcatactccaagaatgaattcgttaaaagctgtgtcaataaaacttaccaacacttttgcactcccgaaatcacatatttttagctgatgcgtgtgtgggttcacctgcacaacaacatctgtaaagtcagatatataaatgcatttaaattaacaccgaacaactttttagatagcaattctaactagttagaatttttaagctcagacatgttactctaagaacccagctcaatttctcaaagttaatttcagaatccaattttaacaactagctttctcaataatataaactcgaaaagagaagcctagttcctctgtgaagggagtaaatgaaattaaaagtattaaatctccaggcctgttataaacatacatcatgtcagaatccaaacctagtatgacatctttaatgtaaataatatacgtgtctatttatctcctgctcatagagcattcaaacaaaaataggttatagcaaaaaaaaggtcatctgttatatattcctttcaaaacagggagacgcaaatggaacttgccagcaggttttgaggcttgatatcacggtgacaaagaccaaaggaattatggatgtaagcaagcgccctgcaaatctgtcaccattaacagaaacttatcaaaaatgtttgaagaaaacccagcggattatcaatctggcatgcatttacaaatattatgaagcaaaaactacaaaaaagattaaaaaaggttcaaatgtaggaaatagttacctgataggtgtagagtttaacatatatcaatggcatcagctggtttgtcctactataacttcttgcaacacgattgacggtctcaggcacaaattcaaggacaagattcaaataaacctcttcgttgtctgttcttgagaaaaagctatgctttaaagcaacggcattgggatggtctagcatctgcattatttgtagctccctgttcttgtagcgtttgtcttgtagaaccttcttgatggcaacaacctccccagtttccctacatttagcctaccaaaaggaaacataaatgtgcaggggaatggagccaaatcaatagaacgaacatcatgggtcttatgttaaattagctcacttggaaaaccatgccaaaggaaccagtaccaacaacatgttctgatatgtaactgactgtctgccaatccaaaaaaaatctatatgagaaacagttagataaactacattaccaactaacacatacaattatccataaccatccaacctgtcttgattgaccatttcgaccacggagtgtggttctaatcacatgaccaggctcagcaccagccccatcaataatatctggttcactatcctgcaacgtaacgaaaacctcagacactgtaaccaactccataacatatataagctcaggataaagaagtgaagctaaaaaacagttgaataaacatgaaaaaaagaagaagcaatgcaagacttactctctcatcatcggtctctactttgtcccttatcctcgtctcagccaaatctctggtcaaccaatcgacagaactagaagagctctttaaacctttggcagatctcgaagtgcctactccatttcccagtccagaggatgccatgatatatattcagaagataacacgtactactagtaattgatagcatcataaacccatggtgatttcttggtgtcccatcccatcaaagagccgatcttcctagtagaatttgtaggcccatttgcattaaataaggtgtgttattatatctcaagtatcttgatcattagctaaatcatgaacacatacaaaaaaaagtaaacttgtgtaagcactgatgaactttgaactagtggtgaattgatacactgtaaaacctagcccaatagagacagatcagatctactgccgactagaattgatttgaaatcgacaaggtttggtttgaaaactgaaattctatagccaaaagcagctcagaaaatcagcaaaacagttactagtacccagaagaaccctagttcaacaacaactcagaaaaaaagcacattgagagaataaagagcgaaactttggaaaagattcgcagtgatatgattaggtagaagagtaaaataaaaatgatcatcaccttgagctgtcgtgaagaagaactgaaaccaaagtcaagcatttgacgattgtcttttcttcttctttcttcaattgaagagcttcacataaatatataaaatagaatatttctcggtgaatgatcggattgagaaaaaagctaaacctttagattcttcaagcgttaattttgttttcccaacttcttcacaccttctttgtcgatttctatcgttttgaatcaaacgagaatatgagacgacagctcatcattataagcatcatatattaatctttttcttatatttatgtttctataagatttttatttatgcttagttatatattttttccttcaaaaaattaattagaccttgttaaaatttcatactatactttttaatggatgtccccaaatatcataacaactggaactcaattttcaaacctcagcctacctaatttttgtaaccggatattcaaactttttggtgtacaacttatttcaactatagtggaaaatttacaaaagaaaacaacattttgtgattactagaaatcgcttcaaatgtatgtttttgtcaacacattcgagcctccactccaaaatgcatctatatgggatttatattctaatatgtgccttttgatttttgagatacgataaaacaacaatatattcttggaattttctagtgaattaaaatactgttgtagggcaaaaaataatttcaaaaaaataaagccactttcgtatttgctggttattatatagtaaaagtcgcctttacttgtcgacagttaggtaaggcttaacacatcacacttctttttgtgtgtgtggcgatggagattttgtatcgggttttattagtgatattaaagcttaaggatgtattttttttatctgcaattggttttatcataatataagccttctaaatacgaaaagattgatcaaatacattcccgttttcacaaaagtgaagttaattatttttgctttggtgagctctctcgaaaatacacgttaggcatgcacattgctttggttactactactctctggtctccgcgtgatcttatttactaattagaataagcaaaaaagggctaaatgcaataaagtcgtaagtaggtccaaagtgtactgctcatcagcctacacaaatagggagtggtggtcttataacctaaaaaggctaaagttgctttcttttgcttaataaagtatcgtagatatattacccatttaacaatgattttagtgttgaccaaacaacaacaaaacaatgatttacgatagtactgtgtgtatgtagttggattggaagctaaatgtgttaggcttttgattgccattggcctctccggcccggtcctgagcccgtgaatgatgaggataatactgacaagtccgcattttttttattaaacaaacattcaaattttgataatgatcgtttttttatgttaaaaggctttcatgataatgaacgtacttattaacattacattatgtttgtaatgcatatttcacaatatgtataattaaatttagcaatttaaaattttctggtggcaaagttgtggataattctagctacatccctcctatttacacacgtggttcacttcttctgcctcaatcattttgttcggcaatttttcaacgccaaacgctttttgtttaaaacgccaacgcaaaaccagcgttttgtaatcttattggctaaatctcaaaagaaatgggaaaaaacaaatctccaggctattccttatttctaggccaaaactatctccacgattctaacaaacaaaaattacagaaatgtcaatgtcatcgtcctcctttatctctctcactttcttcttccttcttctcgtttcttcatcgtcatcttccgatgacatctctgagctattcgacgactggtgccagaaacatggcaaaacgtacggttcagaagaagagaggcaacagaggattcaaatctttaaagataatcacgacttcgttacgcaacacaatctcatcactaacgctacttactctctctctctcaatgctttcgcggatctgactcaccacgagttcaaggcttctcgtcttggtctctctgtttccgctccgtcggtgataatggctagtaagggacagagtctcggtggtagcgtaaaggttccagattctgttgattggagaaagaagggagctgttactaatgtcaaagatcaaggaagctgcggtatttgatttaactttcttcttcatcaaaatttcagatttgattggagtttatagttcagcgacttaggatgtgattcaagaactttaagattggatttagatcggagaaagtcttaaactttagaatctttgatggtgcagattcatcttctgtggttatttagtacgtatgctacaagaagaccaatcatgacgtagtttgtcacactaatctaattttgcatctctttttgtcctttttaggagtataataagagaaagtatgcgagtaatatagtgattgaactttttaggaaagtctagaagcaattatcattgtatcttttatgaaagttattgtttcatagagtaggcaatgtaggaatttggtctcagaaatagtaaatttgttctcagatgaatccatagttgattatttgagttgatgatgattatttataggggcatgttggtcgttctcggcgactggagctatggagggaattaaccagatagtaacaggagatctcatcagcctctctgagcaggaactgattgattgtgacaagtcctacaatgctggctgtaatggtggtctcatggactatgcttttgaatttgtcattaaaaaccatggaatagacacagagaaagactatccttatcaagaacgtgatggcacctgtaagaaggataaggtatctgtttagctgtttctccttgttttaatttctcttccctgtttgtttccttgatctttgacatcactaacttacacaagtctcttttgttctgcagttgaaacaaaaggttgtgacaattgatagctatgctggtgtaaaatcaaatgatgagaaagcgttaatggaggctgtagcggctcagccagttagtgttggcatctgtggaagcgagagagcgtttcagctatattctagtgtaagttgtaagattagtgatcaacctactctattttctgaatgttcaacgtctcattgtttagaaattttaccttttgatgcagggaatattctctggcccgtgttcgacatcattggatcatgctgtgctcatagtaggatatggttcacagaatggtgttgattattggattgtgaaaaactcatggggaaaaagttggggaatggatgggtttatgcacatgcagcgtaacactgaaaattcagacggcgtttgcggaatcaacatgcttgcttcatatcccatcaagacacatccaaacccgcctccaccgtcccctcctggccctacaaaatgcaaccttttcacgtattgttcatctggagagacttgttgctgtgcaagagaattgtttggtttatgcttctcatggaaatgctgcgagatagaatccgctgtgtgttgcaaggatggtcgtcattgttgtccacatgattaccctgtttgtgatacaaccagaagtctctgccttaaggtattttagctgtggatatatgcatactgatcacgatgcctacttctatgttttgttgactgatgaagctatttcttttctgacagaaaactggtaatttcactgcgatcaagcccttctggaagaagaattcttcaaaacaacttggccgatttgaggaatgggttatgtgagagaagttttacgcacatgttacagaaaattcaaactcatccatacaaaaacctcgtagattcgattatctgcgaggggattatttgtagctgttattgagatagatatatacgatatcatcacggatgtatttttagtctctcatttggatgtatacaacttctgagtcaataaaggacacttgcaggacaagcacagtatttgtatctgcaagacacataaagtaataagagtatcatctatgtatattatagagagactaagcttcactgttgttgttctctctcttgttcagttctgcgatctccttcttcttttttgtgtgcagggagtagaagtaagaagctagagccaagaccgcccctagcaaagcacctcttctctgccaaccaaattcatcgtccatgaaatcaaaagccaacacaactagcagagccacaaccggtgaagcacccatatgaacaacatcagcgaataaaccggacaccaaaagcaccaaacctaacagcccgaccgcccaaacctgccaagagagagccaacccgaccaaactcagaatgtagtaagtcttccctttcttaaacctctcgctgtcgccttttaactccttaaactcaccactcgcaaacagacccacagtgcaaatgagtgtggcgatgaaggaaacacagatttgcatctccaagaccatccgaaagaccttcttgttaccatacctctttgtcttcaccaacactttgtcgaatccgagctgcattaagcacagagacaaggagaaagcaagagtagggaatatgagtatcaaccatgccttgatgtcgtaaggatcagtttcatcttcattaggggttccagcaaaggcagggccaccaaaaaagtcagccccaagagtgaagattatcgatatgatgatccatctgttaaacttgagacggtttatgaaagctgagaagagggaggtgagtatcaattgagttgataacaaaattccccatcctacgtataatttccccagcgcgtataacttgctataaacagagacaagaacaccaagagaaacgtagagcgagagaactcgaaaccagccattgtttgtttgattggagactgtttccgggtttggttttggtgaagaaagaatgaagaagaatggaattaagatcggaaaggcagcgttttggatcagagcttgtgtccatgtccctttgtattgtcggtcttgatcactctctgatcgattatcttggacgtagaagaagttcaacagaagcatgacaagagagtctccggcaaagatcaagaaaccgcagataaaaacagagatccaccatttgcgttgattgagctccaaggatcgaggattctcgctcatcatttggccgcgtggttctggaccttgaaactcttccatgagtctctgcttcttcttcttcttcttctttggattgtccaaatatgtatataaagtaatcttataaaccctagaggctggagctcattctcatgattgtttaacgtgcaaacacacattttaatctggaaagataaagaagagacgaagtcttggtcacgaaatggtcatgcttttgactcaacgttgcttgattaggtctcatcacatttttctaatgagtacattatctgttaagattggttattatatgatatcaaagagcatatttggcggcaaaggagaagacaaagacagctaacaggtttaaatcggtccaaccgtaaaaccgacttcaaccggaactgaaccaaaaaattacaaaaatcttggagatccaaaagacttaaaccaaaagacgtgtgaagggtcaacacgtggcgtgaaaggagcaaactcgtgtgaatcgaagcagtggaacagtggcttgtggcttgattaatcggaaacttgaaagcttcctcctgaaggaatttagaaagcgtgagagatggcgacgaagactgtttggatcatactgttgtgtctatttgttgtttcccaggcagatcagggtttcgatgttcgtcatcacctctccaccgtcaccaggttctttctcaatccttcttatttcgtggttcccgaggaagttgaattaagaacaacactttatcatctgggtctaattggtccgattgcttgacaacattgataccactttgtcagaaaaaggtggaaatttgtgttgttctctttagcgaggtctaattattttttgggggaatttgaatttggtgtgcagatactctacttcgaaagatgttacccaaaatttgattgaagggtcgaatgttcctagtgagtgtacacctatccaccttaaccttgtggtaagcgtagtttatttgggttaaatggaatggcaatgagggagaataaagactgaaatagtggtttttgacatgttaggctaggcatggaactcgttctccgaccaagaaacgattgcgggaattggaaagtttggctggtaggtttaaggaactggtaagagatgcagaagctaggaaattgccttcagacaaaattcctggatggttgggacaatggaaatctccttgggaaggaaaagtgaaaggtggggagctgatcaggcaaggggaggatgagttataccaactgggaattcgggttcgggaacggtttcctagtttgtttgaagaggattaccatcctgatgtctatacaataagagctacgcaggttggtggattttgaatctttttatgtctgtttctgctcagcaaaatttgagatgatgtgaacgctagaatttggttgcaagcattggcctgaaatgtttaaatctcttggtagattcctagggcatctgcaagtgctgtagcatttggaatggggttattcagtgagaaaggaaatctgggaccaggccgtaatagagcattcgctgtcactagcgaaaaccgtgccagtgatacaaagttgagattttttgaatgttgtcaaaactacaaggtatagttgattgaatgaatctaaatatattttttattgtaggctcatcctcgatatagtagtcgctcagtttattcgattctgagcatttctttcctttacatggtctatgattgcagagctatagaaaagctaaagagcctgctgtggataagctcaaggaacctgttctgaataaaattacagcttccgttgcaaagagatatgatttaaaattcacgaaacaggacatttcttctctctggtttctgtgcaagcaggtgcttctttcttgcatctcgttttaaatttcttatacacacctttcaggacgctacaacacctacttctcatcattaatcaattataatgctagatttgttttgaaatctacaggaagcatcattgcttaatgtaactaatcaaagttgtgaacttttcacgccatcagaggtacaagttgctgtttatatatttgtatgcgttttaagtatcctgaagcttgtggatttaatgctataatgctagttatgtgtaacacaatcatctgtaggttgctttgctggaatggacagatgatttggaagtgtttctcctcaaaggttatggaaattccttgaattacaaaatgggagttccacttctagaagatgttttgcattcaatggaagaagctatcaaggcccgggaaggtaacctcaaactttaaccaagaaataatgaacgatttgtttgtcatcgtagacaccagatctaattatttttcctattcaattatcatgcagaaaagctcccacctggaagttacgaaaaagcaaggcttaggtttgcacatgccgaaacaatagttcccttttcttgtcttcttgggcttttccttgatggatctggttagtctatcaatttcacctctctcatactaccccacttgtgttttttgtgaacatatgattcctctcagtgcttgttcttaaaaaggtcttaaatgtcttacagagtttgagaaaatacagaaggagaaacctttggaactccctccacagcctcccaaaaccagggattttagaggcagcaccatggctccttttggtgggaacaacattcttgtcctatacagttgtcccgcagaatcctctcccaaatacttcgttcaggttctgcacaatgagcatcctattgcagtgccagtaagtttcatctaactactaaacgcaaactcaattttagctcgatcttagtggccattgaacttcagacataacttctagaattttaagaaatgacttgactcacttttctgttttgcccttcttccgtttcctaatatctctatacaaatttcagggttgtgatggaaaagatttctgtcctcttgaagatttcaaggtattttgcatctttccctctgaattttcctaccattttcattctatacctacccttgcatgaacttcttttatctttcttattacaggccaaagtggtaactcctcatctaaagcatgcttttgacaacctttgcaatgctgatctaaatgacctgaaacagaagcctgcatcaagtaagttatctatactgtcaagttggctgtttgggtcaagccacgataccgagctctagttactacacagctcttcttacatactggctgattacagtttgaacctgaaatcacacagagcattgttgtctgtttttttttttgtccccttgccacatttgtgttctagttagttcaatccgctaatctgaaatattttgattttgatctctgaatctatttccatacttgcttggtagaaacttaaagctctaaatttcagatctggtacatcgatcagtttaaggacttaaagctctaaattacactctatgtgtggatacaagccctcttggactaaaatttgcagtaaacttttgatataaagtaccaatcgagaaaataatcattatatctatctgtatattaatcaataacattataaggaaaactgaatacaactctatgatctagtaatataattgatggaatcaggatattcaagacgaatataatcatacatgagtccttgaaaagggcttgtggcgagcgcttgagttagatatatggtgttatttcccacgtgaagagaagcagcaggaacattcacactatataaccaatatagtccatgaataccatgccttgcgattgtattatcccttcctatttgctctgtcctaaacaatggagggtctgcagaaagatcgttcacccgaacctgcaaaaagattaccaaataaacaaatgaatgttttcactttcatagagaaaaaagcgtccatgcaacttgagattcgcacctgcaattctgctacgtttgatgtggctaaagcgattcgcagtttgaagtttccggttacgtttttcattttatcgtcgaactgaaatctgatctgccatgttgtacctttatatcctccatttgcttgcttcctacaaatccaatgtttatactttaacaaagtttcataatggtagtgttttgaatttaagttggtcacaaactaaccttgtaacttgcatgaagaaccagtttttagagtagtcatcaatatcaacattgtagaccatatcttcatcggggtacagttctgaatagcgttcccacaatccgtattgtcgatatttatcagaatggtttaagtatagtttgtttacaaagcttggattcgggtcaggaatgtagaactctgcagcgcttcggtctggtacaccgatttcccatagagttgaaccgtctctaggaggctcatacactaagtctcctaagctaatctttgagcctgtttccaatatttcactctttcttagtcttgtatctatatatgaattagtatcgttgtggtattagaagtgttcgaacctggagaaatgtcaaaaacggtgtcgttgtggtaatcaccgatgaatcccggagcaaatgcatagagattataacgaccacttctcacattattgatagaaaaagatccattttcgtctgctttagaccagaattgataaccctgtcaacgtaattaagaccaaaacttataactaatctaattgttaactaacaagagggagaatgaatatatgatagattaaggaagttactttgcattctctttgccatgagccaacatctcctggtgcagccaagcccacataggaaccatttgcaggtatatcctcactacttatgaatctgttacaaaaccaaactatccacttaggaatctgttatgtcaaaaaaaacgacgtagattcaagagataatgaagcaagaagtgtacctgtctcttacgagtaatctaccgctaacagatcctctttggtcagatgcaggaaaatcatctgaagcggtgaagttataaggccacttttcttcttcaatctttgtctgaaacaacaaccaaatctattgctcagctcttttgttcttacatatgaacatgaacatgtgtgtagatgtatgactaacctggttcttggcttcatgccagagcaagagaggatcaactcctttaggaaaagagttgagataaatgaagacaggtccaaatactttcttccatgcttcaccgtttttaaaactcatgattaggtctgctccaacatagtgagtgctgtgaaatacctgtttccatttcacacacatcaactatcattcatcttctattcaaattatgcgatatatgacgaaacctattatttcttaccgcaaggttagttggaccgacatgggagcctaggaattgcttgagaggcccagcagaacggaactcattgcttggagtgatttgccagaacccaactgaatcatttgtgcttatccatccatgaacttttatgtctttactctccattgagtactcatacttgtcatccacctataagatgaatcaactttaatactctgtttcctctgttttgattcctctgtcttttcaaattgaaatggatggcttagatgttttctataaagaattcaaatttacctctcctttaaactcgggctcgatagggtcaagaagttgaactgcctcgggataagcaagaggctgaccacgaggcggaacccgatcatctggcacaggcatgtacctttgcctgtcatctgaaatcgccatgtaatgaaattttttcttgtttagcttaaatactaatcgcatattatcgagttcaacagcgggccatccttgtaaccgttcgaagatggcgtaactgtagaatccggacgagttttgcagcattacaaacctgaaattaactcatgtctcatcaatatagatcccaagaaactaaagattttctctagatactaacttgactacctcttgtctatattcactggaacagccgtagttgaagatgtattccatgtccttgtaaacgatagctctattttctcatcgttctgtgtaatcacttccatctttgttgcttcaatcctgtaaagtaatccaagtaagtctcacttcacatttaggtcatattaattggtataactaaacatagacacaacaaccatataccggtctagtgtgcctttggtctttttagcctttttcccagggaagttccacactacgtcccagtaactacagaaatcagatcaattagagacttaagagtttaaacactcagaacagagcagttagatacataaagatatacatacttaccctctatcatattctttgttggtgtagtaggcgagcacattgtcgataccattatactggattccggtgacgaaaccctcaggatttgataaagttaattgtaaaaatctattctccattaccacctacaaatcatcatcatcacttagggtttcttaaacaattcacgtgacttgcatatcaagaaagccacaaattatgagcgtaacggtttaatttatgaaataggtctctctagttgttaatgaaaagctatttaagaatcttgattagtaaaaatatgtatagagacgacgtacatatcgatcttggtaatgtagctgcaagacttgtgttgattctggctcaggagtttggttttggcagaatgcaatttcaaacacagacatgaacatgatcaaagcaataacccatcctctttgtttcaataagtgtctccgataatctatttgtcaccaaacatgcatacacacatacgatatcgttttgttaggagttaggttcttatcacttatcatgttggttaaattttttcaaatttaaaaaaacaatattgtaatgatgtttattctctgatgcgtaccttttgtcgtcacgagcttgaacacatgtgaagagaagagaaacatgatgaaatcagcggatttgtcttggggctttctcgaaatctgtccacaaaatgtaataagacaaacgaagttgtagagacgaggcaagtaagaaagaaagaaagaaagaaagaaagagtccttgttttatattatgacaacatcattatataggttttcaactaataagaatcttttactcatacaaaaactttgaagtgggacaatgacaagaggcaaaaagtaaaacataagaacatgtgaactgataaacagaaacacaattaaaaaaaaaaggcaaaaaaaaggagagaagcaagttaagtgctgctttaggcaacatctaaagttttcttctgctataaacaaagaattccgtttttgtcttatggtaaaatacctttttggcgtcttgtatatatgcattacaaatttataataagattaatggatattgaacaaataattcatcaagaaatattacgatcctcgcgtagaggcatgaaacaaaactcgttctaggggttaagcataaaaaacctaagacatgcataagcggagaaattcaataacatagtatgtataagcatattttatgatataaattactcaatggttttgtttttttccctgatatatatttatgtcgtaactcatgcaataatacatacattagtagtatcacgtgatgcgattcgtacaaggcaaccactcccaataatccatattgcttttcttttcccaacaatatttagcctactcggtagatttctaaggaaactacgtacctaaccatcataacatccgacttacctgaaagtggttcggcttcttgaaagtgacaccactcaatatttcgttgtattctttaataccttttttgttgttgtaaaagtataaaaatatgtaaaaatatgcacacgaacaggagagggaatgtaacgaatgttgatgcttgaagcaaaagttgtaggcggctacttgggtggttgatttgagttagggaaagcacaaacatacatacattcatataaaataacacatacatgtaagaagagatatataaagacttttaacagaggttgttcaccagatgcttacccatatcttttccaacgaacactttcacgggttaaatttttattctatttaacagaaagaacaaaaaagagtctttttcgatgagacaatcaaatagatgaataaactacatctctctatttttcatattttcttatatctataccaaaaacaaaccataatgtcacttaccattcaatagtcgttgatctggagtctggaaatttttaaaatacaaacagtgaaaagagattgtatatatttaaaaacaccagattgagatgattcttaatagaagagaaccaatatttataaattaattttggtcgcaaaaagtcaactagtattaagttatttgttagaacattcatttgacattaaaccctctagataatcttccattcaaaaatgatttattttctcaaagaaattgcctaaaaacaattcagcaatagatgaataacaaagactggagcaaaatcctttcctatattactatcctaagaaattattaaaactggaaaagtcaagatttgtgttgcataattgtatttcacaaataaaaaaaatgttgcataattgtatgtatctgaaatgtctcctaatcttttccctttctgtaagatttacaaaattgaatgacaagatagagtcaaagattttttttttagtagtcaacaaaaagtatatacaggaaatatttcgtaccatttatgtcactataattcatttctaaaataaatgatgaaaatactttacccggcgtagagattttataattttcggaattccttataaaaaaattaatgcattatttatttatatttcttgtttttttttctcacttgtctcttatgaaataacatggtcgcttttatatattgtctatgtcaaattaatgatgtttaagtaagataatagagaacaaggattattgaaagtgaaacgcatatacacaacatttttaagcaaattttgttatagtttctgaaagaattatgcaagaaaatttgattagctgggagcttcgaatctgatgtaatcatacatgatcccttggaaaggacttgtggaccttggctgtgtgagaaacaatgtattctcgccttctagaagcttagaaccagccacttccacattgaacaaccagtacaatccatgtattccatgtctcgctatcgagttgtctctcccgatcaatccgctcgtgaacatcgggcttgcattcgcattgttcacacgtatcttcatccccaagttttgagtcaagattcatttaatttcgtcaggttgtctttctttatatgttctaatgtacaaaaagagatgtcatggattgataaatatatatagacctacttggagttcagaaaaagtagcggatgctatggctactcgtaaagtataggagtgattcttatcaatgtttttgagttcgaatttgatttgccatgttgttccttgatatgttttgttatccttttttctatgaaacgaaaatgtaacaatatggttagagaagagctcaaattcaagaaatggaaatgatcacgccagagatgatgagaaacacctagtgacttgagcgtaaaaccagtcttttctatagtcgctagagccaactacatataccaagtctttatccggataaagttctgcatatctttcccataaaccatattgccggaatctgcaagagattaagaaattcgaataataaaatcaaaggtgcattttggtaataaaaggaattgcattttagttcattctaatgtttttttttctgtatcatataattccatttctatttatatgttctgttacttttgtctaagtacaatgtaacaagatttgtatgtgaatatatgtcaaaacctgtcagggtgattttgataaaggttgttgatatattttggattaggatcgggaacataaaactctgcagcagatcgatctggaaaaccaatttcccataatgttgctccatttcttggaggttgataaacaagatcttccacatatatataacatcctgcgcatataatgaattgtaacaaaaaaatgttttggggagttaatagaaagcaagaaagaaaatgaggacctgaggtgattgtgataacatcatcgtacttataatcaccaataaaaccaggaatccatgcatagagattatactggcctggccttataccactaatgtaaaaaaatccttcttcatctgttcttgtccaaaattgatactcctgcaatgaaatgttcatggaaaatttaacttgtgttcagaacacttccatgtctcctttattggatttctatcaatttcaaaatcaccttgcattctctttgccatgaaccagcagctccaggcacagccaaaccaacataacctctattggctgcaatgaaatctttatctacataccttaaaatcataaataaaccatcacttagttattatagtgtaataacgaccacaagatgtgaaatatttgtggtatttaagtactaacattaaaaccaacggggttcacttattagtttacctgtcttgaacgaggagtctgccaacaacattaccacgttgttctgttttcacataatcatccgaagctggaaaactgtaaggccagctctctgcttccacattcatctgagaaagtaaaatatatcaaaggaatggaatattgtttaatttgtcttctaactatataaaacaagacttaaagatgaacctgagatttagcatcttgccacagccaaagagggtcattatcatcatcagtagacgagtttaaatagacgaaaacaggtccaaacaccttcttccatgcctctccttcactaaactttggcactagatcttcccctgtgtagtgtgcactaataaatacctaaagatcaagcgtcaaacttgtcaacatttataaggaaaacatttctagtattatctatatggacttacagcaagagctgtgggtccaacatgagatgtcaagttctgtttttgaggtccaccggttcgatactcatggctaggagttatgagccagaaaccaaccgatggctgctctgtgcatatccatccgtggacagtaatgtctttgttttcacacgaatattggtacttatcgtcaacctaaaaccaggttaaagcaaagtttacaacttcttacacaagaaaacagtttctctctaataatcttgaagaggaagaaaaaatgaataaatttgacctctcctttgaactgagactctaaaggattaacaagtagaacagcttcagggtaagccagagcttggcctctgtccggtaaccggtcatcaggcaatggcatgaatctctgcctatcatccgttactgccatgtaatgaaacctgaaatcacagttaaaatttataagtaaaagtcaaagatgtttaggaagtactgaaggaatgatttttgagtttggttacttctcttttctgagcttgaaggcaattcgggtttcagcaagtgagaaagcaggccattcttttaaatgctcgtagatagcgtaagtgtagaatcccgacgatccactaagcataacaaatctgtttccacagttcttcaggtcacaatatgaaaaatatgaaacttatgcatctcagaagactaagtaccttttgtcaatattgagagggactgctttgccttcttgtgatggatcccattttcttgtgaaagaaagctcaatctgttcttcattcttcactatgacctcaaagtttgatcctttgattctgtttccaaaagaaaataattatgcactagtttctttgagctttattgaatctctcttggctgctatatgtaagttcaaattctatctgaaaagatgtgattaatcttattttggcgttaagcttacatagaagagacttacacatcaaagccgccagctgttcctgatcctccccaaacgagatcccaatacctgaagatgaaacagagacaatgcataatccaatttaacctaaacttaggaaaaaaaacaaggatcatatatataaatcccattaccctctgttgacttcttcattaagaacctcgagcaagttatcgatgccattatactcgattccggtaacaattccatcaggcttagataatgtaacccgtgcaatgccattatccatcaccacctgaaacaatatccatacaccagcaatttagtaagtttcaatcttctttagtatctgctgagaaacgaacatagaagatcatgagaagagttaaagtaaaaaccaacatgattgcccttatcatgcaactgcaacttaacatacgacattttgggaaaaaatgtcttgtgggttttggtcttaagctcaaagtaaatgttacatgtttttctatatataaagatccgatttggagaacttatgttgccttggacgagagataaagaataggatatagtggagtatatcttgactttgtcgttaaaacagttcggttgttagtgttacgacgacatttgtgtctttcaaagctttcacttacgtcaacaacaaaaaaaactttggacattgttccaaaaaaaaagaaatcactcgaacaaactttttaggttgttcgttttatatatactgtatttgggctgaaaagaaagtggaaattttactacaacaaatataattatttgagtgaaagcccaaaaccaaatttaaggcccaaagttcacaaagctccaaaaaagacaaaacagtgccatatcctttcgctcactggcttaaacccgcctcctctgttcttcttcttcttcttcttccttctctcactcgaaaatttcttattagatgtcttaaaactttagtttaatttgtctactttcgaactttggcttttagttttgtgggggaagattcattgatatacctctatggatttgatggtgtccacaagcagtgctcaagaagggttttgcttgattcaacaatttcatcgcgaatataaacgaggtaataagcttgacgtctcatgtcgtacttctggtagtattagttctaaaatccctcttgggtcacgaaaaaggaatcgacttgttctggtttctgcggcttctaaggttgagagttcaggtcttaatggtagagctcaaaagttcgaaactttgtcctctgggtatagcaatagtaacggaaatggtcattatagctctgtgaattcgtcttttgcgttggaagatgtcgagagtaataaccatttgcgtcagatggttagaaccggtgaattggaggaagggtttaagtttctagagaacatggtttatcacggtaatgttcctgatatcattccgtgcacgacattgattcgcggattctgtaggttgggtaagacgaggaaagctgcaaagatcttggagattcttgaaggctctggtgctgttcctgatgttataacttacaatgttatgattagtgggtattgcaaagctggggagatcaataacgcgttatctgttcttgatagaatgagtgtttcgccggatgttgtcacttataataccatcttgcgttctctttgcgatagtgggaaacttaagcaagccatggaggttcttgataggatgcttcagagagactgttatccagatgtgattacttacactatattgattgaagctacttgcagagatagtggtgtgggacatgcgatgaagcttctcgatgaaatgagggatagaggatgtactcctgatgttgtgacttacaacgttcttgtgaatggtatttgtaaagaggggagattggatgaggccattaagtttttgaatgacatgccgtcttctggatgtcaaccaaatgttattacacataacataattctgcggagtatgtgtagtactgggagatggatggatgcagagaagcttcttgctgatatgcttcgtaaaggcttttcgccaagcgttgtcactttcaatatcttgattaatttcttgtgtagaaaaggtttgcttggccgagcgattgacatattggagaagatgcctcaacatggatgtcagccgaattctttgagttacaacccgctgcttcacgggttttgcaaggagaaaaagatggatagggctatcgagtatttggagagaatggtttctcgtggttgttatccagacattgtcacctacaacactatgctaacagctttgtgcaaagatgggaaagttgaagatgcggttgagatacttaatcaacttagtagcaagggatgttctcctgttctaatcacttataatactgtcattgatgggcttgcaaaagctggtaaaactggcaaagcgataaaactgctagatgagatgcgtgcgaaagatttaaagcctgacactatcacctattcctctcttgttggaggtttaagcagggaaggaaaagtagacgaagccattaagtttttccatgagtttgagcggatgggcattaggccaaatgcagtcacctttaattctatcatgcttggactctgtaagagtcggcaaacagatcgtgccatcgatttcttggtttttatgatcaacagagggtgtaaaccgaatgaaacatcatacacgattctgatagaaggcttagcttatgaaggtatggcaaaggaagctttggagctgcttaatgagctttgtaacaagggactcatgaagaaaagctctgctgagcaagttgcagggaagatgtagcattaagtagtttactcacgattcaggtctcttgtgttgatttgtgcttaagagaacatttcagtagctcctttctacttattatgtcttaggttcagttgtaatgttgtcagaattttggtttggggagtttgcatatcaatatgattcagttgttaccattatcttttggttttattatatatctatacataaacaatgatatcacatatcattctaagctaagaaggagggccttcaagacgaatgtagtcatacattatcccttgaaagggaccattgcatcttggctgtttcaggaatatagtattatcaccttgcacaagccggttacccggtatgttcaccgcatacagcatgtaaaccccgtggatcccgtgcctcgctattgagttgtctctcccaatgagtccggttgtgaagagagggcggattgcttccgcatcattgattcgaatctgcaaatagaaagtaccaacaaaactttacagtcttatctcattcttttctgtagaaaaatgaagtttcatctttacctgcaactcggctaaggttgcagatgctatggcgactcgcagtttgtaattggccttttgatcgatgttttcaagattaaatataatctgccaagttgttccttcatgcacatctcctttcttcctgggaacatgagcaaagaaccagtctctgcggtaatcactcacaccgacagtgtaaacaaggtcatcatttggatacatatctgtgtatttcttccataacccatattgcctgaacctgcagataaataataaagcagtgttgagttcagtttctcgcacatccaagcagtaaggttcacaaaagtgtagctaataaacctgtcttggtgatggactaacaccctgtttacaagagtgggatcaggatctgggataaagaactcagaagcttttcggtcagggataccgatttcccataatgtaggtccatctcttggaggttcataaacgatatcacccatctcaatcatgcaacctgtgttgttttgcccatcaaaatttggctgatatgcaggaacctgtaaaattagatagaactaatttacctgaagtcactctaacaattgtgccgttgtgataatctccaatgaaactggggacccaagcatagagattatactcgccaggacgcacgttccctatcgagaaatagccagcctcatccgcaatagcccaaaattggtatccctgattggcaaagatttagtgtgtaaccaatgctcaaaatgttgtactctttacagacaaatatttattttgttggtaattccatcataaatctctttcttgatatctttgaactgacttctatttttgctcgttgcaactaattaagaatggagaaggaagaaatcaccttgcattcaatttgccaagaaccagaatcaccaggcggagccaaaccaacataagcacctcttgctgaaatcaaatcattgtttatgaacctatacaaaaattcaacatgttaatatacactaagaaatattacagaagcaatataaaataaaggaagatgcaggaaaaagaaaaaaaaattagaatgtaaaaaacacaaatacctgtcacggataagtaatctaccacgggctgtgccacgttcttcagactttggatagtcgtcagatgccacaaagctataaggccacctttcaacctcagccatcatctgcagattacctcatacaagtgagcccttacagtaccacaaatctttttctgtattcagcaagtccaatagcgatttgcttcactcgtacctttatcttagcatcgtcccataagcaaagtggatcatctccattggctgtggaatttaggtaaatgaaaacagggccatagactttcttccaaggctcaccgtgttcaaaacgaggcatcatggtttttccagcataatgagtactgtgaaacacctgaaataaccattacggaaattaacacttctaagtattatactgaaacattcaccacatatgtcacagggacacttactgcaagagtggttgggccaacatgtgaagtcaggttttgtttgagtggtccgcctgagcggaactcattactgggcgtaatttgccaaaatcctactggtggatcgaaggatatccatccatgtactctcagatccttattctcacacgaatattggtatttatcatctacctgtcagagaagaaaaatgatttagttatctgtgaaacagtatttaccggattcattatttgaagttgtaatacatcacaaaacgagcataagttcataatatacgcattcatgtatcagtaaatgggagaataaacagctcaacaacgcatgagaaagaacaaaatgttgtaatttctaaacgatggaaaaaatatggaactcatacttcgccttgtaggcgtggatcacaaggagcagtgagcagagaagcttcctggtaatctagagtttggcatcttcctttgcatagatcatctggaaaaggcattatcctttttctgtcatctgccacagccatgtaatggaatctgtaaaaaaagaatcgcaacaggaaaatatatgagtatcaaacaactacacacttttgtgtttacgaacaattaaacccaataaatagatatctgacatattgcacaattcttttgcttggaatctatggtactcttcacatggacaggcaatcactaacatttctaactttcttctcttaaggagattagacattacataagatagagaatggggataatattacttgtcttttctgagcttgaaggcaattctagtttctccaagttcaaagccaggccaatccttaagatgttcataaatgccgtatgagtacactccagaagagccacggagcattataaacctgaaagaaagagcaactagtcaatgtctttctctacttttgtttctcgccaaaggaaatatattatgtaagatagaccttttatcgatattcaagggaatgtacttgccctcaagggatggatcccatgttcttagaaatgagatctcaacctgttcttcggtctcgactatgaccctgaaagtcactccactgatgctgcatatatgatatcaaacaatccaacgattagtacacatcatataccatccaacaattagtaccgattatataacatcatatacacaagagaaaaaaagagaaaagcattaaaagagaggattctgatgcagcagtgacagctgacaacttcagttaagcagaggaaacttgttttgagtatacatcaacttaactccaccaatatcgaaaaatcccactaacagatgttgcaatcaatagcacgatgaagacctatagaataacattcctgagctcctaatcctagtgaatgttaaggtaaatgcatagagtgcatacacatcaaatattcccttgcctccaggttcattccagtgcaggtcccagtacctatacattcatttatattatcgattaacttggcttctcacagaatttgaaggaaaaaaagacttttgttctcctctgaagaaagcagtataactaaaatcatatattaaaacatgattcataccctctgttagtctccttgttacgaacttcgagcacattgtcaataccgttatactctatcccagtgataattccacctggctttgacagtgtaacttggaggatcccattgtccatcacaacctgcaccatttccgtctatagtcaaaacacattcaataaaagacacatgaaagggcacattgtcgactgaggacgttgcattacatatcgatcatggacatgcaggtggacaccatgagaggacatcctgtgatccttcctatgactaagaccacttgtaccttgatctgtcccctctgagcctgatattagtgtaaggaaaaaaatcaacacttttgaatgtagaaaaactaaagagattaatatgagaactcctctttacgcagaatgcagcagcacgagatactcaaagtttcataagtgcttgtgtaaaacaagagttttgaaatggtcatagatataggatctgtagaacaggtcttaaaacaaactgaaaaggcgtttatttccgatagtcaagcaaaatggtttatttccgatattcaatcaattgtaactctgtgatcgtttaaagtcccttcctttctggatttatacgtagacccagtgaagggaaatcatctttcaacaaagaaacaaacccaatttgatgaaacaaggaaagaaaaacagtttacagtgtcataaaaaatgaagtaaacaacaaatttaagcttatttactaatccgggctaaaaatacaaactttgctgtcacaatttcgttgagcagcctaaaaaccattctcaagtgagagaaattcaagaggatgaagaaaccatgagaagagaagggtagacgagaaatcacagtggtggccggcgtttaaagcggtttcatgattagtaaaacgatgaaggagccgatcagccagtttcttcatcagtattcgacccaagtgatcaccaccgaagcccagagagagagagagagagagagagagagagagagagagagagagagactgcgttagcgtttgttaaagcgcttctgtgccttggtttaggcacgactgcgtttgtcaactctcaaggcattgcctttgcattcagttttaattcttatcaaccaaaccgaatgtaatttgattttagtttggttttaactccaaaaagaaatctgaaatctcttttattgaaatcaaatataaaagcaagtctcatggtgatcagctcaaacaatcttttggggtttctcttgtctgggtaagctttaaaatgtataaacccttccttagaatctgtctgaaggatttgaggcaaatttacagaattacagataagctacgcctcctctactcaggcttcctctggaagaacaaggatcctattatcacagctattcccgttattgctatcgtgaagaaaagccttttgttcgaaacaccgttcccatctcttcgtcttctcccgtttccatctccttctgctgctctcgggatccttctgtacaatccatgtcatgacatgagtttagccaaataaaaaaggattaagatctgaatcagagagttttcaaaataaaacaatgaagataagaaaatgtacctggatgattcaacagtgccagggcatttggtttcatggttatatctttctctcaatctaacatagctgttgcattgataacagagttctgtcctgttgccacatacttcctaatattcggaaaatcgagcggatcagaaaatcctttagttggagagaaaaggaagtgtgcaagtcagagtgaatacctgatgctcggcaagatcaaccgcaggcaatggaaactcacagaactcgcatgttacaatcctcttggggcaaatttctcctttatgactatcgaaaatctcacgttctatggtctctttgcacatcgagcatgctatcttctcaatacagaacagaaagaatttcgtaagaaaatgtaggtcatttcagtcatctagcagcatctaggccatacaaaaatcctgagtctaaaacagaaacaaaacaaattcctacttgttatactgaataactattctcgacctagtaattgaaacagtcacaaccttgcaaacacaagctgcgcttgggggagttcttgtcaaccataaaactcaagaacagtcaggaacaagcgttgataactagctgtttgtgttacacactaagttaaaaagtctaataaatgcataagtgatctaatatttgttaattgaaacaagcttaaaacccgttggagggacattaacaaaatatttgagagcagaatcctatcatatgaaacaatgtaaatccctttgatcaacctatttggacgtcacactagacaaagtatataattttgatggagctaacaaagagaagctcttcacatcaaagatgacagttgtggaaattaatcaaacagaaaacagtttaacaacaagtaagaaacagagaaatcagtgtaccggagcatgtgtgttcaagtagtgttcctcagcatgctttttgggtaccatatcaccacaaatcttacatttttctaaattccgagcacaatgtacacgatgcagatcgatattcagtgatggaatgtctctgtcactgaaaacattaagataatcagtctcatgggatcaaccatccaggtaaatgctaccactgaacatacacaagggattagatttactgatcccaaataagaattagggcattcaaaaatttccagcctcagcagactcaacacaacaataactagacaaagcatacacatatatctttagaaagtttagaaactaagcaaaccatcagacaaatcgtagaaagcatgacgataaacagaagacaataaaactcttgtacagacaccaggaagctgatacataatcaatagatttatcatgaaggactttaagcaaagtaacaaaaaagaatcaaccttttagtaggtgaccaaataaaaatgaactcttttagaaaaaaagattgtatatcactaatccatccatcgaatccctagttatacttgtaatcaccgacacaaaccgtggaaccaaactgaatcatacagctcacgagtatctttaatgtgacacatattctcaattgcaatcaccgatcaattccaaaattgttataacctcgagtccagaatatcgaattacacaagtcatcatcgaacgattacgcaacaaagagaaagcaaccaatcgccgaaaaaaactatgatcaaatagaaacaagtcaacaaccacagacagagaaatcaatggttttaggggggaaacaaaccagtggttgcagacgatggtgatttctccagtcgcagtctccatcgtcaaacgagaaacaaacttctatttcgaagcaaataacagatcagaggagaaccaggacgatcagagacctgaagaaacgaaatttcagaatcacgaattcaaccacggatctttgaacttcgttttctcggattttgagatataagagagagagaagagagactcaaaattattattagtgaataaaataaagaaaaattgatgaatatggttgaaccaaactctcagattaatgaatcacttttttttttggcgtcaatccaaattgataacccacgctcctctacttccttctcgtccacgcgccacattacaaatactgtaccttgtttagagtttttgcattacttgtataatcttatattttccactaatttagatatataaggtttttcacgtaaacaaaataatcccagatactcactcttaccaaattttagtataacagatacatggataaaaaatcattgagtctgtttttgttaacctatacgattcgtaaaaaatccaaaaaaaaagatcagattcaagtctaaaaacgtacaaatggaacaaatatcttcaaaaagaaaaaaaaaactgtaaaatctaaaaaaaaacaaagaaaaacaaatcttaaaaagactttaaaaaacaggacaaccatcaactagaacaccaggagcagtaggacaagaagcaagaggacaattctcacccttagcaccccaccaatgatttatcgatattccattcatcgtcaaactaaagtataacaacactcccatgaacgccaatcccgcatccaaagctgccgatagcacgtagttatacctctgccaccactttttgcagtacttgaacacaaagtaattgaatatcactcctactatgatccagcagttgaagttcacgcttgtcgctggcggcattgctgctgttgctcctaaaagaactgggagattgatctgcgagatccatgttttcgttgggaaggctttttggagaagccacacgaggaccggtcctattagtccacctaagaagaaccagtttagtgcagggtagtttcctagccgaccaaagattctcttgggtcctactaatccccaaatcactgatgcgtcgaagaaaactctgtcacttggacatgtccatggactgtttggaggaagcaactccttctggcagatgttttctactgatgtcagcaagtaccatgccactgatatattcactgttcctgctatcaccgttcctatgaactggactaagaacatcgatcttggtggtatcttcatgtaatggcctagcttgaagtcgttaaggaatgatatagcttgtgacatgcttatgtacccataagttttgaagcagacgttagctattggtctccccggtaacaacacacccatgagatattctgtgataatgttcagacctggagtctgcatcacaacattttcaaagtgagaaaatatccaaatcatgttattttgaggaatctgtagtggaagttatatgtggtacctgattagtagtagctgtgataatgctgactggtacagtgaatgtaagggccatgaatgatgctagaaggagtccccaccaaggcatttggatctcgtctttcatgaaaatgcagaggacaagagatagcaccaatgagatcgcaagcagactgtaaaaccaccaacctggtatgtctttgtacttcttcatcaaccttgtgtgtatgtccattttagctttagttgaagctcgtacttgttgccaaattcccctaagtcaaaaaagaaggttagtgatattttcagacattggtgcataagttagtccattatggatattcctgacttactttccattgaagagagcaacatgagtcagtgtggaaacgattgctgcgaaaccaatcccgtaactgatagcaaagaacgtactgagataaacccgaccttgttgttgataattctccatgtccaattcaaacttgttgttgacaatggtggagatattgtaaagttgcccttgcttatcaaacagatcagaggagaaaattggaaacttgtttgcttcatacacattcatgccccaatatgatattggtataaccatatacatgaccaaaacgtaaccaacaaggacattgacaattgcaaagaaaggagtcacaagagggcttccaaggtaagaagctataacagaccaatcaagagcaaatgcaccaatcccaagtcctgacattccagatcctaactgctgagctgtgatagacttcgggaatgcccaacaaacccaagatattgatgataaggtcaagaacaaataagctgggaatatgtaccacgcgaagctacaaacaaacgcaatcacaaagaactttcctcgtgacattcttgcattgtccttctcatgaagagcactgtataaagatcaaagacagtgtcagagccactaagtaaacaatagtaaaacaagtggtatatatagtatgctctaaaatgcatcaatcagcataccgaaacagagagacttgaagaacactcgtaggccaccacatctgtgcaggatcaacaactaactttctcatgataccagcccaaccatacccaagaatctgatcattcaacaacagagaaaatcatcatcagctatatattcacctagaacattataaaaaaagggaaaaaaaatcagaaaacattgaacctgagtagtgatgacaagaatccaactagccaagaaactaatcttccttttataaaaagccatgatgatatcaacaataccaacagcgtaagcagtaccagatccaaatccagcaccagcattagcaaacatagagatcaacacatgttccttgacgttaaagggacccggattaaaagaaaactcccacgaaccaatcttatacttggtctcaggcaaaaccctagccataagcttccctaaaggcaacgtaacaacttgaacagagatcatagtgatcatcagaggctgagttctgtatccgaagaaagtgttgagaaacgagaggagaatacaagagagaagccctaaaaaccacatccgaaacgtccacactggtagagaaggatcgtcgtggttcgatacagtgagacgaacctgctccaccggggattcgtcatcgtcgtcatcggcgttgatctccggcttgtgtaattcaatcgcagccattgtttgttgtggcgaaatctagggttatggaatttggtgaaggagacgacgtcagtgaatattggaggaatctttataaaaagagattcgtgaatctgttaaatgagaatctttttagtaattatattttcagagatctgagattttgatttatctgatagacataaaaattaaataaggaagagtaattatcgaaatttgttgcaaacaaaacacgttattccccgcctctttaagcgggaaataatcttattggtacttactaatgtgttttttttaacagttattattaaagtaacataattttaacccgatgttcgctggtttttacttaaatgaaaattgatatttatgactttattcattaggcattgttttcggcaatatctacgtgattcaatcatcattttttcataataattaaaaaaaaaaaaaaggaaaagcttttatatcatttgcaaacgttatctttctttttttcgatgtaaacgtatctttgaaattatagatttttttgttactagtgattgattacaatgtattggtgctggtagcttggtaatggcaaatgggaatagtagcttcgattttccttggttctgaaactccgatccatgagtgtggcttggaaaagaaaacacagttcatatataacatatgcatgccttctattcaagcgtgtgaatggaaggaagttgaaggtggagtaacgtaatttctacagttacaagtcattaatgtatccgcttccatgtcactgcacttaaacgtgtgaacattgttaaaaacaacactacttgtaaagttccttcaatttcctaagctaattttagttacctcttctctatccgaatcgaccggagttcacaattggcaaacctaaacgaatcaaaaaaagaagataaattaaagtcaatttattatgcatatagttttcatgtatctatgtattgtatattatgtactataatatcttggaatctacgattagagtggttagatcggggactagtataatcaccttgtaaggagactatcttcaagaggtatgccaacttttccatgcagcgcacaaagtgtttgttgcaagaaaatcccgtggcttacaattgctatctctttttctggtctctcccataacctacacatgtttttttttttctaatcagtgtaatgttgggaaagaatagatttaaaaaaaaaaaaaaaaaacaaagaattgtctaacttttgaatcatacaccgagatcttgattccaagcataacaaacactaacatatttctaacttagtatataaaagatatatgtcacttcattatcaactaattttaagtttgtaatccagaaactgatatttttactatatagttcttcttatagttgtagtttcaaaatgatggatattagaatgtcccatattggacgttgagatatttctaaagatatagatcggaccaccatataatataaagtccaaaaaattaaagttggtggtcaccatttaacaaagtgaagacctctagtagcaacatcttctaatttttccctttccttgtcttgccatagagcgtcttcatcactctctatctattttaaccatatgaaagaagaaacaatttactaaaatttgatagatatatagaagaagatcaatgcatgtgagcttctaaagcaacggtgagattaaccaccattgtaaagtcgatctcaggaaaaaaagtgcggcgagtacttatacttgctctacgatcacatggatagagtccctgagaatatcgaacagttagagtgcattttgattcatcattggaacacatatatagtaagcatatcacccatacttttgggatacaatataatccattataaaaatcgataatttcttaaaacaaactcaaattagataacaactttcagttgtatcttaattaaaatttatgacttaaaaacacaatgaatgttgaatattaccatgcgttctctacagatctcaagtgctacaattggagggaagttgttagcttttgcaaagtcttcggatatatttacatatccttgtcccctaaatattcctattgaagtttccattgctctgaaattaaatggaacagtgttactattcgtgctaccaaattatgtataacaattctaaattcttcacattacataataatcaagaatatttgtgaacaaggaacgacttgctcgattgagacttgggaaccatattagaaagaaaaaatgaaaagaaaaaaaacttcaaggtttgaattatatgatatatcgaataattcaactaatcatcgttgaaaatatgaatgttagatatgcctagcctttaggtcgatcatttattttcattgatattgatgtttacgactttacgatttaccaattctttagcctaaaatccaaatttaggtggtagtacctgcacagcggagaggttatcactaactcgacagtgttaagtaatcctgattcaaggatttggttgcgcctttccgaaacctgcaaaattatcaagaatgtttcataaatacaagagtgcgtctcaaggtactatatcaaaccctaaaaatttggattatggtggtaatagttaatagatgtagttcccacacctgttgcaaaccctttggagaaaggtgggcgtcaaaaagcttttctgattcaggtttctctcccttctcttctaatgctatattgtggactccttgtgcatgcctcacctttattcatttccgatccaacataatttagacatctttttgctctactttatgaataatcagaatcaaaatcaaaaggtcctcagacatagaagaagaacccacgtgaaaatgttccatgagatcgagattgctagcattttccatgcgatcaagattgaaatggataaataaatgcaagactaaccaaatgaagggttttgaaatgaggcgatgagaggcgcagcatctgagttccacataaatccatgtatgtaggtagtgacgtccttaaactacctacaatatttacaaaagcaattgtaaggttcttcttcttctcttcttcgtcctttcgtgttcgtgatcatcatatataaatatacaaaatatacagtatatatcgactacaaccagtcagtttcatggaagctactcagaagccactttgaaagtatatttgaagttttttatagttgaatgggtcacacgtcaactctcatatgccgtgttttttggtcattagttttcttctttttcctttttttctcaacttctattattccttttaaccgtccataattatttattattatcatcaatctttttgatattctttaggtgtttttgcaaaactatattcgtaaattgtttttccatactaaaagaattgttagatttcttataaaatataaatgagaaattcagagaggtataccactcaccaaaatgtttgaaagaaaatgattcatgtagagtttttggttcatgcagttatttgtaaaatcgttggaatcatccgttgaaacttgaaagtaaataaatatgtatcaagaaagatgtgctaaatcttgaaacactggtgtggtgttttacaacgctcaaatatatttaaaaaaaaatctgtaagcttgaagtagctttttctcgttttttttttttgtagattgcatatcaagtcttttaatttgatcgtatataatatacggagcttgcccgaagtgggttaccgacttttggaatagataggttggttacttggaaggaacttggaagtctcttaaacaaaggtacaaaacagattatattcttaaatacatatcagattatatatatgatagttttaattcagtttgtttaatacatttcctaacaaatgcaaaagaccgaaagtagataagcgagggtttcacgcagatagaagaagctcattgagctttaacaataaaatcaataatacgtaatttcttcaaagttgatttaataaagactccgtcagttctttgaaacttcctccgtggaatcaattctccgtagatgaagccatgctgaaaaataaaagtattaacgacgctaatggtcaagaaatgactataatcataattaagtaaatgaagatcacactaaccctttgtctacaatcacgacagtacgaatttcgcaattggcaaacctgtaaaataacatattagtgatcaatagattataattggacaatatatattgcaaaattgaaacctttgtattacctcttgcaaagttcatgtctaattgacaggtcacaatcgtttgcaaacacatacaacatatgctgcaaaactattccatggctaacaactgcgacctccttctctggcctcttccataacctaaatacagcaaaattaatgtatttttctaacaagatatatgctaatgttatttatacttcacgaagtcaaaatttataagggttaccatttcatgaactctaaccctctcgccaaaatctcctcttcggactccctaacatccggtctccataggttgtcctcttcactttcaatctatagcatgatccaaaatattagagaaaccacaatgcgtgtatccttacatatgttgaggaagcttcatgtataatttatttatatgaagagtgaaaaaagctctttgcctgagagaaatcgatggtggggaaaagagtttgatactcgctaacgtttcttctcatgtcaggaggacggactccctgcatgcacatatatatacatttcgatatatggttaacatgaaattgtttgatagacgacgatgaatatatgaaacgtttctccatgtatatatcaaacatacattacggtctcgagcaacctcaagtgccaaaatgggagggctacttgtcatactcgattgtttgtattcatttccaaaaacaccaactgcggtttgcatagttctatatatacataagccaataaaaataatcactccaagtcactaaataaacatacaaatataaccaactttaggcttcaatgaatgtgtacaagtatatgttacctaaacaacggagaagttacaactagctcaaccctctttagtagcccgcttgaaacaactcgttcgcggagattctcaaccttaagagaagcgttaaacgattagaagttatcacaatgcacgaaggagatctcctaaggcgattttgatccatgtggttgagacaaaaaaaaattaggatttagggttcacctgttggtgaccatgatcggtaagcggagcatcaaaaagatgaggagacaacaacgcatttctatctttctcagcttctacattgtgcaacgcttgtccatgtcgcaacttcaagaaaacaaagaagaaacatcattaatacttatcatcaccaaagtcatattaagagtgaattgtgtaataactcatcctaattatttgtgacttaccaagtgaatgattttacagctctccaaggggtacaagaatcttgcatccatttctctacacattatattattaatattttctttaagaaacaactaataatttcattgtaaatatgatataggcagacaacatattatcgagaacagtaattacactagctagaaagattagaattgcaatatcaaacctattaaaaagagcttttagcaggaaaataatatctcaaggggtcttctttgatctcaaggttatcgtaaagtgatgatattgataggcaaaatgatgggctctctttgtctcctttatatactgggaaataatcaagaccacacaggtgaagtcgaattgtacgtaaactttcatgcaaatacaagtcaaactttttgatctgcagactcattcttagcttggtcttactaatgtataacaacgaccaatttcaaatgattgtttccaagtattatatttttggttttagattctaattatcattcagaggaattaattccccaagactcatttgaattaatacaacaacaagaacaaaacgatagttaaagagtttttttctctttaatcacggtcgatatgaatggtttgttccatatatacaaaaggtatatggatctaaagaaaccatatgatcatgaaattcagtatctcgtaacaagttgaggcatagtaatataaatatattatcatatattctattttgtttatatcaccaagaaattgattttattttatttttcatccaatttttcaacattggatcttagagccaaatacggatcgaagcatgtagaaaatgaaaaaccgaaagagacaaaagacatcgtgcactacaagaaatttgttaatatattatatattgccttgaactggaaaaattaatactcgttagtcgttagtctttactcgtttagctttgaaactttacatttccgtctttgatataactgaagatagttgtcgtcaaaaacatgtcgaaatattttagttagaaatttctctcacacatctatctagaaacctttatgattagcaattgagtaattaacaccatctatctagaaacctttatgattagcaattgagtaattaacaccaatattctagaatttttgtactgtttgttgatcaagtttaggttcgtttgcttacaaaaaaaaaaatcgattcaccctaagaattcatgcaaaaactcccaaattttagttaccaaaaatcccaagaaaatttgcataaacaaaaacgttgcaatgttgttgtaattttttttatgatggaatggtttgattgtgaaagacggattatcaatttacttacatagagtaatcaatgcaaaaatatgaaggaaaccgaaattttacgtcaaggctttatttctcaaccaaacatcacatcaagatagttgtatattttattttattttaaaaataaaaaaatcttcaaagcctttttgtttgcttctccaataatggttatcactgtttcgaacgcaaatgttaattagggaaaaaaaaatgtatatatattatgtgtacaaagttttaaacttttaactttaacaaaagaacgcaataaaacaattatggtatgcttcccatcaagggcatgaaccagaagatcatcttccccagaggctgtcttcaccctctactcaagtgtgtatattacaaaggtgccggtttttaacctctacgaacctaaaaaatggatgaaacaaaggctctcttctctctactttttttccacctttgctctaatcttctcctcgagtatctctgcatcaagtccatacatcctgttcagagcctgcatgttatctagtgtctcactcagcgttctgctatcgttcccatcgcatctcaaatgctgcattggaccgtgcaggagcttgttcactatacctcggattagatcatctactgttttcctcatcttcttgttcatgtcaatgcccattttgggcaaggatttctcaatctctgcagctataattctctctgtatatccccttaatttcttgattgttggaaccgtctccaacgagtccctccacgcttcaaagtgttttgattcatctgtaattatagcctgagcgtccattgctttcctcaccctgtcttctttattcgcagcaacgacttccttgaggtcatccacgttgaaaacccgtgtaccgtctatttcagcgacgcaggacccgacatttctaggaacagagatatcaacaaagagcctcgcatctctaacaggagggagagtctctacttgctccttcaagaataatggtgtctcagatgctgtgctagtaaagactacatcagcttctgcagcacaagacagcatctcatcaaggggtttataaataatctcaacgccaggcggcatctcattgcggacagctgcaactttctcttcgcttcgattcacaaccaccattttggtgcaacctttagcaaccaagtgcttgattacaagcttccccatctttccagcaccaactaccaacatcctagcagatgatgcatgagaagattcgggaagcttcatgagagcaagttcaactgcagccgagctaacggaaacagccccagcagcgatatttgtctctgttctgacacgctttccaactgtgattgcgtgtttaaatagcccactgatattcctcccaaaaccattgactccttgacctactttaacaacttgtttaacctgtgcaagtatctgaccttcacctaggacaagagagtctagaccagctgagacttcaaatatatgttgcgtgacatccttgttgtacaatagaaaacgatgctgacagatttctgaaaccgggattccacttgtctgacaaaataaataacatatgtcagcatttaccattagtgataagaacatttgcaagagaatgagaaatgcccaaaacatcaaccagtaaagaagttactcagacataagaagaagatcattctagtgactgagattaagcatgggaaagagaaacaccttagacatccactcagtcacttctttgactccacgatgctgagatagagccaaaacataaatctccattcggttgcaggtactgagtacagcagcttcttcaatatgattcaaaccacacaattcagcaatagctcgtggccattcagcttctggaatggcaagcttctcacgcatctcaacaggagctgtgtgaatgctaagcccaatcaccacaatgctgcttctttccttagtgtatcctagttaccaaaaaagaatcgagttcagtaaaacagagctttgggcttcaagaagtatacaatcaatctcctccacaaatctaaatccagagtaatcatttcatacgcaactaaacaaagtcaagactagagaagattgctttaaagttaaaagatacatctttgggtaagatggataatgcaacatgttgaatagcttcaaaattcaaaattggcaggacgaacaaaaacccatcatcaaattcaaatctagaattcaaacatttgaaaagcagagaaattcgtacggtcaatagcagaagtcttgagctgctcgagagctgagatgctagctgccttattagacggagaaatctcgcaacgcgctctctggatcagacctcgcttgttcctattgttcatcggaagagcacgtatcccaattacatccaacggggccggagaagaagaatacgttggattatggtgattcgctaacagcttctccagcttcggtgtaacaacgaaggcgctagaaaccgccatagattttgagttttacaaagcaataatctcaatatctcaattacacacgaaacacccccttcgtctccggaacccaaaccctagagatcaggaatcgagcagacaaagagggaatttatgcgatcgttgaagaagcgagagagttgataatgatttgaaaaatgaaaaaatggtttggatcaggagcgtgtgttagttgaaagaagcaggtggatccgggtcgggttttaagaacaggtcaattcaagaccattgaggctttgaccaaaaacaatttggacggaaaaattctaattatgtatgtgaaaacggtatctaaatcggcgggtggtgaacacgtttttattttttattcctcaacgccaagttttttataatcttaatctttgtatgagacaataaaattgaaaaatctatacgtgtaaatactacacattatcatccgggaaaaaaatctgagaggcttaacttctatttaggacacaattcatgacgtgaagaagaagaaaagaaaagaaaagaaaaaacaagttttgtttattatgcttaacgtttgagtaatttgattgcattgacataacgtttgttcaataccttggtttgagaataatatagttataatatttaaacaacgacatgatataaccagttgacatttgtttgcataattgttctttttcttccttctttctgtaattgtttaaaattagtagcagcgatatgttttttttttttagtatatataatcatttattgttttcagataatcatttaagtttcactaaattggaaggaataaatgaataatgactcaaaccacaatgtagatagacttgtggaaaattcgaatctattacaacatgtcaacatacaatacctttgtgtatgtaaactagacttggattaaaaatagttcaatccattcttcagttagagcattgtttgtttatattcttaggcttatcacgtatgaaaaagcccatcaaagctgacttttactccctcatctggcaatctctaggaagcctctaaagtcaacgccatgcctaacaataacattgaccaatttagccaagaaaaatatgcatcttttgaaatattggacctcctgtattcgatttgcagaactacgaactctttttgtatcccgttgttcactgttgttggcccaatgctttaagcccagttttgtgttgataaatggaataaaagtaatattttttcaacaattacatgtcagcaagttagtaaagtactataaatgacatggcgaccacatcataagctacgtaggattttgaaagcaagtactgtgtacttttgacattttttggtctgattgtaaaagtaactgatgagatttagtaagaactgatttaaggaagaaacgagaagccaaaaataaaaaacatgacatcatatcactacaaacaaaaaagcccaattctcaaatcttttaaaaatcataaatcaccaaaaggaaatctaaatctcaggatcaagtggttgagcccgaaaaacaaaaattagtgatgactccatcgttgttgaagaagcagagcaaagcaaattaagtatctttttttttaagctctttcttggtctctgtctctcagacggaggtgaagctgtccgattgtcctcaacactttaatcgcttgcggcggagtaagaatctccaccactttccccaccgtcgaacaccgtagctgatcagcgttgttcatcgctgccgccatcccagctttaagcacctccatcgcctcctccaaatccgtttcttctccgtccaccattcccaccgctcccacgcgcctcgccgcgagcatcaccggcggatccgccacgctttgttgcacgagggcgaaatctcgcataacttctctctctttcctcctagtctccgacttaagactcgagatccggtctttctggtggcgcgtgaggtcggccacggagacctcggtgagtttaaacacaagagaaggcttgaaatcgccgacccataaaataagtttagcgtaggagttaaaccacggtgggcagaagaaagtgaaaacgttgtccccggcgagggaaacggaggcgaatttctcttggtagtattgaagacagtgagatagaaactgggccacgagagattgttgttcttcgagagagatacgattagtttcatccaaggaagaagcacacataagctgttcaacgaaatacctgtgacggattaaccaaccatcaacgaagatagtgaagctttgagagctgctagtgtttggcatgtttcttatgtttggagtactcactaagtaagtatggactgtgagtgtacgttgtgcaagaatgtttatatactactacattgggcttgaccaagaaaaatcttttaggaattaatttacgatatgtcggtctatcgacgatgtgtcggcgggcgaaatggatttttgtgacttttgtcttgtcggagtgaagtgtaatcagagcagcgtcttatcatcatttgctgttgttattcaactctggttttagaatcaagttgggttaaacaatagtataaaattttaatatggatgaaaataaaatataaattatccttggtaattattgattataacctatagaatcgacaaaaagaaagactataacctagagaatttttttttttttttaaaacaagtgttcattaaaaatctttaaaatatttagtctgttttataattaaaatgtttatatctgaaattgtatctatcactactagttccagttggaattatatatctgtcagggtcgcatctcgatattatggaatgacctaaaataacatctgaagaggaaaccgacacatgttggtaaaataagaaggcacacgtcatgtaaagaagatgacatatgtcaggaaaggaacatgtccttacaaaatagaaaccaaataaaccaacagttcataaatgctccagttatgccgcgagccatcttttcttctttactaagaaaatttctacattattttaagatttttcttttccatgtagttgtctcatacttccttcgaaaagatctttctctaacttcaaccttggggatcgagcaaccatatttcaatcaacagattctttcatcactctaataacggacaaaaaaagaaaagatgtcaaaaaaaaaaaaattggaatatgcacgttgatactataagttcatttaaatcagtcgttagagtaaaccttattgagagttcaaattcatttaaaaacctgatgagataattatataatttcttataagatttttttttcttgtaagaatttaacgaatagaatttttctctctattacttaaaattcctcctcgtcaaaaattgcaaatgcttggcagttttaccattttctcagaactaccgtatgagaaataaagtacgtattaaaaaacaatacaagctttaaagataaaagaggcaacaaatttttttgacaaaaaaattagatgaaaagaagtgacgacaaataactgagaaaacacgttttgcaaaactaaaaaaaaaaaaaaaaagagagagttggaaaatgtttggagctggtgggcattagttggctatgcaacgcacggacgcggatacttttcaactcgttgcttacgcggccacgttttcgtcacaaaccgtgtttcttttgcggccttttaagttttaatcaaacatttttgttttcatttgaatcttttttttaaggcggttatacgaataaaatcattaaaaggagaaacgggccttcatgtttaggtttttgttcttcctcatttgggttatttagcttattggttcagcccacaagagtttccttcaatggatagggccttcagttgcatgccatcatcctttcttgtttctctataagccatttttgcaatgagaatttctcaatttcttatttttgcaataaaatcattttgccttagatgatggtggaatcatccgtttttctttattttgacccggtgagtaattgaacgcaaaaaatagtccaattattcaaaaccttacaatttcatatcgccataataaacctaaacatgattcgagtgagcaactacataaaaaggggaacgaaatgttggtacaaaactgaattccaacccaatcaagtgcatactaaactattgagcaaaaacaaagataaaaatcagttcacctaccctaattaaaacatgattaggcctaaaagactataagtaaagataaaaaagatgccattttagagtacgttttggtaaattggcgccatcgtgttatacgtttaaaccgtataacctgaatcatgcagcacgtgtacggctcacattggcccaagcttgattaacaaacaataacgtcattttcgtatttcaacaattttgatcgctcaatcctttcgacctaatttccatattaagtaatttattagttaaaacaacggactcaaccaaattacatattaagagaatatttgaaaattgtctatgtagatgaacatgtatttgaaaattgcgtaagcacactctttctctctctcttttttttttttttttttccccctcttctttctttgaataaagatgacatttttttctgttccaaacacaaaactgcatattgatagtgttattgaatactcaacgtctcttcttccagcttacgtaagtggaacttactttttgccccgtgatccaacagaaaatgacgaatgctccctcaaaatcatttcgtttcaacaaaaatatgtattttatccatagagaaacaacaaaccttacactatataccctcttttaacgtgcccacttttcattatttacacaatttccccaacaaatttaaaacaatttacaaaaagcactcaactttcctaaagtagattcctttagtccaatggaattcttacaacatcttcttcttcgccacctttttctctccactttaagctttttcactctctctacgccacgacgactgtgaagcgagaaatggctacttccgatcaagatcgccgtcacagagtcactcgcaaccgtccaccaatagctcgaccctctacttcttcatctcgtcccgttgtatctcctcctagatcaaaagtttcgaagcgtgtgcttctccgtgtagcttccgtcgcatgcgggattcaattcggatgggctcttcagctttctctcctcacaccttacgttcaagagctggggatcccacacgcttgggctagtgtgatttggctttgcggtcctctctctggtttgttcgtgcaaccgctcgttgggcatagtagcgataggtgtactagtaagtacggtcgtcggagaccgtttattgtcgccggagctgtggcgatttctatctctgttatggttattggtcatgcggcggatattggatgggcatttggggatagagaagggaagattaagccgagggcgattgttgcttttgttttagggttttggattcttgatgttgctaataatatgactcaaggtccttgtagagctctccttgctgatcttactggtaaagttcctgactttagtgttgattgggtcttcaatttgaaatcattcaaatgtagtaaatttgggattctcgtgattatacactcacatgcaaaacatgaaaatgcataaatttgtgattttggatacaatttggggttatataattacctaattggttcctaacaatcaaaaggtcccttctttgtttctggtcggtggcttatcgttgagtcacagagactttgttttttctctttcccttgaatcaaattgtggattttggtgaagttaatcgtagcctacgattgtgtgataacctcatggagtgaaaacaaagatatgttgtgttttaattcttgtcctattgctttattttcagagaatgataatcgcagaacccgagttgcaaatggctacttctctctctttatggctgttggcaatgttcttggctatgctactggatcatacaatggttggtacaagatcttcacttttacgaagacagttgcatgtaatgtggaatgtgccaatctcaagtctgccttctacatagatgttgtctttattgcaataactacgatcctaagcgtctcagcggctcatgaggtgccacttgcttcattggcttctgaagcacatgggcaaaccagtggaacagacgaagcttttctttctgagatatttggaactttcagatattttccaggaaatgtttggataatcttgcttgttacagcattgacatggattggttggtttccatttattctgtttgatactgattggatgggtcgagagatctatggcggtgaaccgaacatagggacttcatatagtgctggggtcagtatgggtgcacttggtttgatgttgaattctgtttttcttggaatcacttctgtgctcatggagaaactttgcagaaagtggggggctggttttgtttggggaatatcaaatatcttaatggctatttgctttcttggaatgataatcacctcatttgttgcgtctcaccttggctacattggccatgaacaacctcctgccagcatcgtgtttgctgctgtgttaatctttacaattctgggcattccattggcggtaagtttactcctgtaattctgctgtcatgttacttacactattacttatgatattttgcctgctcatctgtaacaacatgatgaaatttatttacgctttcgctgtaactaatgctattgctactcttctgcagataacttacagcgtcccatatgcgttgatttccatacgtattgaatccctgggcttaggtcaaggtgtgcaggcttatctttgggtgttgtttcttataaaagttctgttgtgttgtttcttagaaaagttctgctcaatgattttactctacatatgagtgttgtttcttataaaagttctgttgtggcaggcttatctttgggtgtgctaaatttggcgatagtcatcccacaggtacacttctttcaaccatccttttagcattatatttgccgcaactcaaaatcatattcttctttgaatgtttctgcctgtaaaaggaagtctataagcataacatgcagcagagttactgcattatttgtcaattgtcattaataaacgattcgtttttttagttatggtcattggccagtgatgaaagtacactttttatttctctatattagttgattgatgaatttcttccctatgttggttatggtttttggcatcaaactcaaattctgttgttcaatcatttatgtgtttgcaggtaattgtgtctgttggcagtggcccatgggatcaactgtttggaggtgggaattcaccggcacttgcagtaggagcagctacaggcttcattggcggaattgtagctatcttggctcttccacggacaaggattcagaagcccatccctctcccatgagattctctcttttgttatataaggtaataatgtcacaattctttcacaaaaagtacatagtaagcacttaagttgtcactgattattaaaagcggctaatgcgaaatagatgagtgtcaagcgaggaacgcataaggggagtgcttggaaatggcaaggagatggaacacttaatgtgatccttgtcgaaaattcgtgcaatggcttctcgtgtgactaacttatttgcagctactaggacttaatcccctctactttggggactatgatccttgtatacacgaggcaccatagaaccaatgaaaataatacatcattcagtttgtgaggtatatgcatctctcctttattggaagttccagttcgggatcttctctgttttttttgttgttgttgtaaattaatgtaaaaacctgtgtacaacagagtgtttgtaagggcccctgagttctgtaactgtttataaagttcattttctttagaattagtttgataaagaaaacctgagatccaaaaaatttacatgatctgtgtagcaaaagtagaaaggaaccattacgagtactagtagtctctatagtagcagtaaccaccaatagtcagcaatagattaggatgactcttgggaatattaagaccatctccaatggttaagaagtaattggttcttaaccaaacatcttaacaattatttatactaaaattttgaaacatgacatgtaactgtttttttcactcatgaaaacttcttagctaagaagcaaatcttagtttttaatttattttgatttaattttcaaagtttaattctaaaatattattctaagatacacctaagataaaccattggaagtgctctaagcctagtaggaaggaatagtagcaaatcccagttttcttcttgagtgagatgtttgagattgaaattactgtaatgctattgagattctgtaggcagcgtatcaataattgagagaaataagtagatgctaatacagcttgagcaatacttatccttgtaaaattgtgaatgattccagagttaagtactttgaccgtccaatagagattgtgtgagagtatgtataacagatatcataattggtttaaactgaaaatagaaaaaaagaaaataagctgtggagtagtaatatgcctaaagaatttagaaaaaggaatacacgtgtggaggaggagcacaagggacctaaaaagtctgttgggatttggagaggccctggctaatatctaagaagtgatatataacaaaggacaaaaacgtggtttactctctgtctgtcaccgactctctctatattcaaagtcaactagggcggctttcacacctccctgcttctagacgaatggcaaatcttatcatcttttttctattaacaaattcgaggttagagtctctagctgcatgcactacgatttcaaaattcttaaatctcgttttctagtataattaaatttgaagtctttttttatactaacttactactaagcatgctttttatccttctctacgatataatctaatacgttctcaactacacataaccttttttaaaagtgtatctaaaatctcaacatactgatttaagtatcactcatttgtgtataacagttgacacttttgagattaagaaataaataaattaagatggtattaaagtttaataccagtagttgaaatagaaaattctgaaagagtaatactgtattttcttcttattttgggggtcaacacagatcaagaaattcaagattaaagttttatgatgtgtatctatcaagaatttctttttttatgatgagtactactgatcatggttcaagagaagatgttgaggttagtactcttcaccttcaagaacaaatacatgagattctcaacaacaaccaaaaaagaagcatgagattctcacgtggttaattaattgcataaacgtacgtaattagtattgcaagatgttaagattgttagaatgcaagtgaaaatatgatgagatccttgatttttaaccccgcagtacattttggatgtgtagataatccccttcttaatttaaaatatgatcattttaatatgtgtagaaaagtggttattttggtatattttgttattgtaaaatgtgatcaaatccttctgacgaagaaagaaagatgaatccccattctctaccttatgttatatttagattgtgttctttttatgaagaattgggttgttgaaagcattcactgtaggccatttgattcatcccttgtcgccttcggatttacataagtggagagttttttcttcttctttaattaacctttttagctttagctgaaagaaaataaagtaattgcctttttgtatgcaacaaagcaattagcttttacctttcaagattttcatatcacaagaaaagctaagtgaagtccaccctgtattttttgacaagtacattttatcgtcacgtccatgcacttgcactatcatataacaaaaataaaataaaaataaaagtaaaagaatgatttgtcttttcttaggcttcaattattggataacttatttcatcaaaaactttttcttttcttttcttgtctgttctctagtattgccctctttttccatgaagcttcgaacgctttgttgactagtaaaatgtgaagactccatattcgaaataattcattgaccaaacaaagattcgtcgattgatagttacggtatggttaaaattatcaataaagatcaatctcttaatatatagtttcacatcatgcaatcaaattttctttcaccgtggactcgtgagagagaaaaaaaaagaagaagctgtggttacttatttgtacagtctaaatttttttttcatatattaaatgatccatgcgtacgttaaaatttgtcccaaaaaaaaaatgtcataatcttttttatttattaatataaataattttttatcgcgccttatcgtcggtaaatatatacgttttatttgatttttgttttaagccctaagattttcaggataatataaaccaagatgattagagccaaatgagaaaactgctctggcttaatttttttctttaaaatcactgaactaggttttggttgtgtaattcattgaaattttttcatatctgtccgaattgttatcatggttgtggatctttctttttagtatatagcctaagagtaatctattatagtaattctagttttacgcttaattagaccatctatatatattatttctagttacgtcacctaatcataaaagactctacaacagcaagctagggaaacacagtagcaaagaaagttttttcttactgattttcaaaggtttgaaacacatgtgtttgtttggactcactagtgtcttctggcgtggaatcaattatttatgtctccacctaatcagaatatgacaaatgaatactcgcaacataaacataaaaataacgctctaatgataattctttttttttattgttttatgtcggaaaaagaagagtccaccgagaaaaagagccctcaaacaaatttgaacatggcaattatggagcggcagaatttaattattagtcctatagtcgatatattattgcattacctaatgtgtacacacacaatataaggttggttaatttggtaatcaaactaaagatttagaatgaaaatttccttttaaaaaaatagccatttgttttgttttaagataagagctaagacatataactacttcctaattaactttggaaaaaagtatattgtcgcaagttgcaactcttgtgccataaaaagcaagtgttcaacacatgtttatagtgatgcctcatcaacagctcaattaaattgaaacgtaagtataatacacaatcatctacatatttttgcagacattttagcaaataaatcgtagagttgaacttatttacaactcaatgtcattagcattaaatcttttttccaaaataattcattttactttaaattcttaatttaaattgtcaatcacattatcaatcaaatttaatccaaacaaacttcccatcaatcctttaaaattagcataaacgtatttgttaacaatatttaaaacaaagtttttgtttaaataaatattattcttactaaacgttttttgtttaaataaataaatcctgtatttgaacttatttacaatttcatgctactggcattaattatttaggaatgaaaatatttaattaaagatttaaatcttctaaatccttgcttttagatttattatgtcattacctaaaaggcaaaaactattagttttttaaatattattatttatattttaaatttttttaacattactaatatttaaacttataaaaagtttaatatatcaaaaaatcttaacatcattatataatatatagagtttttaaaaatctcaaatttttttccgtcatattttgtgattcaaaatttaaaaaatgaacatatattaaccaattggcgaaaaatatgtgagttcaacgtcccattttgactaaaatatttagagaatgattcataaacatatcataaataagatcaacattaacaaaataaatggtttttttttttgcgggacgagtttggcaggacgttacttaataacaattgtaaactataaaataaaaatattttatagatagatataatatataaatttttatatatattaacttaaaaaaataaattgtcctgcggtatactgcagattaaaatgtatattaatacttacgacggacgtgtacaaaatattatatagccccaaaaatagcgctgcatataaaaaccacatctacctaagcctaccatgtagtgtagttgcatataagacaactataaattaataatgtagtttaatattttttttggattggtttctttgtttttggttaagtttttttttcttgggggtataatgattttagttaagttttgtttaagtttcctcaatgacaaaggtacaatttcggcgttacgtctagtctaaaataatctattaacaaaagaatgtacttaattagtcaatactctactcaatagtaggatatcgtttcagttttgtatgtggatttttttttaaatttttgaaaaattctattcaatttcaataaaaaatttctgaggatagtcaatgaaaaccaaaaaagccataataataataattataaagtaatatatcaaaacgctcatataatattccacatacatttactgtataatcagaaaactaaatagtatagttatcaagggtccctcttaataaaaccaatattattcaactaagatatactttatttatttggagataatttaattttcgtaagcaccatataaaaaaacaatgacgcaaattattattttgtttatgtgataaataaagaaatataaaacgagagaaaacaaaaagagtgagtgatagtgattacaaaggtaagccaaaatttgaatatttaatggataccaccagataagaagaactttgcttcaaagcggcaaagcttaagcttttttctcgcgcccgcctctctctctctctctctctctctctctctctctctctctctctcttctcctctaaccaaatttcccgatgtgaaaaaacaagtttccgatcaactcaaaccaccgtcaccacttcttctctccgacatggctccgtcgttaaggaatttcaacttctttcaccgcttctccaccttcctcgtcttctctctattctccgtcgtttcttccgacgatctccaagtcttactcaagctcaaatcatcattcgccgattccaatctcgccgtgttcgattcctggaaactgaactccggtatcggtccttgtagcttcatcggagtaacctgtaattctagaggcaacgttacagagattgatctctctcgtcgaggtttatctgggaattttccattcgattcggtttgtgagattcagagtctcgagaaactctctctcggattcaattcactatctggaataatccccagcgatttgaaaaactgcacgagtttgaagtatttggatctcggcaacaatttattctccggtgctttccctgagttctcatctttaaatcagttacagtttctgtatctcaacaacagcgctttttccggcgtctttccgtggaaatcgctccgaaacgcaacgagtctcgtcgttttgagcctaggcgataatccgtttgatgcgacggctgatttcccggtggaggttgtttctctgaagaaactctcgtggctttacttgtcgaattgcagtatcgccggaaaaattccaccggcgattggagatttgacggagcttcggaatttggagatttccgatagcggattaaccggagagattccgtcggagatttcgaaacttactaatctctggcagttagagctttacaacaactccttgaccggaaaacttcctaccggattcggaaacttgaagaatctgacttacttggacgcttcaacaaatcttctacaaggcgatttatcggagcttaggtctctgactaatctcgtttcactacaaatgttcgaaaacgaattctccggtgagattccgctggagtttggtgaattcaaggatctcgtgaatctctctctgtatacaaacaagttaaccggttctctgcctcaaggactcggttcacttgctgattttgatttcatcgacgcatcagagaatctcttaaccggaccgatccctccagatatgtgcaagaacgggaagatgaaagctctgcttctcctgcaaaacaacctcactggctctatccctgagtcctacgctaactgtttgactctgcaacggttcagagttagcgagaacaacctcaacggaactgttcccgcgggactttggggattaccgaagctcgagatcatcgatatagagatgaataacttcgaaggtccaatcaccgcggatataaagaacggtaaaatgctcggagcgttgtatctagggttcaacaagttgtctgatgagctgcctgaagagataggtgacactgaatctttgactaaggttgagcttaacaataaccggtttaccgggaagattcctagctccattgggaaactcaaaggacttagcagtctaaagatgcagagcaatggcttctccggtgagatacctgactcgattggttcgtgctcgatgctcagcgatgtcaacatggctcaaaactcgatatccggagaaatcccccacacgcttggatcactcccgacgctcaacgctttgaatctttcggacaataagttgtctgggagaatcccagagagtttgtcgtctttaaggcttagccttcttgatctgtctaacaacagattatcaggtcgtatccctctgagtttgtcatcatataatggtagcttcaatggcaatcctggcctctgtagcacgacgatcaaatcgtttaaccggtgcataaatccttcgagatcgcatggagacactcgcgtgttcgtgttgtgtatagttttcgggttactgatcttgctagcgtctcttgtgtttttcttgtacctgaagaaaacagagaagaaggagggacgttcgcttaaacacgaatcttggagtataaagtcattccgaaagatgagtttcactgaagatgatatcattgattcaatcaaagaagagaatttgattggtagaggaggttgtggggatgtgtacagagtagtacttggtgatggtaaagaagttgcggtcaaacacatccggtgtagtagtactcagaaaaacttcagcagtgcaatgccgattctcactgaacgggagggaagatcgaaagagtttgaaacagaggtgcaaacgcttagttcgatacgacacttaaacgtggtgaaactctattgtagcatcacgagcgatgactcgagcttgctggtgtacgagtacttgcctaatggaagcttatgggacatgcttcactcttgcaagaagtcgaatcttggttgggaaacacggtatgatatagctcttggtgcagcaaaagggcttgagtacttgcatcatgggtatgagagaccggtgattcaccgtgatgttaagtccagtaacatattgctagatgagttcttgaaacctagaattgcggattttggtcttgccaagattcttcaggccagcaatggcggtccagagtccacgcatgtcgttgcgggaacctatggctacatagctccaggtatataaagagacttaactcttatatcatcagcttgttatggccttacattttgaaattacaatttgacagtaaaaaatattgttgcagagtatggatatgcgtcaaaagtgactgagaaatgcgatgtatatagcttcggggtcgtgttgatggagctagtcacagggaaaaaaccgatagaggcagagtttggagagagcaaagacatagtgaattgggtgagcaacaatctgaagagcaaagagagtgtgatggagattgtggacaagaagataggagaaatgtatagagaagacgcggtcaagatgctgaggattgcgatcatctgcaccgcaagacttcctggactaagaccgacgatgaggagcgtggtgcagatgatcgaggacgcggaaccttgcagattgatggggattgtgatcagcaaagagagtgatgtcaaggtcaaagaaataagttgatgattgagggaccaagtcactcttttggggtctgttttgttcacaatgaaacttagggagatcgagtaaagtggatcatctaaatctattaagacgtacgtaagagtttagatggagagtgttgtaatactagtactccgggttatgaaatcataggtgttgtaacgatctcattgtaaactattttcttgtaattgtagaattttaaggttttcaaatgttcatgaaggtcaactactaaatgaaatttatggtccttatatgcacctatactattactttgctaagaagtgtatattcgactgggtaaaacaatgtctataaaacttgcaatcaatcagtttttaatcagagttatatttatttctgcgtgaggatgattttattatattatttgattcagaaaattctcaaaacgaaaccaaattcaaattggattcttggtgtgatgacatagaccaattattattatgatatcctctcctgtgatttctaaaagttagtcaaatctacgtatgctcaaaaacttttgtagttgcccactttgaccaacttaataaaagaaagatgaagaaatttagacacctcatggccttttggctccactaataagagattcaaagcttcctttgttgagaatgcatttatgtttaaactttcatctactgatatttactgatttagccaaaaaaaaaaaagatactatcagaaagaagacaataatgcttaagcgaaaattgtataattcttcattcttcacaagcagacaatactgcttctctgcattggttcgaacaataaacttgtattttttttctgaaagaagtcggcaattcttaatatcttcctaagcataggaatacatattttacatttttgtttttttatttgatagagcaaacgtcattagcagatagtaaattaatctcaaaagtaaaaaaaactaataacttcctacaagttgaggtaacgtatacttgataacttcttccgctggcgagtgcacaaaaactaaccaaagaattgtcctacttaatatacaacagttttttttttttttggttgtatctttctgatctatctcaaaacatatctccacaaaccaagatttgtcagcggaatagatcttggaatgaccacattatgaatcttgcaaagacatcagactccaaaaactcgatgtgagcagcacggccgatgaatgagttcaggttacgaccatacaaggttgtgtcgaagttgacatcacagcgcatgaacactctctggtggtgcggagtttcaggggatggcccacgtatttggtccatacagttattaagcatctccaagaaagcaacacctctttttgagttgtcgaaagaagctggttggcatgactcaatcctagctgagtgatatggaacatacccatcctggagtagcaaaaaaaaagacatggctctaattagacaatataaaaaaatgttagggattgtattctcatataagtgtaatggaatgtacctgaggcgaagacaggagaattatattcttgaaactgcacaacgtcttttgctgaaaataatttcaaaaccaacatttcagaaccaaagaacaaaggtctgtttgtaactatggtacaagatcttgatgaaatgttaacatctttctctaccttgcagagcttgtaaaagaaagtattctggagatcaggatcatctgtgagtgtaagctgatgaataacctgagtactctttaacttcttcaggagccaaagtccagaattaaacaaggaatttgaactgtatagataacccaagtgtggacccgaaagcgatatatatgtatgaaaatacttcctgtatggatccatcaaactatctgcaacaaatacataagtcgggaataatgattaacaccaaaaccgatttacgaaccgttttaaacattgtctgagagattctaagaacataccagctattgcagctctgatgatgacgttaccaattgaatgtccaacaaaactcagcttgatgtttttcaagcgcccgtatctcgcatgtttatcctttttcctcttgaaaaaagaaacaacttcctgcgcaagcctctgacccatttccctaaaatcgccatgtgttctctcctcatttgcctcagacatgagaaactctatctttggatcaattaggagccactgattccggataagccttaggtctaagtgatgcccctatagcagttaacagaaatctatcatgtaacgaacaaaaaattgcaaagatacaaaagcaaactgtaactgcaaaagtaaaacagaaacgaaaaaaaagaagcaactctaacatatggagtatggacactttgccaataaacacaatgacttaaggaaaaaaggtatattcctccataagattaagaaatagaaagtaaatacgcattcactgaacatcaagaagatacttgcctggaaaccatgaacaaaaacaacaatcttcagctcacgcccagtatgctgtgggttaatatgttttttcgtcccactctcatcatcatgcccattaagtaagctagaatcgattctatcaacatgtctcatgtacgaattatcactgaacgtacgccttggtgcattccaaacacgttcaattataactataggaacccgcataggatcaccaaatatatgcatgtcttgtattgcccggttgtttatctgcacattagttataatcaatcaaattgtacaacttacgaaacgaacaggtaattgaatcacgaaactaaaataacaaacccgcatttgtgcaatacttcgacggtgaagttcagcgcgggtggatgcaacttgtgcaggctgcataagagaaaaaatttgaatgagtagagccatgctggcactctgataaaatttgaaaaataatcactaactagataactcacatcattcagcttcaacccagtcgagactcttttgtgtgaactatggtttgaaatgtcctccattccacttataaaatgatgtggcatttcaaccttggagtacaccatccatattgaccattccgctcttcgatctttagtccagatatcgcgaagatattccaagatttttgtgtaattatccctgaaaaggggaaaaataaagtcaatgatcagaagataacttcgcaaacattataaacctgtaggcttatttgactatggatgtccaaaggaaacttaccggtgcaatgtcagaaaggtattccatagataatggagctgggtgcccagtaagtggaatgtgcgagatagatgctcctttgagaagttgtgaagccagtcatcacttgctaaatcaaatgggccattcaacttctgtgtcaaaaatggagagaagagcttatattccagaagatagcaaaacacagtattatatatagaatactctgcagtataataaagaaaggacctcaagattgttttgtagcttgccttgtcctgaaccttcaacttcaacagattttcccgttgaacctgagtcagataaaagagcattgtccatactggatacaaactcagacaagtcaactgtttgaccaactgctttgctaagcctttgcatttcttcaagcaaagtgtcacgagctccgagtaaggcttttacaaatgacaccagcttcttgtcagcagaagcgatttgagtaaaggcctaatgagttacaaaaacaatcaatcaataaaagtattgtaaaatgggaagaatttacttcgaaacagagaacttaataagttctgtgaaaccatgctatttgcagctttacacaaacaatgtcaagaagactgaaaagtctagtgggttctatagacttataaaaacacgtatcgaaacactgatgtatgatagctctagcatccagaaagtaaatattctaaagtataatagaactctagcataaattacatcttcctgagaaaagaacgactgtttaaagaagaaaatgatacgatcatgtgtagagactctgaatgagcataatgcaaaataatcaatttgctgaatcagaaaatgcaatgctgaaaggagtctaagaacacatacttttttggaagactgaatattgccactggtcaaatttttaccattactcgcatcactgcaccaaacatgttggttgatatattaacttaagagatatagaaaactcagcaagaaaacttgaattc

SEQ ID NO: 27 - DNA, 67878 bp, Arabidopsis thaliana
aagcttatgggacatgcttcactcttgcaagaagtcgaatcttggttgggaaacacggtatgatatagctcttggtgcagcaaaagggcttgagtacttgcatcatgggtatgagagaccggtgattcaccgtgatgttaagtccagtaacatattgctagatgagttcttgaaacctagaattgcggattttggtcttgccaagattcttcaggccagcaatggcggtccagagtccacgcatgtcgttgcgggaacctatggctacatagctccaggtatataaagagacttaactcttatatcatcagcttgttatggccttacattttgaaattacaatttgacagtaaaaaatattgttgcagagtatggatatgcgtcaaaagtgactgagaaatgcgatgtatatagcttcggggtcgtgttgatggagctagtcacagggaaaaaaccgatagaggcagagtttggagagagcaaagacatagtgaattgggtgagcaacaatctgaagagcaaagagagtgtgatggagattgtggacaagaagataggagaaatgtatagagaagacgcggtcaagatgctgaggattgcgatcatctgcaccgcaagacttcctggactaagaccgacgatgaggagcgtggtgcagatgatcgaggacgcggaaccttgcagattgatggggattgtgatcagcaaagagagtgatgtcaaggtcaaagaaataagttgatgattgagggaccaagtcactcttttggggtctgttttgttcacaatgaaacttagggagatcgagtaaagtggatcatctaaatctattaagacgtacgtaagagtttagatggagagtgttgtaatactagtactccgggttatgaaatcataggtgttgtaacgatctcattgtaaactattttcttgtaattgtagaattttaaggttttcaaatgttcatgaaggtcaactactaaatgaaatttatggtccttatatgcacctatactattactttgctaagaagtgtatattcgactgggtaaaacaatgtctataaaacttgcaatcaatcagtttttaatcagagttatatttatttctgcgtgaggatgattttattatattatttgattcagaaaattctcaaaacgaaaccaaattcaaattggattcttggtgtgatgacatagaccaattattattatgatatcctctcctgtgatttctaaaagttagtcaaatctacgtatgctcaaaaacttttgtagttgcccactttgaccaacttaataaaagaaagatgaagaaatttagacacctcatggccttttggctccactaataagagattcaaagcttcctttgttgagaatgcatttatgtttaaactttcatctactgatatttactgatttagccaaaaaaaaaaaagatactatcagaaagaagacaataatgcttaagcgaaaattgtataattcttcattcttcacaagcagacaatactgcttctctgcattggttcgaacaataaacttgtattttttttctgaaagaagtcggcaattcttaatatcttcctaagcataggaatacatattttacatttttgtttttttatttgatagagcaaacgtcattagcagatagtaaattaatctcaaaagtaaaaaaaactaataacttcctacaagttgaggtaacgtatacttgataacttcttccgctggcgagtgcacaaaaactaaccaaagaattgtcctacttaatatacaacagttttttttttttttggttgtatctttctgatctatctcaaaacatatctccacaaaccaagatttgtcagcggaatagatcttggaatgaccacattatgaatcttgcaaagacatcagactccaaaaactcgatgtgagcagcacggccgatgaatgagttcaggttacgaccatacaaggttgtgtcgaagttgacatcacagcgcatgaacactctctggtggtgcggagtttcaggggatggcccacgtatttggtccatacagttattaagcatctccaagaaagcaacacctctttttgagttgtcgaaagaagctggttggcatgactcaatcctagctgagtgatatggaacatacccatcctggagtagcaaaaaaaaagacatggctctaattagacaatataaaaaaatgttagggattgtattctcatataagtgtaatggaatgtacctgaggcgaagacaggagaattatattcttgaaactgcacaacgtcttttgctgaaaataatttcaaaaccaacatttcagaaccaaagaacaaaggtctgtttgtaactatggtacaagatcttgatgaaatgttaacatctttctctaccttgcagagcttgtaaaagaaagtattctggagatcaggatcatctgtgagtgtaagctgatgaataacctgagtactctttaacttcttcaggagccaaagtccagaattaaacaaggaatttgaactgtatagataacccaagtgtggacccgaaagcgatatatatgtatgaaaatacttcctgtatggatccatcaaactatctgcaacaaatacataagtcgggaataatgattaacaccaaaaccgatttacgaaccgttttaaacattgtctgagagattctaagaacataccagctattgcagctctgatgatgacgttaccaattgaatgtccaacaaaactcagcttgatgtttttcaagcgcccgtatctcgcatgtttatcctttttcctcttgaaaaaagaaacaacttcctgcgcaagcctctgacccatttccctaaaatcgccatgtgttctctcctcatttgcctcagacatgagaaactctatctttggatcaattaggagccactgattccggataagccttaggtctaagtgatgcccctatagcagttaacagaaatctatcatgtaacgaacaaaaaattgcaaagatacaaaagcaaactgtaactgcaaaagtaaaacagaaacgaaaaaaaagaagcaactctaacatatggagtatggacactttgccaataaacacaatgacttaaggaaaaaaggtatattcctccataagattaagaaatagaaagtaaatacgcattcactgaacatcaagaagatacttgcctggaaaccatgaacaaaaacaacaatcttcagctcacgcccagtatgctgtgggttaatatgttttttcgtcccactctcatcatcatgcccattaagtaagctagaatcgattctatcaacatgtctcatgtacgaattatcactgaacgtacgccttggtgcattccaaacacgttcaattataactataggaacccgcataggatcaccaaatatatgcatgtcttgtattgcccggttgtttatctgcacattagttataatcaatcaaattgtacaacttacgaaacgaacaggtaattgaatcacgaaactaaaataacaaacccgcatttgtgcaatacttcgacggtgaagttcagcgcgggtggatgcaacttgtgcaggctgcataagagaaaaaatttgaatgagtagagccatgctggcactctgataaaatttgaaaaataatcactaactagataactcacatcattcagcttcaacccagtcgagactcttttgtgtgaactatggtttgaaatgtcctccattccacttataaaatgatgtggcatttcaaccttggagtacaccatccatattgaccattccgctcttcgatctttagtccagatatcgcgaagatattccaagatttttgtgtaattatccctgaaaaggggaaaaataaagtcaatgatcagaagataacttcgcaaacattataaacctgtaggcttatttgactatggatgtccaaaggaaacttaccggtgcaatgtcagaaaggtattccatagataatggagctgggtgcccagtaagtggaatgtgcgagatagatgctcctttgagaagttgtgaagccagtcatcacttgctaaatcaaatgggccattcaacttctgtgtcaaaaatggagagaagagcttatattccagaagatagcaaaacacagtattatatatagaatactctgcagtataataaagaaaggacctcaagattgttttgtagcttgccttgtcctgaaccttcaacttcaacagattttcccgttgaacctgagtcagataaaagagcattgtccatactggatacaaactcagacaagtcaactgtttgaccaactgctttgctaagcctttgcatttcttcaagcaaagtgtcacgagctccgagtaaggcttttacaaatgacaccagcttcttgtcagcagaagcgatttgagtaaaggcctaatgagttacaaaaacaatcaatcaataaaagtattgtaaaatgggaagaatttacttcgaaacagagaacttaataagttctgtgaaaccatgctatttgcagctttacacaaacaatgtcaagaagactgaaaagtctagtgggttctatagacttataaaaacacgtatcgaaacactgatgtatgatagctctagcatccagaaagtaaatattctaaagtataatagaactctagcataaattacatcttcctgagaaaagaacgactgtttaaagaagaaaatgatacgatcatgtgtagagactctgaatgagcataatgcaaaataatcaatttgctgaatcagaaaatgcaatgctgaaaggagtctaagaacacatacttttttggaagactgaatattgccactggtcaaatttttaccattactcgcatcactgcaccaaacatgttggttgatatattaacttaagagatatagaaaactcagcaagaaaacttgaattcaacaaaggtaattcatgcataccttgataaaattgcaggccgtttgtaagcagcggatttcatgacgctgacgtggacacttacatcgataagaaccgcgtgaaaggtatcaaagtgcactggacagtaagaatgcacgcctgaaagagctttaggaggaatacgaaattcatgcactgccgcagcacaagcatctgaatgtgtcacaggtatatcctccatgattggagaatacaaaagctcaaacttcaatataacagccgatgtagctgacccctgcgtcaatcacaactagtcatttattgtacaatgatgtaataggtcaaccaagtacagcacttttcacaagttggattattactgttgctgactatgaacaagatcagtagccaaaataacctcacaaactcaatggcgcagatactttgcagtagaaaaaacagtttcttaacaattcatgttgtttaatattatgcaactcatttgtcagtattagcctatagttgtgagaatacattataaaaagatgaatagaacaaaggagagaaatactggtacctcatatctttccagaggcatagtaaatgagaccatcatgcagagacgaacatcctgccttgcatatttaatgcggaagggctgtgttaagaaactactatccttatcatctatcttccacactccatatgagtcgtttgaggttgaatcaagcgctgtgacacacaggtatatgagccattatatgttagtatactgaaaacaaagtctccaagtacacagaataggacaaatagacatcaaattcagggaatggaatagtgaactcaatcacaagaacgtagcaagacagaggaaaatgattcagaagaaagctgatggataagagtaccttcatactgaacaactcgtgaaggaattccacaggagttgttgtcaccatcctcccatctcatgctgatttttatttgataccatctaaaagaattaaaagatacaacaagtaacaactctttagaacaagaagagaacattgcttcaattcactcagaactagatatagagaaactatcatacccttgctggaaaagatcaaggttatgaaacctatggatatagatagcaatctcctgaacagtgtcgatcattagcactggcttaaccctggctacgtaaggctcagcatcaatcgactttgtttgcctacttctttggctcagtccaattaaccatccaagacggcgtaacatatggagaactcacatcaccttctaaaactttggatgtttgttttcaggacaatgatatcctgaaccagtaggggactatttgttggaaatctcatatctccacgaaaacttgtctacattagcagatgcaaactctttgaagtgaaacctcaaagccaaccaagcagctgcagatgaaaagatgcaaacttttcaatttcgattaacactagagtgttcatctcatatagaataatcaacacagtaaccaaagtaagagaaaataaaatgtagatatctctgttcggacattaaagcaagaatcttgataacgaatttaaactagagctacataaagtcgtctccgacaacaaaattaggtcaaaagctaaaatcccaatctgagccaaataaaaattacataaatgaaatgtcaaagattagcgaaaataacaaaactttaccataacaacatacattacctcgaaatggaaaaaaagaaaaccaaaggcagagcaaagcagagcagagagttcaaaaaaagaagacgatggtgggccttgagactttagatctgacgaatcagatagacgaaacccagatttgatttagggtttgctttttgcacgacagacaaaccctgagctaaaagaacagagatgcaataaaagggagaggatctgggaaagttacaaatgacgattgtaaggaaccaaaaagttttgagggattcaacgaaacttttttattcttttttataaaagagtttaaacaaaaaagtcagattttttattgtgtttgtcgggtaaaggatgaatgttcatgcgacgacaccaattactatgtgtctttttttttttggtttcttttgcgccaaatcgatgtttgtactactgtcgtaaaatggtggatccgacccgctacgtgtactgcttggctagcccttgcgagatgagttccaaacccgatttacaaggttgtttgtttatataaggcccatggaaagcccaatattatatcattctacttcttttgagatatggcccaacaaaaatttagttacatttggacaagagacaaaataaaacagctttggtttatacatcttcttccctttgttttttttctttgttgccaacagaatcttgtaaaaacattggtatttacgtatatggatagggctgaaactccttgtagcgctttcctttcggcattacacatgacaactaagagcaagtccagtgattagtttctaaacaaagtttctatgtattttttattaataaatttggatagttttgtagtttagagattttttagagtttttgaaaattttatggtccattggtggaatcttttaagttggtttctaaaacaaaaaaaaattgaaaaaaaaaaaaattgttgatatttttatttgattaaacatgattattattaggaattataaaattttaaatgtgactccaatccaattacaaaatgtggaggagtgattccatgaagccatgacctctctcttgttgtttccagaaacttgagacttgaactcaagcaaagcttgaaacagcttcatgtcgattataaaaagataaagaaaggctcttctgcttcaacataaaaccagaaaatgaaaggaagttttaggggctaattaaatgtggtccaaaattattgaaaatggtcacaaacaaacaaattggttgccaatgatataatacattccaaagagcacgccaagcttgtgtgtataaatcacacgagttgtgttgtacaagaagacacataccttgctattacaaggctctatgacttctgagcttgcatcaagctcatctttaagaaactgcaggaagagaacagcttcaacatgatcacgaaaggggaaaatattaagaaccaattcagatattgctttccttcagattcctatcactagcaagaggtttgaggaaagctcgggtgagaatcaacataatttggatatatctcatgtttccagctctcaagagattctggaatcttcccagataactctctatgctgcagtgtatatcctccaactgcaatacaaatcatttaaaaacatgactccacatatggcctgaaacagaggacccaatagcaatgcaaaagtccatccaaacaacatgtgctcagaaagctgatgaaactgaaatttatatatgtgccactgttagttttgcatcgtgcatactgagaaaagtgtcagccaaattgtgagcctcgtctatgataacaacactatttttcaagcttggttcgtactattcttacatttgcacctaaattctgaaatgtttccattagttagcaaaaatctttcttttattctacttagctaaatgaccattaacaatgacgaaacaagcagatattcatttaatttggaagctttgtattcagaggctaccagcaatgcaagacggaacacactttcatagatagataaatcttctcataatacaagttgataacatgtaccttctttttagagacttgagatatcttcttcttttgcaagtccaagcacctctcgtcgatttggttagaagaatcgatttggggaacaaaatctagctcgatcatcatcccgttggttgaaacactcgtttaggtggatgatttttcatgatttcatgaacaaatcactagatcttcagcgtcgattccaatcgtctttggtgtctccgtaggcgaagaagaagaagaagaaataaataaacgcgtgtggttttttttttttggttttgtcattcagtttacccaataaaatgaggtcacgtatgagtttctattgggtcgcgaaaaactaattttaggaacgatcctaaatggattcagctgtttttctattatctgggcccatttttacataaaaacccatctaagaaatctactaaaaacccttacttgacttgctctaagttttcaccaacggattgtcaacgtaccgtactttttttttttttttttttttttagtcaaacccaatactttccattccaaatcaaacaaaaacaagagtacccgggtcaagcccgatattaccagaaatacaaagggagagcttagccgcagcatcagcaatcgaattaactaagcgagggataaattgaaaggagatagagcggaatctgtttcgaatagatcgaatttccactagaaggccaaatatctcattgagggagacattggagttcaaagcatcaactatggattttgagtccgataacacaaggagatcggatctttccagttgtaaagcatgtagcatcgccgatttgatagcccaagcctccgccgctaagggcgaggggaaccgacggcatccggctgagaaggtggtaatttctttctccgagtgtgaggttgcttggaacacccagccagagccagcgagggagctctgttgttgccaagccgcatccacgtagcagagaaaatcatgagtcagagttgttgtggagtttgggcggggggtcgctacacgaacttttgggagcgccaattgggcggattgccacgctaaggcatcctgaaccgcctttgtaacagtctctatcacagagaaatgagaattttggaagataagctgatttctggctttccagatgtgccaacagatccaggggaagagggttgctgtatgaatcccaaccggggggagaacgatggttttcttaagtaagttaagagcttccaaaataggggtaccgatagggatgtgacccaattggaggggcgctaggttccaaacttgtgccgcaaaatcacagtgaaacagcatgtgggtggaagtctccggagccccacagcgtgcacaatcccaagttgatgatatatgccttcttacgagttgtgcacccacagggagagctcctgcagccgccttccataggaaaagtttgatcttcggcatagtgtggagtttccaaaggtttgcttgccagttaaagcggacctgagctgttggtagcactgtcaaggatgttaccccgtaacctgatcttgaggtatactctccagattttaccggtaaccagaccaatttatccacacccctacttgagggcacagggagctgtctgatgagctgttcatagtcaggtaggaggtcaacgtaccgtactttaatggtgtaatatgcgacatttattatgtgtcattttagatatctgattctgtctcgacaattgggatgggcattttatggatatagttagaatgggattttattcgaaggaatattttgtggatatattttaaaataatccactaaaaaatcaggtttatgttggtcaaaatccatatttaatacgacaaaatacaacattgaattcattaattgtgcacaaattacggattgtgagataagactataagagtgaaagaaacgataagaagtaatgaagactcaaaatcgtacataattgaaattagtgaaatttatggtttggtttacatgtttttgtaaaccgttaaaatagtagtaaaatataatacaaacatgtaaatccacataattttgtatttgatgcgatactaataacaaaatgttgtagatatatcataatatttagttgatacaacaatatatatatatagattcacatcaatacatcattataactcaatgttaatgatttaatttcccgattaatgaatcatgtgcatgtgaggatttgagaagataaatgagcaagatagaagagaggatatagctatgcaagaggccaagatctgaaggaaatatctctctgttttactcatctaattttaatcagttacctaatttcgattattcgtagtgtcgttaatgtaggtaaatcctcttttcaacatgcggaccaatttttgtttccggaataagcaatagtggttacacattcaaaatcaaagtcaaaagaaataaatcctcgtaatagaagattctcttaataaataagattcaacgtacaaagatgctctttccatataaacatcgatatttgtgtatataatacatgtaagtacgtgattgtgagggagtactctaataagacgacctctgtcaataactctcttcccctctcttctctcctctggttcagtggttctctcacaatgatggacgcatacaacaatccctcggcggtggagtcgggtgacgccgccgtgaaaagcgtcgacgacgatggtcgagagaagagaacgggaacattttggacggcgagtgcgcacataatcacggcggtcataggctcaggggtgctgtcgttggcttgggctatagcacagcttggttgggtggcaggaaccacagttttggtcgctttcgccatcattacttactacacgtccaccttgctcgccgactgttaccgttcgccggactccatcaccggaacacgcaactataattacatgggcgtcgtccgatcttaccttggtatggattcatataaacaaattcattttgtgtctttatcagcattgtttttcacagatttttcagttttctagacattttttctcagatgaacaaggattttgttcatttgatatcatttagattttgcctaactagtctcaatttaggacatgtgttttgattttcttccatttctgtcacaatgatgatggctggcgaaagaaaaaaaatctgatctaaaaatatatatttaatgctaagttggaatttgtaaatctacagtataattggctcatttcaacaattttttaccatgtaaatttgttgaagaacattattgttgttgaacaatgaaagaaaaaaatatggttgttagaaaaaaatgatttacgattttgccaagtgtgcatgctctttcatgggaagatatgaattaattatcaaaatctatataaaaaaaaggaagataatcttcattctttcataacttagttaataaattaaattgattaggattggtaacatagtcaattcaatttatcccgttaaagaatgttataaattcgattgttgacccctcgttgaaaatttggaattatgcgggatgtttagaaactttgccataagaccaaaagattggtagtatttgatagtagtacaagagtaatcatttttcttctttaataacataaaacgcaggtggtaaaaaggttcagctatgtggagtggcacagtacgtgaatctcgtaggggtcactattggttacaccatcactgcctccataagcttagtgtaagtcaaagattctgatttatttcgattattttgttatggttatactaacatgttgttctgaataaaattactaataattgtttgattggtgtttttgtacgtcttcgttagagcgattgggaaatcaaattgttatcatgacaagggacataaagcgaaatgttctgtatcgaattatccatacatggcggcatttgggatcgtccagatcattctgagccagcttcctaacttccacaagctctctttcctatccatcatcgccgcggttatgtccttctcttatgcgtctatcggaataggcctagccatcgctactgtagcaagtacattccccttctttatcttaaaacatagtggtttatatggatgattcttcaaagttgacactaaccgtgaaaatggtatacaatatatatgaaaggtgggaagattggtaagacagaattgacagggacagtgataggtgtggacgtaactgcgtctgaaaaagtttggaaattgtttcaagcgattggagacattgccttttcatacgcttttaccactattctcatcgagattcaggcatgtactactgattcctactatcttccgtttactattgttttcatttgcttgttattattaatttcgccaaagagaggtaaaataagaataccttgaagataagatgttattattaattagacagttaggaaaaaatatagatggatggatgatggataaaaatagtttcatattttagatatgtgaagctctaaagatagtgacgctctagtagtatgtcttgtttattttgcaggacacattgagatcaagcccaccagagaacaaagtgatgaaacgagcaagtcttgtcggagtctcaaccacaactgttttctacatcttgtgtggttgcatcggatatgctgcgttcggcaaccaagcccctggtgacttccttaccgattttggtttttacgaaccttattggctcatcgactttgccaatgcttgcattgctctccatctaataggtgcctatcaggtataactcacaaacaaaagaataggataagtgtgtaacatacatttaccgtgttcaagttcattaaaagtctcattattgtgttagaatttttagctttaacaattcagaagattgtagaaatggagttattactaaatattgtttctaaaaaatgctctttttttttttttatccctgtattattcgcaggtgtatgcgcagccgtttttccagtttgttgaggaaaactgcaacaaaaaatggcctcaaagcaatttcatcaacaaagaatactcgtcaaaggttcctttgcttggaaaatgtcgtgtcaacctcttcagactggtttggaggacatgctatgttgttttgacaacatttgtagcaatgatattccccttcttcaatgcgatcttgggtttgctaggggcattcgcgttctggccactcacagtttattttccggtggcaatgcacattgcgcaggctaaagtcaagaagtattctcgtagatggttggccttgaacctcctcgtattggtttgcttgatcgtctcggcccttgccgccgtaggatccatcattggcttaattaatagtgtcaagtcatacaagcccttcaagaatttagactagtgtgacttataatctatgtttgccaaaaaaaaaccttgtgatccatatgaattatatgaaatttatttcatgctaaatatttagtacttaatgtttctccaaataatgtgacgttctgttttcagctatgttaaaaaccaaaatgctaacttatgtattagtactaaaatttatgaaaatgtattagttattgatttatttttaggactacaattattgaatcaacattggatgtttgagtcccatgagatatggatttcagcttttttcaaattcgtgtggttgtgtcaatttcgagttattattatttattttgcttaatggaattgtcggggaaatcttgaaaacagacactcacagattgtgtaatttatttggtttggtgtgtcctacataagttgctatcacatcttatgtattggaggagttgggcaatagaggatcaaggcaagtttggttttctattaacgtttctactctgcatttgcttacaaagtcattttcaaggttttgtggtcgtatgtcacttgatggctaccatcataaccgccatgtaaccaaacaattgccttgcggttacctacccatatggcgcatctaaccaagagatgcatcccctaatcctggtcatttgtcattgcacttctagctgattgttcaatagaataatttcaattaagttcgaacccaatcattcatatttcatgactagaaatttggatataagaagagtcaaaataggtttaaatgctgttgtttgcaatagtccatcttctcaaccaccaaaaccaactcagtttgtaactaacttaatttctaaccaactaaaggtaattgtcttacccacaatggacattgaacatccaacacaaaaaaggaaaaaaagtaaaccaagcaacaatctcatgtgtatttttacatctagagattctaaattcgatttatctaatttatacacttacataataaaatcaaaggcaaaagaagtgtgaccaagaaattcactcttcacctcactcgtagaacccaaacccaacaaaaaaaacccaaaacgaagccacacaaagtccaaaatagaagctcactctatgtacatcctattttgttagcgcccttaccggaagtttcttttcaaaaaagaaaaaaacctcccaaggccatttgtgactctaaaattttcagaaacaaaaaatgaaaatccttgtcttttcttcagctcagtgactcatggcaaagctctttcctcatccgttgattaaacagcctgcaagcatccatactaagatcaatggctgcagaaagcgccacgtaagcagccgcatcttccatacagctaacgtgctgcacactcacctctacacaaggcttactacatttcccttcaccttccacacttgctgacatcacaaaccctttgtacacgttccacggccacaatccgtaaccgtaatctccgctccctcctctcggactattcgccggcgatgctcctccaccgcttccactactcccacctctacggcttctcgatcggttcaccacacttgttggcgacgatgaagaaggcgacgatcccaactcgattgagaatttcccacctctgtgagaacttatggttgattccgcaagcacgattcctgcaccgcttgatccgtctgggatgagttcgaatctgtaacctagaccatcagtggctccaccgcgttcccgccatgcttcaagtcttccccacggtctccaggtacagtctccgggacgcagtataagccatgacccagggtttgaccggctcacacgatcggttccaggagatgccacgaatggagtgacgattgacgccatggccactggtgaaccggacaagtcatggactgttatggaccatcctttacgctctttcccaggacgttctctctcactcccgaacgagtttagccagctccgtgaaacacttgtctcagtcggcaatgatctgatcaatcaaacaaaacaccattaatcaactttattttaatctaatcatattaattccctttaaagagtaaaagtggttaaatatcataagagtaaagttttatactaagaataaaagtggttaaatatcatagactaaagtttatactatgaatgaataaaagtggataaatatcataagagtaaagttttttcgatagatacgtacactaaagcaaaaattaaaaacaaggaatgtgatttcagtatttcgcaataatctttggcagtggatctaattaaagcgtatatttcgatttgattcctcgggaaaataacataattagaaataaaataaaaaattgatatcacaatttccgataattatggtgaacattgatttgatttgattggccggaaaactaaccttgatctctgagtacgatcaccggtgtgccggcaactgaatttgcatgtgaaaactggttgccggatattgccttgaatctgaacgacttgaggactacattcaggctcgccgtcaaactgaaaaacgaatctaggatcaggctccgccttcacattcaggtgaaactgagcagacgacgacgattttccagctccttttccgactgatatccatccgttgtggaagacgcacggtttcgattgcgtaccagatagatccaacggtacggagactttcgccagaagacgaccggagtgtacgccgcaagcagcgccggctcttccagtgtagatcaaaattttaagacaaggcttagaagtaaatatagatctggaagctaagcgttgaatatcggagctgctgagatgaaacgtggcggctagggtttggatctccggaaactgagtcgtctccaaaggaatgtacgggattgcggcggtttgcggcgggaagtttttgagtttgattttacaaaaacaaggagaagacgacggatgcacgacggagctcgttgtcttcgccgctaacggaactttcaaagctaggttcccgattgtaagacggatgaatggacaaggatccatttcaatcgcaacgagtcaattagggtttttcagagagagacggaggaagagaaagagaaggaaatgtgaacaaaaagggtttaggaagagttcgacattaatggcaggaaccgttcaagagacgatgacttaggggaattaggcaaaggaaaaggaggtgacgacgataaaacgcagcgttttaatggcgccgtattcacgacctaaccattggaggaagcagtcgtcttcttggtctttctgtgtatgtctctggtttttaagtggagacaaacaagcaagcacaatttacatttttcccatttttgcattccctcctttcgtttgctgtattttcctaaattgtccaattcgcctttattataccacaactttaatattggtaccaaacctttttaattttgttctttaatcccctttttcattaatatagacggttaagctacatccaccgatgaaaaaatcatttgaataatttttaattacattctataactataagtcatgttgtaaagagtttgttattagagcatgaatattccattattctctcataaaaaaagaattaaatgagaaaatttgtccctaattcttttttatttcaagtagccccctaaattgtggctaaacatccggtaatcgtaacaatgatgtagattgggtaactctctgctcgaatgtgacgcttattttggcaaataatgtttctttggtaaacatttgaaagtttttaaacaatttgttttgagtatttaaaatacgtacggataaagggtaaatccgaaatttagagttagttgagggctggtagagaaaattaaaagacattggagcacagctgggaacaggctggcgaagaagtgccaggtcggagagaggttgacgtaattttcttttgtttggtttctctctctacctgataagtgaccaaccacacaaaaacatagggctccacttctttgaagtttacgaaattacccttgatgcttacgtgtacattcgaggctctgattagtgccttgatcggggagaatctttccgcctctatgcggaactcacgttttcgtgtcagtctcatagttttctggtttttccttaacacacattttattcagattaagagatttcttttttcttctgttaaatttattttatttttagttccgtttcataattggcgtagctagtttccaatgtatttgctaacagtgatgaaagatgaacactacgaaacatttaaattttcttcatgtgcatgagttttggaatgataaacttcctaacattatttacaccatagtgaagtgttcttggttattttccacaaagtattcttgaattgtctttggttattaatagccatcggtctaacttttctacattcacctagaaacaaaagtttgatcaaataaggaaacaaacactttttagagccacaaaacttttctacatttgtgtacagtatgaaattagtaaggtgttttaaagtttcgaggaaccgtcatttaaaaatgacatcaaatagtcaccttttcttctactgcaaaggtaaactcaccactctattcgctctgagaatgcagcttctgtattatatagaatacaaaatttctaaattaagaaattaaataatgcgtgcgagtcaataaaataaaaataaagtagaattctttggggattgggcgagagatatgcgtgcacgtttacgacaacttagattcaatttcttttttatatagtagtagtatttgtttagataagtagctgaacgaggatcgtggatgatagctgtattttttctgctttttttgttttttaatgacattcatttatagaggatgaaggaaatgtcttcttcttgcctcagcaacacaaaattacgtaaaccatatttttgtttttacagtagtaactgtagagaagtccatcagaatattacagaagcccaattgaaaagcccatttgaaacccactgaattaaataataatcgaattcggcggagactccaactattgtcggcccatcaaacagtttctccggtggtttgagaactaactgaaatgtacgaaattaacctccgtggcttacgtgttctgatcggggaatctttccgccgaatctgagtttacgtttttttttggtgtcagtctcatagttttctggttttaaaacggaaaatatatgcgttagggtattgttggataacgaggaaggagtaaacgaaggaagaagagggagatgaaggcgttggggtattggttaatggtggttggttcactgagactagcttctgtttggtttggtttcttcaacatttgggctcttcgtctcgctgtcttctctcagaccaccagttcagttctccctttttaatctctattttaaattgttcttgatttgatagtgtgttagctccaacgatttaaatgggtgatgttcacatagaaactatagataacttcagattttcttctatcaattgacttccttggtctctgagctagtatctgtgagttagtatctatggagggcacgtgaattggttgtttcaatgagaaatgataatgtcaggttcagaggaaccattcttgtggaaatttaacaatttgtgtctgtgatttgagtcttccaataaggatcgaatttgggatccctaagctttgagatctagaaagatagtgaggaattagaatattgttttgttttcctggatttgatcttgattcttgctagtagtagtagtacattgcatatggaaagtcaatggtttatgaatcttgtagtcaactttgaggttttaagaaggaaagccggattaggattcgttgaacatattcatgatgctctttctacttgctcttatgtgttcttttaattgtcaagttgaggtagttgggattgaaagcaacactcatgaattagtacaccataagtatagcaaactgaagcaacgtatccaagaaagatataggcaaatcttgtatgttgtacagttccttggtgaagtaacttttttaataagtggacggccatgtcctagatatcaggaaagggaagagtatttggatcgagaattgggtgggaatgataagagtttacatactccaatgcataacctttttttgtgggatctttgtaaagttttttcttaaagtactgttgaagtaaattagtgatcaggtgaagtgaataagattttgtatatgtattaaaacataagcaacttgaagtttcttttttcctttctgtaacttgtggtgcatggaacattgttttttttcttcctgtgattgcaaaaggtcttgtacatgttttgttcatcagttctgataacacaaggactaataactttgcatcatctaagctacatgagaaccgggaacacaaaagatttatctagacaaaactagttcacatagttgatgtctctattacttaggttatctcaggcaatggggccttctcggttcacaagagtcctgtactcattacttgaatctttttattacctgttttgcagtgagtgaagttcatggacgtacattcggagtatggacactcttgacctgcactctctgctttctttgtgcattcaacctcgaaaacaaaccattatacttggctacgtttctatcatttatctatgcgttaggccattttctgactgaatacctcttttaccaaacaatgaccatcgcgaatctctcaactgtgggcttctttgcaggtataatttgaggcattgaccatcactcactcttgtattgaatcagttgatgtaggttgcattcatattgtgaatgatctatataatgtgttctctataacaggtacatcgattgtgtggatgctcttggagtggaattcccttgaacaaccacactccaaactttcttgatgttagtccacatctatgtttctaagtctctcgtcttataagcttttctaaaagtgggaatcatctgagtttttgctcgatccctaaagctgttgattcattgtttcatctaaatcttacgacatctttgatggagtcttgaactatgagaatatcataaattcatggattatatggtttctttttaagtgttgtttattgcttttaaaacagagatttgagtttagtgtatggttgatagtcaacgaacagggaaactatttcttgcgttcccttttttatttgtttgtatccaaaatgattctattttccattttcccggtaactgagaacagctaacaaaacagataaacctactaatagtgtatagtaacattactagatgacagaattgtgataatatgactaatgtatttcccctagtgaatttaacttgtgaaggagcttgccatcttccgttatctcacaagtcacacctatggctcaaaattgtcaatcatgtgttgtataacatctgctccagctgaattgatcatctttgttttcacctgtaatgttttccaaatgtgagtatgaagtttaataacagtagcaatggtgatgatgatggcgacaatgatgaacacttgcctgaatggtattgtgagcgagaaatctttgcagcgttcctctgaaactaacatcaactcgttcccagctcagttttgttaattctcttatcatctcctctgcataagtttgttgtattatgatgactagaaatcaagaataagaaacacgagaatgagttttccactgaaccaaccttccatatctaagttcttgaacctgtctgctttggtccttgaatgatcttcctcatagttacttgcagtatccggtgcttcaacattcacaatgtgaggatacttctcattgactggaccacgttgaagctgcgaaggttatatcattatatgtgagacttgattcagcataacatacacagcattatcttattaaacactgaaagtgaaaggtttaaccttaggaagctcattgtgacgccggatagacgatgtactccacccaacaaggtctaagaacaaaggaggtcaaggtttcaaatgaattgtaatagccacaacagttctgagtcttttttttaagctcaattcacattgtccgatcagtgaagaagtagagaattagtttaaagacgtccaacaaagaaaggatacggtcgaaacttgtattcgcgtaagcaatacgccgtttgaagcattgcaaagcagaactgttcacaaaagcagaggagacattagaaatcatttgaactacgcaaaagcctcaatcagctatatatagaaaaatcattgaaggaactcacatgaatttaagatctctagaatctttaaccatccggaggagtaatggaggctttccaccatcactatcagccagaaaaagatgttttcccgttttaccaagacaacccgacatacgcgtagctaatctctccaaagtgtaagatccagaaaacaatgggacctaatgcagtcaaaatgccacaccattaaccaaattgtaacttttcatgttgcaaaattccacaaactgtatcaactatcaagcttacaggagaatgaggcataaaaggatctcaactttgctgtaaacatattgacagcttcaatgtaagaaaaccgttttcaaatcacctgtttatgtcctcttgaaccaaggtgtggtgttgcagaagttataaaatacacaggctctaatccagcgattcttgctttcggttcctctatcgagcatttatcaccaatgtcgtcactattatgtggaagctcttctcgggattcttgctcataaagacgcccaatagcatacctagcaatcaggccacctaaagaatgtcctacaaaggaaatcttctgaagacttgggtgacgtttgatcaccgacctaacctaaacaaaagagattaagaatatcacttgagctggaaaactcaagcagagacaaagatagaaacttctacataaaaggttctagcattgcgaaaacatctagccaagcggaagacaatataacattagatagaaacaacgctgaaatataagcagcctaaagataagaaacacaaacctcttcagctaatctttctcccataacatcaacaccatcaaatgtctgtgtggaatggttgcgtttactgcctgcaaaatgattataaagtatcacaagccattatttaaaaactattataaaaatccagtaaagtgagatcaaaatatctaaagtgtgattctttcttccttccaataatcaatctgtttcacttgagacttccaatcacaaatttactatagaccattaggaggaaactctgttttaattgaaaaaatatagagaaagaagaactcacagtgaacgaggagatcctgaggatacttcttaagcatctgcttagcggcgaatctccaattctgagcactgtacccacacacaaaatttaaaatcagcttaaaatagaacaaaatcaagcacataacataggaaacactaagaacctgccgatgagaccgttgaccatgacgactaggtgagtcggctcagtgcgttcgccagggaaatcaacagtcaaatcgacgtttccactttcgtctgattcagctctgagacaacccatccaatactttttcttcttcttcttcgtctctttatcatcactcttcctgcttctcatcttcttcatcttctttggcttacggattccttcaagatcacttccaacacgcccatctccttctgtattcttaggaatcacgctatcttcttcctccatgatcacgaaacgaagaatgaaaaatggaaactttatgcaggtgttaattcaaggtcgccactttgggaagattcgaaggtctcgcgtaggtttttatagacttcaaacatcaaaagttcaaatggtcagagagaaacagagaatagtttcagtcgttagggaaagtccccacagaagtatttgttgtcgtcgttgaaacgccattgacattttctttcttacacatctgagatttggacactgttgctttttctagaacacaacacatgttatataaagtcattaacttgattaaatgagccaaaaatgtgatttggcataagttaaaaagcatattcagacatgatgatgataattaagattatttttatataataactttaaaagacaggcccggcccatttaatgtcaaagattggatccaagttttgcccagagaaaaggaagcttcatgaatcatgagtttgtttcttcttctggaagagtcaaacaacaattttgacttttttatcagcaaccacaacgtcgaaagcacgacatgaatcattaaaaaaaaaaaaaaaaaccgacgagatttttgtacctttcttctccgaagtgttgctgattgatgtctgttggatttctctttcttcaactaatcacctttctgtgtcctctcgcttctctcttctcttctttcccattcaaaggtgagatttttaatttgactttttttttttgggttgacccatttcgaatttttatcatctactggttaatgttgttgatttgattatatccgaatttagtacaggctaagctcatggcggatcttaacattgtaatgaacggtgacttctttgctgggattgaaccttggtatcccaacggatgtgaagcttttgtagtttcctctgacccatttagctcagaggtaatgtctgctgattcctcgagcggtggttatgtcgttgtaactaataggaaagaaacttggcaaggacttgaacaagatattacaaccagggttgcttctggaatgaactatactgtatcaacttgtgttggtgtgtctggtcctttcaatgaatcagctgaggttctttctactgtgaggcttgagcatgaagactctcctaccgagtatttgtgtatcggaaagtatgtttttttttatggttatatctttgaaatttgattgagcttttgtagagatttctgatgaagtggaacttatctgcagaacatatgcctcgagagacaagtgggttgatctggaaggaacgttttcgatatcaaatatgcctgatcgtgttgttctctatctggaaggtcccgctccagggaaagatctccttatacgctctgttaccgttagatcctccacttctagtgacttccaggtgaacctcatgtctttcttgaccagccatagtcatatgttacttaactatttggggatcatagttttgcatttgaatatgaataagtaaagaatatgggtatagagaaaggtgattattagagaagataaaagatatgttattggagactgagatagatgtaactatcatgtgtccaagtttaacattattgttaattctggttgtctgatcatgaaattatatttcagttgtttgaaatagagagaagtaaagctatatgaaagaagttcagctacatgaaagaagtctagcttgtttcgttgcacgttagttgaggcactatatagctcaccgggttcatctaattctttacagtataatccagattacaagaaaccagcaagctaattacttgtattctaacatcgttttgtggcttactatttcactgcaggaaaccgaaaaaaacactgacgcttccaatgtcttccctcttgctttgaatatcattaagaaccatgacttctctgatgggttgtattcttggaataccaacggttgtgattcatttgttgttagtagcaacgactgtaatttggaatcaaatgcggttgttaataaccgaagtgaaacctggcaaggactggagcaagatatcacagacaacgtttctcctggtttttcatataaagtctctgctagtgttagtgtatcaggacctgttttagggtcggcgcaggtcttggccactttgaagttagagcacaaaagctcagcaacggaatttcaactaattggaaagtaatggaaccacatgacttctttgtgatatatagtcaagaagacccagaaatgttgacattgataatgtttttatctgcagaacttatgcttcgaaagatatttggaaaactctggaaggcacttttgaagtgtcaggaagacctgaccgtgttgtattcttcttggaagggccacctcctggaattgaccttcttgtaaagtccgtcaccatccattgcgaaagcgataatcagtttgaggtaactgtgattagatagatagactgaaagtacattgacatgatcaatctatgatctaaatcttagctttgatttaatgttctgccttatatgcagagaagccgagaattctgttcagctcctgaatctgataatcacatcttcctgaattcaagcttttccgatggcctcaatcattggtctggaagaggatgcaatcttatgttacatgagtctctagctgatgggaagatactaccggattctggaacctgttttgcttctgcatcagagcgcacacataagtggagcggaatcgagcaggatataacagaaagagtccagcgaaaactcatttatgaagcatcttctgttgttcgactatcacatagccatcacaccgtgcaggccactttgtatgttcaataccttgaccaacgcgaagagtatataggcatttccaggttaggctctccatatgacgattttttctttttcttcccacatgttactgtaaatgtgaatcttggcccaaatatattgtctgatacaaagaatttgaagaaagtttgttcccttttccaagtgttcagggaacacacgacgattgggtagagttaaaaggaaagttcctcttgaatggatctccagctagagcagttgtttacattgaaggaccaccaccagggattgatgtttttgtcgaccattttgctgtaaagcctgcagagaaagagactccttcaggacgaccatatattgaggttacattaaaagttttgtggtttttaacatttaccttctctttgtgtttaatgtattatatgttgtttccatttttctacagagtcatgcttttgggatgaacattgtttcgaatagccacctaagtgatggaacaatcgaaggttggttccctcttggagactgccatttaaaagttggagacggctctcctaggatattacctcccctggcgagagactcacttagaaaaacacaaggatatctatctggaagatatgtgcttgcgacaaatcgaagtggaacatggatgggtcctgctcagacgataactgataaagtgaagctgtttgtaacataccaggtctccgcttgggttaaaattggctcaggaggacgtaccagtccacaggacgtaaatatagcactcagtgttgatggtaattgggttaatggaggaaaagttgaggttgatgatggtgactggcatgaagttgtgggttcatttagaattgagaaggaagcgaaagaagttatgcttcatgtccagggcccgtctcctggtgttgatcttatggttgcaggtctccagatcttcgctgttgatcgtaaggcacggttgagttatctcagaggacaagctgatgtggtaacctacgaaacatattactcattacatgtttggaacgaaaattaaacttcacatcaaatgctctttctctgttatgcaggttcgtaaacgcaatgtttgcctcaagttctcaggtttagatcctagcgaattgtctggtgcaacggtgaagatcagacagacacgtaacagtttcccactcgggtcatgcatcagtcggagcaatatagataatgaagactttgtcgatttctttcttaacaatttcgattgggcagtgtttggttatgagctgaaatggtactggacagagccagagcaaggaaacttcaattaccgggacgcaaacgagatgatcgaattctgtgagagatacaacataaaaacccgaggccattgcatattctgggaggtagagtccgctattcaaccgtgggtccaacagctgacaggttccaagctggaagcagcagttgagaaccgcgtaacagatcttcttacccgttacaatgggaaatttagacactatgatgtgaacaatgagatgctccacggatcgttctatcgagatcgactagactctgatgcaagagcaaacatgttcaagactgcacacgagttagacccattagcaactctgtttctgaatgaataccacatagaagacggatttgactcgaggtcatcacccgagaagtacataaaactcgtacacaagctgcaaaaaaagggtgcacccgtgggaggaatcgggattcaaggacatataaccagccccgtcggtcacatcgttcgttctgctttagacaagctaagcacactcggattaccgatctggttcacagaacttgatgtgtcctcgactaacgaacatataagaggggatgatctagaggtgatgctatgggaagcctttgctcatccggcagttgaaggagtgatgctttggggattctgggagctgtttatgagcagagaacactcacatttggtgaatgcagatggtgaggttaacgaagctgggaagaggtttctggagatcaaacgcgagtggttgagttttgtggacggagagattgaggatggaggaggattggagtttagaggttatcatgggagttacacagtggaagttgtcacatcagagagtaagtatgtgacgaactttgttgttgacaaaggcaattctccagttgatgtgattatagatctttaacgtttcataatactaaagatctaaacattacaagtctttatctttattttcttctgaagatgggtttttgctgaaatgatagttcttctttatttccgatacttgcatcacaagaaaacattactaccttatttaaacagaaaaattatatgtattaaatttgaatttcatcaaaatatttcaaaagaaaaaaaattaccttatgaaaatgcgtacaaggtttactataagttatcagatgcagtggacgaaagaatatgatccgttagttgagtcgatcattctaataagagcaatcacgaatgatccacaccacctacaatctcatacgtacttgtccagcttcactgcacctaccatatccttaatttagttggcagatattatgtagatatatgtatatttcaacttggtgttctccacaaccacccatacatacaactttcgacaattgatgagacaagtatacaaataggttgggttttaaagcatttagtactatcctaaatagaaacgagaagggatcatttaatgatgaccttgaggaaataaagttggtttgcatttagtttcccattgatatttatgtgaatagtgaccatacgtaactgtaccatacttttatgtttccaccatcagggcaacacaataaaattgaatgccatctaaaacaaagcaaaaagatttactataattattttcttactcatgcatgtactcccaatctcccatagatattttcgaaggtatttttgtggtaacgtacaagtcttggcttcgtaatctaaataccgaaaaagaaaatgcctctaacttcccttcctctctctatatatttcaaccactctctgtctctcttcctctttgtagtttctcaaatattttcttcagagttggcacgacctcattaataataatcttctctacacctatcaataagagatatattttagagtttcactttggtgcacaaacaaagctcgtacaacattcttcgtatatggctcttcgtcgctgcttacctcaatattcaacaacttcatcttatctctccaaggctcgtactttctccaatataccatcatactgttcttttttctttttcttttttctatacagtaaggaaactgtacaacttacataattttattttatttttatgtaatagtaaaaataaaagacatttgctttgtttgtaataacacagatctggggatttcgtatgcatgggaccaaggcagcagcttctgttgtagaagaacatgtctcgggggcagaacggtaacagtaacctccaatcaaattcaacatttgtccgttcttattcattgttaccatttacaagaaatatgcaagaaacaaaatggggaaaaaattaaaggaaataaaaaaaataaaaaatagatgctaaaattgtatacttttagaaaaaatattgcgtgacggaaagcgcttattggtggtggttgcacaatgcagctcaagcccgtgatcgtttcgatggagtaaacaaattttgtaaaaaaaagtgtagtatgttttttttttaaaatcagtaaaaatagtgctttacatttccaaccattaaaagttttaaaccaaaaaaacaaaagtttaaaagttagtgttttgttaggaatatgaatagtccttgtcttggattctagttatcatataagaaaataggcttcaataggcaaaatattcttcctgtgatgcagtgaggatgaagaatatgctgatgtagattgggacaaccttggattcagtcttgtacggacagatttcatgttcgccaccaaaagttgcagagacggaaacttcgaacagggttaccttagccgttacggcaacatcgagctcaaccctgctgctggaattctcaactatggccaggcaaagcttcaaatcttatccaaaatcacacaaatatatgatctcagttgtgataaaaaactacttttctggtcgactttgcagggactaatagaggggatgaaagcgtacagaggagaagacggtagggttcttctcttccgtccagagctaaacgcgatgcgtatgaagataggagctgagagaatgtgtatgcattctccttctgttcatcagtttattgaaggtgttaagcagaccgttcttgcaaacaggcgttgggtagaaccacattttcgatgcctttttctcctagaaaatgatcttcggtttagatctctttaagggtcagttttttttttattaggttcctcctccgggcaaaggctcgttgtatctcagaccgttgttgttcggaagtggagcaagcttgggtgtggctgcagcatcagagtacacgtttcttgtgtttggctctcctgttcaaaactacttcaaggtcttaatcgccttgaagaggtattcttgttttctttgtagcaaagagtcttggtcttaaatttgattgcttgtataggaaggcacagcggcgttgaacctgtatgtggaggaggtgattccacgcgcttatcttggaggaactggtggtgtaaaggcaatatccaattacggtccagtaagtttaaacactcatcctatatagtttcaagtactaagcaaggtgtttcgttccaaagtaagtgttaattgttttggtgattaactgtgaaaggtgcttgaagtgatgagaagagcaaaatcaagagggttttcggatgttttgtatcttgatgcagatactgggaagaacatagaagaagtctctgctgctaatatattccttgtgaaggttaacaaacactctatttaagacaaaagtggaagggattttttttgttctaatgatgctgttgtatactaattgaagtttattgagtctttcagggcaatacaatagtgacaccagctacgagcggaacgattctcggagggatcacacgtaagagcataatcgaaatcgcccttgatcttggttacaaagttagtagttattccacgtcttttttcttctaacaccgtttccaatcttgagtcaaaaaacagagcaatactctgtttcaaaataggaatacttttgatgcatggaagttttgataagtgtgtaatggactcaggtggaagaacgaagtgttccggtagaagaactgaaggaagctgaagaagttttctgcactggaactgccgctggagttgcttctgttggaagcatcacttttaagaacacaaggtctcttcttcctctctggatacatgtatacatatgcttagaattttacatttatctgttgataaataatctgcaggactgagtacaaagttggagatgggattgttacacagcaacttcgatctattcttgtcggaatacaaactggttctatccaagacactaaagattgggttttgcagattgcctaagttactttcatatcctataaataatgttgcactctcttgatcacccatcaaaagcttttgaaatagtttttggtaaatttgtgacataaatttgtgatatatcaccacatcgtattagtattaaacatttgtttcactcttccaaagagacaaaagcaaaactaaagaccttcaacttcaaggtcaggatatgtaatctaatggtttgtctttgtggcattttgccaccattggttcaaaataccattgctgtatgatcagcctcctcagattctatttgccagactctacggcggtatattcgcttttagaaaaaaaacaattttgtcgaaacttttttttttttgtaaatattgtagattccacacacaagactgtctaagattctttgataagacacgacaaatgcgatttaagatttttcaaagaaatgaggttcgttgattgttccactaggtttggtatatttataatttgaatttttttttttaaagatatttataagaaaacgaaggagtgtgctcgcgtcaagtgtgtactaatagtcgatgacactagtgatacgacgatactggaaagggacatcaatattcattagtaagccatcttagcaaaaacgttgttatcagataagaaaagttctcagactgacgtggctgtcaatctccacaacgtgtttatctcccatttgggtagttacggacaaagacgttgaaaagacaacaatatggtctaaaagattgacatggaaagaaaattgtttatccgacaaagacctcttggtccaacgtggctttcacatcactagtttactatttcacatctcatggaaaattactgaaattagtacttgtctgtattttgttttttcgtcaagtatttgtttgtatactttaggtaattgcgtgccgaagaaacattgctaaattgatatttataccaacttacaatagtttacagttcaaaaatagaaatctccattttgaagatacaccactaattttcttcatttatttaccccataagagaacgagaaaagaacaatagtccgttgatttcgttaaaatctagtttcagaaagacacgtctagatctgtctgatcagggcagatagacacaagtgacgaagcaaaagaaacacaaaaataagataagaactcttaccactaaaagataaaaataagaaaaaaaataaaacaaattcaacgatttgccaagataaaagcagacactgtacataagctccgcattcacttacgtgttggatacttaatttgacactcttctttgtgttttctcttccaccttctttttcggtatatcattcaacaaaattctctcttcatttctttattttgttgttttttttattattattgaaatcaagagaattaaaacagaggctctgcaaaagaagatgatcaaaacaatcacatctctacgcaaaactctggttctacctcttcatttacatattcgtacggtataaactggattcttacaatctaatgatgattacttacttagagacataactcggatctcagatacaaacatgttttatgttctgttttttttgtcctgatgaaatagctacaaactttcgccaagtacaacgcacaagctgcatcggctttgcgagaagagcgtaagaaacctctttatcagtaagttctctttttcatgatccagccaggtcatatagatattttgttaccattggaaaaagctctgtttcaaatttgttgtaattgtatcatatagaaatggagatgatgtatatgcggatttggattgggataatctcgggtttggtctaaatccagctgattacatgtatgtcatgaaatgctcaaaagacggcgaattcactcaaggagaacttagtccctatgggaatattcagctaagtccttctgctggagtcttaaactatggacaggcaaggatctcgtaacccccaaatgtttcttgatttgtttctcaactgtatgatcaatagaggttttgggattctttgcaggcgatatacgaaggtacaaaagcatacaggaaagaaaatgggaagcttcttttgtttcgtccggatcacaacgctatccggatgaagcttggcgctgaacggatgctcatgccttctccttcggttgatcagtttgttaatgcagttaaacaaaccgctcttgcaaacaaacgttgggtaaaaacgctttcttgtgacgtatatttcttctgaagaggtttgtttttgggatctgataagtgatgatgtgtttgttcaggttcctcctgcagggaaagggactttgtacattaggcctttgttgatgggaagtggtccaatacttggtttaggtcctgcacctgaatatacattcattgtctatgcatctccagttggtaactacttcaaggtatatacaatactcttgcatgtccatgctttttggcgatggaacgattagcaaatgttttgttcactgatttgtaggaagggatggctgctcttaacctctatgttgaggaagaatatgtccgagcggctcctggtggagctggaggcgtcaagagcatcacaaattatgcgccagtaagtgttgaaaccaacttagtttctcaaagaccagagtcagaaaaagagttttgataaaccacgtgtttgtaggttttgaaagcactgagcagagccaagagtcgggggttttcagacgttctttatctcgactctgtcaagaagaagtacttagaggaggcttcttcttgcaacgtctttgttgtcaaggtaagatatattgtggtgtctccatgtctctttgttgcatcctaattgtatcattgattcagggtcggacaatctcaactcctgcaactaatggaacaattcttgaagggattacgcggaaaagtgtgatggagatcgcaagtgatcaaggttatcaggtaacacagataagattgaatcactctaaacacccaaaaactaaactcagctaagtttcacacctgagttatgatcaggtagtagagaaggcagttcatgtggatgaagtaatggatgcagatgaagttttttgcaccggaactgctgtagtagttgctcccgtgggcactatcacatatcaggaaaaaaggtaaatctcaatgcctgaatcaagttttactcaagccttaagcaaagaaatggactgatgtaatctttctgaaacattcagagtagagtataaaaccggggatgaatctgtctgccagaaactgcgttcagtcctcgtaggtatccagacaggattgattgaagataacaagggatgggtcacagatatcaactgaagaataacaatcttcaatattttgccacaaaggagattactctgcattttaagctgtgtatacacgacaatgaagaacactataaacatatatatgagatagaaacagaaagctcttttgctcatttctatatcgtaaagtcaatgtctttcacaaaactatgacaaagaaaagaatcgtctattgtacttgtagacaagtgtttccaaggatagtttcatttcctcctgcagtaactccaaatttacatttcattttaggaggcaaaactgtatatacgtttcaatggctttccccacttcttactttcatcacccataagggtttcaactactaaaattgtaactcaactgcaaaaacaccttttcatctgcagagttataaagtatacattgtaactcaagtatctatgttcgtttgtagatctcggcaaaccctggggaattacgaattggggaagcactgggacaggatttcacctcaagatcaagaccagatttacttctctggaactcccatatgtaatcagctttaagattctctttctcaggcttcaactcttcagaatctggtaactcctgatctgagcaaggagaagtgcaaccagctttgctggattcttcagaacacgttggtatctgagagtatgcaactttcaagttgttatgtatctcttccatctttcctgtcatctcatctgctctgtccatagcgataagaatctgaaagaaactcatacatcaatatctctcaggagatgcaaatcgaggttatgaaaagatgagtaatatatatatatatgtatatatacctcggctggatatttctggaatatgggcgcaaacctttgccggcaatactcactaaatagaagagtgagaaggattaacgggatggtgaaacctgaagcaaccgttgatagctttaacccgaaaaagcctagagctataacttgcgacaagatcagtgaaaagattgtagtgttgtgaaaaacaggccaatattgtccaccgctttcatactttgtaatatagacgttgattatctgcaaaaaaaaaaaaaaagacaaacttagtcagatccaaataattgtacttcaaactcacagacttgtctacctatggcaccactattagtcgattagcacaaatacattaatcatatttccagaagcaagcactcaacgaatgcagggacaatcagacaacaccttatgcagttctcaaagttataaggtaaagcttcagatagatcatgagaacagctggtaacttaatgcaaggtctcgacgacaatgtttcagtacagagttcttggaatttagttacaaatctttcaagaaaataaaataatactctttcatgcttctgaatcaggtttcatatcaaattgtgaaaaagtccaaaaacatttgatcatggatataggtgtctatgtcacaatttcttgaagtgcttattggcaactacaaaatgaggtctatgtagaagagatcagagcagatatgcacgtacctgatttttgtatataagatatgcgaagaaaaagtagatcagcagaaacggcagtatcagaggcgctatgactgaattggtgaaacccaggagcccgaacaaaagtagtcttggaatttctgtatggtagggaaacctaagtgtttcatatgactcctccttgttcttaacaataacttttgcaatcagattccaaataagacctacaggttgcatgatttcacatgccaaaccggcccaaccagacgtgaaacaataggtcatgaagaagccagcctgcatgtagtcaatgaataatttcataccgttagccttatagaaaataacaaaattgaatatagtcacacgtgtgaaaggaacactgaaaattacctgtgctggaacaagtttcgcaagttgtgcaggtacgtccctcacactattcaagacggtaaactgcctgataacagagcctgatagaatattgacgaagaacacattccagatggtgaagtataaaattttgagacatgcacttttttttctttgactccgagaaacacatccctccaaggttgaaaagtacatcatcaatggcggaacggtataaaagaatagaaccaaaatcacacttggtaaataccctgtgatgacctgctccataaacctcctgcaatgtttttcaaagggataattaaattgaaaggaaatgaaaagaaatcaattacacagaatttaattgttctcagttttttactgcgcttaaatctagaaaaatctagcataaatatatcaactgcctagcagcctccgactatacgcatcttgaaattctctaaaagcaacgtagctacacctactctttagtgccaactctatgtcatcttaagaagaatacgaacaaaaccttctattactgagtacaagaaggaaatgctgacctgttcaagaggtcttttagaaaaggaaaattcttggataacgttggtagttgagtcagcccttgaacaaaggtaacaggaaaaagaaacacaaacatgaaggcaattgcaccaacaagggttgctattcttcgcatccaaagctgccgataaggtattctgagatttctccagtgaacatcatgaggctctggagccaagtctgccacccataacataggatttggtgtttgaagaacttctgaaacaacaagagcatcataacgactcttgaaaaacacaaaagcaacgggacgttcctgcaaatgagcagaaaagtgtaagccttgcatacatatttcaggcgctgatacttcattaagcaatgtttacaaatgcagtcatgaatggagatatattccttttagatctagcttttaaaggttttaaacaaaaagctctttgtatcactaattcaaggtccattaacgtctcattgtagtattttttgggttcccctaagtctcagtgttacctctaaagctcaatttgtatctcagtaaagaacaaaagagtcaattctccagtttcagctgtaaaactgtgaagacatgcaacaggtaaaaccccacactatgcctatatcatgtacagcacaaagttcacctatcaaagtgaaaataattccttacttcctctgtcgtagtcaaagtcaactcaccaagctccaatcctttgacactgtctgtctcgttcgagatgatttgaaaagaatttgtggctgcaggtccacaaaggacgcatgacttcaaactcggattacaacttaaatcaggagaaacatgttttatagcctgacacatcctctccgtctcattctaaaatagaaagtgacacaattaatattagaatctaattaactcaattgttctccaaaatagaccactgcacttcaactatatgttatcatgagcacacaccatccactagttgtttaccaaagatattgccattcaaaatgctgatcagataaccaaagcaaaaaactgatgtaatatcaaaagaacctcaatatcagataacatgaactacaaataaaagcgttacaaatgagccaaaaacaaaatcagtactccaagaatgtggatcaatcatataatccccttagaacttcctatatctttaactgatacatgactatcaatcaaatctttacaacaaagttactgttctgttatttcatcaatctttgatgcccttggcaaatgaagaagcatttatgacagaacacaggggaagtgttatggtgaacattttataaagaaagaagaaacatgtaaagtgtgaaaagtgttaaatcacattccggaacatagagctatcacagcttcctttttctattctaggagattcctattctgctaaggtcaaccaagcagagcggcagtggtgttagctgaaaaatttattcctaatccgacaaaatcataacaaaaagacaagtgactgataatcaagtcagcatgttgcaaaaataaataaaaacacataccatcagtctgtgaatgaagccatcacggtagaccattaggtgcgacacatagcttggtgcatagtaatttgtaaagtatttgctcactgtctcgctgtaggactggtcaggagactgaggaatagcacgaataagaacagtaaaatgacttggctttgaggcagatccactaatatgggcaagcctctttttggctatgttcttatactcctacagtggtgaaacacgtataaacagggtgagagagagagacgagagaccaaaacgatgaggaagtgatggaataaagagaaacagtaagcgtgaaatgaaccaaggtataagatcctcacaaagtaaagaagagcacatgctgcagaggatatgatgtacaatgagagacaatgaacccagagcctggaaataaaaatagtaaaacaaggatcagcacttcattgtacaaaatactggcaatctatcttctcctgcacagagaaacataatcagatagaaaaacaggctatgcatattatctgataatattaatattatatgccgccactttaccatcgtgagcgtggattaaggttctcaattgtgaatactcccaatgactccaaatggacttccttgtgctccatcttttgtccataatagttaacaggtaacacaaaggcaaggcaaacgactgcgacgattgagaaaatacgaatgctgcagagtttaaaaaaaacacgataacccaactgtgagagttgttaagaacgaaacacacaaataccacatagaaataaaacaagtgctggaacatagaaacagtagaaaataccatgcttgtctattcaattacagtaagcatgttataggtgaagtatcattaacctgcaaatgaccatcctgatgaaaaccacagcatccagaccagcagcagccaacatctcttcctcagtggtttcccaagctttcacgagccaactaggagagggcgcgaacctctcataccaacgaggatcatgacgtttaactcttccgtcagaaagcaatcgaccaaagtaaacacaataattggctggctgctttcgtagaatggaataaagcgatacaagcactacgcatatcgctatattaatcccagcagacgttaaaagtgctgagacatccatctcactatctcacttttagttcaaaccctgccttaacagggttggctaatcaagcccaggctgatggctgtttaacaattcacagcagaaacttaggtcgtcaaaagatctgtaaggaaaagcaagaaataatctaggataagagatatggccatgaagcatgtggtaacattgaaacatgaattgtggttactctaacaagtaaggactgatctcaaaagttgcataagtaacgtacttgccacttgatcagttgtaaaacagcgattacttagacaagggatgaaaaaactaaaaacctaaaactttccatgttcggaacaaccaaagatacgggatcaaaatataatcaactcttaaaagttgtggctgatgataagataatgtaactcaatcgtcatttatgattgaactaaaacgacccacgattccatagaacctaagaaaaccagaacaccaaaaacagaggaatcaaaggatttgattcgcgaagagaactcactacgacaatggaaacaagaaagcgagcgaaaccaaagcccagattatgaaattcgatcaaaatcgaagaggagattgaggagaatcaacaaacaacgagatcgtagataattcgaacaaaaaatttacccacaaaagaaaagacaaaacaataatttgaacaattctgacttacatggacgagaaaaggtaatgctttgctttgacttgaaaggaatcaaagcacgagaaaacccgaagaatcaaaaaccctaaaagttcttccttttaaccccaattccgcggagaattcgctcgcgttctaaactttgcaatatgcaaaaaatccaacaaaattaaagaaagataatgattgattaggtatactgtatacacattacatgttattattttggtgaggatatttctctagacggaaagataactgaaaaaaatcattgggcaaaattctccacgttggtgtaaatgtggaatcgccagatcatgtgacgtggcataacgtgaatggcccaaactaatatctcgtcggcaaaggtctttttagcctgtgatagtgactaccttgtcggcgaaattatgaccgttagatttttgtaaagcgatacgattgtgacacgtggaattaacattgacagttaacaacagtttttgcccgggaaaattaaaaaaggtcgcatatctattatccgcgtggtgagagtgtgagacctaccccataacaaggaccggtcatattaaattatgcccatttgactattcattctctttattatgtatgactatataataactcgattctctttattaggtgtgactatgaattatgatacatgctttatgatgcggtatgcatataactggtttagcatctttacataattatcggtttgatattcccaacggtcagtatctttattcaaagctcataagaaataggtaaaagagtgataggtttcctctttccagtttatttgtgagattacttgcttataaagcaaataagcctctctgtatattcatcaacaaggactagtctgcaatcacaagtaaaaacaacgctgctcgaggacggaatcgctgccccacgatgtggtagagtgcatcctagagagacttgctgtggattctctgctgagattcaaaggccgtgtctaaacaatggaaatcaattatcgaatctccattcttccaacaaagacagttgacagagcgtcagcaatcaggtgatccagatgttctcatggtctccatatggcgttccctttgatagctgtgacggtctcgtttgtctcatggtctccatatggcgtgacgattattgtaaaccggatataaaacatctaactacactggtgttgggttcctcatcatcggtcaagatccctactccttgggagaaggcgaaggaggacacaatatacttagttccctttgatagctgtgacggtctcgtttgtctctacggaatacgacatatctggttttggaagcttatataaccttcattcatttttttaataggtttggttacaccactcgaagactcgtgtaacacttgatgacagagatttctcggccaacttcttcattaatcaactcattaagctatatcggcgaaaatagaaaaaaaaaaaaaaaaaaaaaaaaaaaaaaacaattcaaacagatcctgagacatggtttgacaccaatttatggagggtcttcagacattcaccaaatgatgcagaagcgagggtctctcttgagcaattgtgttcagtacacacttcactttctctgttccaagcttctcctcgagcattctccacagtactggaatgctctgcttataaacgaatgcatatcagaaatcaaagtcaaccatatttctatcgttctgctatacggaaaactcccaatctatttttctgcacttgtgagattgacaatagtggcaatttttttgatgactttatttggacaagaagagaccactgttacctttgtcagccatagcgtgtagacagcagcatgcaatgcttgagcttgaaaatcttcaaatttggtatccggaacggtcatagaagaatctagaagacggatctcattatcaatgaagatggcaatttcttcattcataataatactctctccggtttcaggtgaagcatctgaatgattgcaagcgaaatacattatccaattaagagagaggaaccgccggtgaagccatagtgcctggaagaaaaaagtataacaactcaaataagtcactaattcaatcatctctgtattagcatgacaacaaactgtttaactatctttgttgtccaaaccactgtcgccatgatagcttaccaagagagaaattatgtactttttgcaaaatccaacttggttgtttctttaatagggcagtttacaaaattcaacttggtcaaactcttctaccggtcatgcgcattgtagaatattttagacttttagtaccttttacaacaatacaacacagctatcggtgctagatcttcataccgtgcccatctctacactaattaatttttcaaaatcaaagataatcatacctctcgtcccacgtaacgttctaccaattcttcattccaatccagctcttcctgtcatataattgtagagaagttttaggagccattctcatttagagcacaaatgtacaaataagattactcgggttagcaaggaagacaaagcttaccttccagattttgcgtgcctcagttttatcataagcgctgcttcctttcacataaagtgactccagaatcttgagcatcagccgctggacattaatgaaaacaaatcagttgggctggaaggaaaacttcaccagattcaatggagaatgatagttgtatcttttacttccaagacctaacataacttggagtaagttagattgatgtatacgctcactataccacaatcacgtcaactgaatatgcggcccttactctgcgataatggaagcaagaactatcggctacatgaagcccagcccatcttttagatttgttcaactcttgtatcacctagaacagacaacatgtatatattacttggaatcacatatgagaaaaaaaaatatggtgtatcgtagaccatctgaaactgtcacaagtttagctaacaaaagtaaccaatttaatgaaatcagaaaaatgttgcaaagttaaggaaatctgaccatatgagatgttcacaagttcaaaccatatgttcaaaagatcaggatatctgaggaaatgtagagaatgattcacctgctcaattgtcatgtaagaaaccaaccagcaacggtgataccatgcacgatagttcatctttgatctctgcaaaaggcaagtattttgattaggagccagcttcttttcggagaagagtaagtggttgtgtgtcatattagtaggaattataaagagcgatggactttgatgatcaacaaatagaaatcttggagtgaatatggacatgatagccaaattatgaagactagaagaaacgaatatttacttcattagatatatgatgaaatttcattaatcaaagcatcaaatctggaactaaacctcgcctattgattccactaactcagattctttggttataatctcttgtagtgtagaaaaactctgggaaatcatcttaattatccaccttctgttaaaataaaaaccaaatattacgaggaaagtaaatggacaagaacaagtatgaactattcaggctgtaacagaaactaaactgcgtaagatcagaaagtgtgtttcttagcattactaaaggataacaatgatgagaaacaatgattataataaatacaatgaatcataaagaccgacctatggctccatgttgactcactctttggggaatttgaaagaatgagcccagaaagacgaagttcttctgtgaatgccgaaaggtgatccttttttgacaaaatcaacttcctatctccaggacacacacacacacacacacaaaaaaaaagatgaggttagacactaggaaacatataagaacaattattacttagatgagtacctagcattccatgcagttccaaagtctgagctcaacagcaaaacagattggctatgcttcatgacgtcactctcgggaatacagggagaacaagagatattcttaatctgagactcatcacatgcgtttccatgggatttgtactcctgaagcgctagcagaaacacatgtttggcatctttacataattgaacaagtatatcagttgatattcccaatttgtgatcttgattccagaacttgcttgaggttccattgttaggctggaattcattggagaaacctgcttctttatcgagcatggtgaactgtgaggggtgaataaaccctacttcatcactgaattcagagagacaaacacacgaagtaagagaagaggaagaaaccaattcaattcaaagctcacacaaattcataagaacattagactcacataagagggtcagattcaaggacatgctcgaactgcttcaacaagctaaagcaatcatcttcagaagatggtccttgtttcattattcctcaagccttttcaaaataaatcttcccgcacttcgtctctcgctggcgaaaattgaaccggaatttgatcgatccttggctgacggtagaattagggatttcgccggcgaaattggttatggccggagagatttcagttgttctggtgaaatatcacaaaaaaaaaaaaaggaaataactttttattactccgactatttacctttttttcttaaatttgtcgagtcatcgatatttatttcctttttttccgtcatttatttccttaaataaagagtttaccttttactgctaacaaaaacctacttgtgaattacgaaatcgattagagctatggtcacagatgatgttcttcgaattggtcggagcttgtcacagacatcttatcattggttttcaagcagtttagctttacagattttgctcgagctaagaccgtttgttcgtcgtggtactttgcttccaaatcctcgtcacctagaaaaaaccatactccgtggctgattctctacgaagacacgcactggctcatgtttaattccgatgaagaaaagttttacagaacacaatacctaggtcgctttgtcaagtgtcgtggcgtggcgacttgtggaagttgggtcttggtctttgacgaggaaatcaatttctacatcattaatcccttcacgccacagctcattcgtctcccacctcttgaatatacaaacagaggcacaaagttcgagagacccggtaactattcattcgacatactcttcgccgatcacagagcaaataggtttgtgaccaaactaacttgagcgtttcaagtatcttgcattgttaggatattcttaccctcaacttgttgttgcaatgactgaacatagttgatgatttcatcgagcataaccttctttgaacctaattctaccatatcaaattctataccttctttccccaattggggaagcatcatctgaaacctgatgatgatcctcatgagattctcctccagctctgatcaatctaccaacactttcccctttcttgtcagaaccaagtttgagcacctccacatccaccaatcggaagaagacttgcaggcatgtctgctgcatgaccggagccagaaccgggttggtcatgagatcagaagcatcatcattgcaaccaatcagaggacttaagatccaaccaattcttgataagtgaaacttgcacacacacaaactcttctttctactttactccattgagataattactacataaatgggaccagagactagattactgtttcactaaacgcatacaaacacacattcactagagcgcctaaacgtaaaagtaatttctgtactagtaaattttgtaaacaaatatagttaagtaatatcactagactttcaagttacaagcatcaaatcttcaatgtgtgacacaaatggaatggttgaagttgaaacgcacgtctacaagttaggtggcatactctaaaaaattgaatgaacaattgaacatccaccagctttttcagagatgcgtagctgcaaattcttgctgatgtttgggtaaatatcctatgtagcaaaatacccaaattctaatgcaattatttgttaaatcctataaaagtaaatatacattaaagatttgagaagaaaacattaaattatggatttttggtatatgttatataatagtataatacactctataataaagtttttaaacaatattttactaatttggaagttgcaactataaatgataaattcggtctttgcatacaagggcattgatgtaattccaagtcttgagatcccaccactctcaatctcatcatcttattcaattctagacccaataaaagcccaatccgagatcgcatcattttccaaaaggaagtagcccaattcaatcggcagatcatgctcgaaatgattcatcaagcagcccaagcaatcgtcctcagaacatggtgcttctcccactatccctctactcgggccttttcaataactaaatcttctccgcaatttcaatatctgatgcaagcaggcagttgtgacattttgtcaaaccaaataactgaataagcatcgagattcagacgataactgaataatgccaatttacatgtaatgatttcatgtaacatcaaatgataattttgtatcacatcatctaatgatttcttttttaattgacaactattctattcatatatattctggttggttggatttcctacaatttagggagactgtgacggtaaatttcctttcttacaaaaaaagaaatatcaaaattcctctttctcggaaaaccctaggtgtgtgattgtgtctataaattcaacctcaaccggtgcatacgaaatcaattagagcgatggcaacagatgatgatggtactccgaattggtcggagcttgtcacagacatcttatcattggttttcaagcacttgagctttacagattttgctcgagctaagaccgtttgttcgtcgtggtactttgcttccaaatcatcctcacctagaaaaaatcatactccgtggttgattctctaccaagacacgcactggctcatgtttaattccgatgaagaaaagttttacagaacagtatacctaggtcgctttgccgagtgtcgtggcgtggcgtcttgtgggagttgggtcttggtctttgacaaggaaatcaatttctacatcattaatcccttcacgccacagctcattcgtctcccacctcttgaatattcaaacaccggcacaaagttcgagcgacccggtaactatgtattccacctactcttcgacgatcgccacagaacaagccgtgcaatagtggggaattcggttttgtgggtagacgaaaaaaccaaagactacttagttgtgtggtcgtacaaagaggcatttgttccgagtccctacatatattattgcagtaaaagagggcaagagtggtttgagattccggcaagcacttgtgggaagctattccggtgtttggatatggcctacaaagacgaaaagctttacatacttacttccaatggtagcataagaatcttggacttttctcttggagacttgcctagacaaatcgacaatcatccatactcccatcgaccgtttgttaccgagtttcctaatcataagatgggaatgagactaaccacgtctggggatgttgtgatgatccaatgcgtgacaacaggcactcacaaaagaagcccgttccgaatcttcaagttgagtagcattacagagacgaaggagtcttctcacgaggtggtagggtgggagacagtgcattctttcgaggacgaggagtcgttggtttgggatttgagcgtcactttaccaaccaaaggcgtatccggaatcaagaaagattccatatattactgtcacacttctctatcatcatctattcgggaaacatgtgcttatgagattcctacgcacaagatcactgcatatgacattcctaagcaggatatcaaacctattcgacaccgcggcatcttgattggagaggctcgttggttcgttccttgtttcggtgctggtgaataatcctctgcactataattaggacaaggcttttcaccaatcaaccatgttttgttagttttggattccattttggctttttgttttcgatgtgttagtagactttagataaatctgatttccatatataataaatgtattcttcgttgaggaaaagcaaaaacaacaacaactgagaatccaaatccttgtgcttagaacaaataatatggaagaacgaacacatatgatacttagaaccaaagccatcttctatacaaactccctgcaaattttccgtgtccttgaagtactagagctcaggtttcaatcgacctaagataagaagaagatgttttaaagacaattcaaaggaaacgacagatagatatatgagagaagcaagcttgtgtagcttttagttaccattaggtgagaaactggacatagtcgatggatttgagacgaatcccatctggtaaaggttttgtagttcactctctagtgttgtctgcaagatgagacaagaaagactatttacagcaataccaaaacattgaacataatatgttgtttaatttcttcaaagcggttgcttacctgaggtagtgggttgtattgtggatttgtggtggcagaaaggtttggtatgttcccttgaaaaccggcaaaaggattcagcccgagtgtaggagtgtttctgtctcttgactgcagaagctaaaaggagaaaatggcaagtttagtactcttattcaaaacttgcaaactattatttcaatgtgaagttatgggggattttgagctcttacatctttggcgagaatcctgtctatatcaatattgatctctggattcaccgtcgcaagtttcatagacaaaaactgaagaaaataaaagcagtttttcaagaaagaaaacctctttcacaccaaactaacttgagagtttcaagaatctcgcattactgggataatcttacctcaacttgctgttgcaatgactgaacatagttgattatttcatcgagcataaccgcttttccggtgatctagttgaacaattaccaacaatgaaaacttgagcaaaatttcgttggaaaccatactgctaaaagtaacctctaagtccaataccttgttgcatccgggaacaagttcttgaagcaatctcatcctttcactgatcttttctcttctaaccttcaaaacaacaaaagaaatagcaaacttctcagcaccagtaattggcagaaaacaaagagcagattctcataatctatatacaggtaaaagagtccttacccgctctgcaagactgtgactattagtggcttgacctcttcttgccctcatatgaatgtagttttctttcggtgcttcttcactttgtgagctctccttgttcaccgtctctttactctgatcatttttatgcttcttctggctctgatcatttcccctttgagggtcttcttgaaattcctccacagctttctgccaattttaacaacactcaattatttcagccctaaaccatcaaaagctttagtctttcctaattctaccaaatccagttcaagaagtttatttataccttgttccattgtgattcggcttcaggtagccttcttttcccaactggggaagcaccaagaacagcatcatctgaaacctgatgatgatcctcatgagatgattctccagctctgatcaatctttcccctttcttgtctgaaccaagaaaatgaccaatttgaccaccaccacaatcaccaaacggaagaagactagcaggcatgtctgctgcaaaaccggaaacagaaccgggttggtaatgagagaagcaactcatccctggattatccatcgccatggaaggatggtaatgagagctggagaagccagcagcagcagcattgacaactggatcccaatctgcagaagagaagaaaggatctgcctttgcatacaagggcattgatgtaattccaactctagagatcccaccactctcatcatctccatgcttaaagcccatctctcctccttcattactctcaccacccattcctctgcttcaacaacaaccaggaaccctcaggacaaaaaaagttttccaatttcagaacctggttttgctactttgacaaggaacaactgaagtaaactagtttagcaggattttatacagtggagaaagaggaaagagaaaacaaaactaaatcaacagagcatcaaatctaatgtagcagaagcaagtcacaggttcttttaggaaagagagagagagagagaagcctaggataaatgcttattcgtactcaagtcaagcgaagaaaaataattaaagagaacaaatagacttatcatagacaaagaaagctgagaactttcagagcataaagtggtaacaagcaatggatttagctaagttacagctcacaagagaaaaataaaaaggaaaagagagaaaaaaaaaagtagattcgcttttaagagtgtgagagagcaaagtcactatctcataaaccaatctcttcagtttttcaagaaacaaaaaaaaaaagattagacctttcacatatgaatgtgtgtgtgagatcagagaagcaagaatttttgggaattaaggtaatggagacaagccctgttagagatactccaagattgtggttgctttggaaagagagagtacaaaagaagaagaatcaaattcttgggtggggagtttacaatcactgttaaacctaaatcagataaatgagggaagagatagtacactcaattcaaagagtatcaaatgctgtttttgcttgaattggggtgaatgtagaatttttaaaaaggaatcaaataaaaatgaggaaaaaaaacgagagattcaccaagttgggttacttgaacaaacaacaaagcaagcatcaagttcccaactttatagaatcaaaggatacagtaattataattgtgtttagtttaatgggcaataaaagacctagagaaagagaacaaataaagctgataattaccatttaagagagagacttgttgaggttaacactaacagaggagacatattatgattattaaaaaacaaagacagaacaactactgccaactgctttatttgctcttttctttttcattattattacacaacctaatctacctcctctttaacatgtctaactttttttcttttgataattacatgtcttaacttttacacctttttaattacactaattttccctttggggttttgcttcactttttttttttttcaacaaagaattgttgatatctatgtgagttcaatatatattcaagaaacaagaaggccacggttaggtagattttacattttctatgataaatctaccatgctttcaataatttctcaaagaatattaaaatggagtgtcattttttaaaattgtctctcaaagtctcattgtacaagcaagaggttcttctcttcatgcccaagctttgctttctagcttctactctgacatgtgctttagaatattatatcacagaagtacaaatacatgcatgtatatgtatatgattatgatgtgtatatgtagataatataattttttactgacacaaaattgccaactatatattctaacagaagactctttgctgtgacacactcatatttttgttctgagtgccaactaaccctcttttggaataattttacgttcagcttttgtaacagccgtgtgattaaactactacgtttagatctcatctccacgccgttggatccaagcaacatatttttattctttctttttttttttactattttttcctttcttttcatttttcaattaaaaaaaaggatagtttaatctcattctaatcaaatcttttgttgttgttaaaactcgttctaataacgttgtgatcacatcacactttcttaatttctcagaattaaaaggtagttcaaatttcctaaaagagtatggcacgagggaattattgtttttttttttatgtaaatttatactaatattgcaacttgataaaaaaaatcatttcagtaagaaaaaatgaattattaaaaataccgttgtagtttttacagtgcgtagagtttatgatgatcctaaaatctaggtgatactatttggttgtagtgtcattttccgaaaacaagcaaagttaaactggcaagactttaacagtttttaaatattttacttgtcttcttttattttattattttccaaaaataatacttcgctttttagaattactcatactcaatgaaataaaaaacaccacttgaaatcacaaaattgatagttgaaccaaaaaaaaaaaccaaaattgatagttgccttaaaccctcattaactaataaatttttatgcatataacttatagaacacacgtctttaaagttgggatttgggaatatgtgaaaattcaatgtttgaatgatcaaataaaatttcatcatgtaccgtggttgttataagttataactcagatatattatacagctttgtcaaataatactgatgtggaaccccattaatgaaacaagaaactttttttcactttgactttctttcttatttaggcatgaccatgttcgatctgacttcttcttacaaaagcaaggttaaacaaaattttattttatgtttaaacgaacaatatctcagtcatatatattagttgttggtggtaaatcaacttacataaaactttttaatctttttgtactcagaaaaatcgaagatggggtagaaacaagtaaaacaatacgtagttagggtttattgtacgaataactctctctttttttattgtcaacaaaataatcctagattagtacaaaaaacaatatacataataggaggaaacataaggaataaaagggaatcttatataggtcattttagaaaattaataaaacaaaatatgattatatataactcctagtcaagttacagctgttaataaagacttgcagaaagtagagtttcgtagttcataagcatgggataaataccctctaacctaacaacgaacaaatcatttggtcaaaccttttaattatttggtcaaaccccacaatcttgggttgttaactagctgtaacacccaccagatatgaggcctctcgtgtatgtagacatacatgtgttttatgctactataaactcaaaaactgatattatggtcagtattatacgatttttgttctgatctcaaaataaataagtcgggagtagaatactattttctgattaaaaatcctttatctgaaacttcgttgcagatcatttctgttttttccacagtgatataaaaaaagtacacttatgaattatgtatacaaccttgtaataagggatgttcttacaaatgtagttaggttaggaaatatgacttgtttattcaacttggaaatgcttctcatcattgcagacaagcagaagatttaagatccaaccaaattatgataagtgaaacttgcacacaactcctctttctacattactccaataactatgtctatatgggaccagactatattactgtttcactaattaaacgcatataaccactacacattcattagaggcggaaacgtaaaagtaaattatgtagtagtaaattttgtaaacaaaaagaagtaatatcactagtccttaaagttacaagcatcagatcttaaatgtgtacagttgtatagtttaccaactaaccaatgtataaacagaatagtacaatctaatttccgtttcatgtgctgtaaaagaacaatgacacacgtaaaaagtgagcaaaggaatgattaagaaaccttaatggagtaggttaaattaaagacacaggttccttattatactccattttcacttaaattatgttaactttgattagagtgaaaccaattaaagtgagaagatcctgcgaccacgctcgcggactacttatgtggaccctcttttttaactaaaacttacaatggcccacaagaagtggaagtggtccatactcttttatttgcaatgatgtcaagattcctagtatcttaattatgatcgcaaatcatatctttctctctaatctcatcgtttatttctcaaagccataacaatttgctttatctaaaaaagttaagaaaaccgtatagtctagaaaccaaattaatgtcgctggtccaatgatgcatgaagaagtatgataactttggttctcattgatgtcgatgatagactaaatgcatatatatttacgtgaaaagaagtccgaattccacattagaaagtaataaatcttgattgtccataaaaaaaaaagattgattagaaattatatttcttcattaccaagtttatttggttaccagatatatcaacgatcaacaacttttcattagaaaatggggtactactaaaccacagtattaaaaaaaacattcattacataaaaatgatttctcgtgaccaaaaattgttttgtattttaacgaagctgtgtccttttagagaacatatatgatttggaagctccaagtcacacatacacacacgtagtttagagaaaaattgtttgttgacattattaacgataacaaaaatatttgaggatcatgagtggtgacaacgacgttgatttcagattggttagtattcattttcggttacatgcgaaaaaagtggtgaccacggatactacaagcttcacatagaaatatttacgcattgataatgatataatatgtaataacgtgaaatctcttagtggtattagtagaaaaatcatggtccataagccatatctatgacttgtagttacctccttttttctccaacttttttttctttctctagttatttttgagatctgacattataattttaatttcaattttgatgatagtttgaagattttttttttttttttgaatctcacattttaatttaatttgagttttgatgatatatactaaatgggcctcacgtgagggaagaagcctacccgctaattcatgtaaagtgtatctcagcacttgactttcagtctcagcgatcggagacggagaagctcatggaagctgctggcgttacaagttctcatcttctctagtcttttacatttcacctccctttcgtcggcgacccaaatccacgttttgggaattcctccctaaaaatcagaaacccttggcttttccaacatggaagacgcctacgccagatctgtctcagaggtgctttgcatttctcttcccaatccgttttttgctgagagttgttttcggatttgtaatctgtgagatatagctgcgatcccatataatgttagctagccgggggtgatattcttggcaactgttttactgtgatggaagtgaatttcttgtctttgagccctctgttaggtgttgattggattctgtgttttgtgcaggtgcttgatttctttggggtagacccaacaaagggtctttctgattctcaggtatgaacctgttgaaccgaattgagatctccattgttacttgaactttgtaaagtcacttcaaagctacccatgatgttaatctttcgtttccgtatatgtaggttgttcatcattccaggctttatggcaggaatggtatgtattacttccacttcacttgcacttctgttcatataaagcatcactcagggacataaggatatttcatgcagatggtgatgatagggtgtcttggtgtttattgttcttttcaattaggcatatggaatttaagtgagctgttgattatagttttcgcatgtatttatagtttagcattgtaaattacttgtcaagtatccagtttgagtatccttgagacgaaagtcctgcatacgattgtctgtgcgtttaaacattcggcactctatggaattagtgtcgcctttaactggaaaatgcatacctttttcatagtggatagcacatattatatttaccttgtttagttctgatcttcttctttaaatttttttgcatgtttcttcacatgatctgcagtactgcctgaagagaaaagtaagtttgtcaataaccgcctatgataatggatgcttactttcataattgcttcagttttatttctaatccctgatctaccattatggtttgggagaaccttaactgttttagcgctgtgatgattgtaatttttgccttggatttcatttttattttcacagtattattctggttcatttgtctacaatacatctgttctattgcaaaagcattttatgtatctttagcttctttttagactttcctagcttatcgtgatagatcttccttatggtcttagctaatcgtgttagatattcctcatggtcttcttcgcacatgaacctagcctttttaataattttataagagtagggtttagttctcctctgacatgtgccaatttttcttctgttctttttaattgatgcaggaacgccattctggaaactggttctgaaacagtttgatgatttacttgtcaagatattgattgtggctgcaattgtttctttcgtattggctttggctaatggagagactggtttaacagcatttctggagccttttgtaagttgcatcatctttcttactagtcacactggcatacacatattgatcgatatttaaatgattttatctggtcaactggactaggtagtggttctttgtggtgaagtttaaatttgaaaccttgttctccttctcttctctattgtcttcgtgaaatgtaattatttatgtttatctcttaaaactgactagttttttatggtctcgatataatatctataagcagactgtagaccttctttggctaaacgaaatcagcatttgtaggatttagtcttattatatgatgcacgttgaccaaggccttcataaaactagatattacgtgtggagcttcttttgggtatcacaatacttgtttgaatttactattctatcacaggtcattctgctgatattggctgcaaatgcggcagtgggggtgatcacggagactaatgctgagaaggctcttgaggtagttatcatgctacggtttaagcaattatactatcagatatccgttaaatcaattacttttatatataccgggcagtacaagatctggtttctctctttcccctaggctctgaggtcatgggtacaaaagactctaatgtgcttaaagattatgttaatattagatttattttggctgtaagtttgtaatgcttatctatcttgtatgttctccctttgtcttgttgtaggagctacgtgcctaccaagcaaatatagctacagtgttgcgaaatggtactgatataatatgtcaagtgatttttattactactaactataatttaaactgctgattattccgactgttttgctgttggtatctcctctagagacactttgtatcttgtttagcaaacttttcttctgccaagacatcgttttacgttaacaattccctgtgttgtcttaaaactgacagctattgacattcagaattagttttttgtaaatattttggcacattttttttttttttttaacaagtttttagcttgggacattgttccagttgtagtaggatatctgcaagttttttctaggttgttaacatgtacataattgcagggtgcttctctatcctaccagcaacagagctggttccaggcgacattgttgaagttactggtatgtttgttctattatacctagatgatattttgtggcaatggcttagacttttactagattctaaattctgtttttttgatgtgttgatgctaaacagtgggatgtaagattccagctgacctgaggatgattgagatgtctagcaatacgtttcgagttgatcaagccattctaactggtatgtcatctgtgtcaccataagtcataactcttgatatgcgttgccacaagaactacctatgcctattggtacttattacaacttcaagccaatcattttctccaccaatttatctctggaatgaacatgcattttcttattacattatagcttcaacaacaatagtggattccttttatgtaaaaaaatttaaagtgaacatttacagtggactatatccatactctcactactaattgttttccccggaaattgcaggtgaaagctgttccgtggaaaaagatgttgactgtactttaacaacaaatgctgtctaccaagacaagaaaaatattttattttcggtaggagttataactcgtagctgcatttgctaagtccaaatttgtgtataatgcttttcctgttagggctgtataatacaattgcctattcttttgattatctaatgctatttccatacgtgtttaaatttgatagaatataatattattgccagggaactgatgtggtcgcgggtaggggaagggctgttgtcattggagttggttcaaacaccgcaatgggtagcatacacgattctatgttgcagacagatgatgtaagctatcaatattctttcatttttatctggaaatgcaccatttgcacttttagtatcctttgttacttgtcagaactctcttataaacagaggttatagtgtaactttgactggcttaaatttcctgtgatgaatagtttgtcagttttgcacttatgggactgtagacttgtatcctgctatatagtatagtttcagtattctatttggagattcttttctatctattttgaagtgcattataactactagaattttccttatttattacttgtatttgctgttgtcataggaggcaactccattgaaaaagaagctggacgagtttggcagctttttggctaaggtgacaaacttttttgcttttcgaatttttagatttttatgtttcgaagaggcactttaattacaagacttggatgtccaattgtatcagtaatcagaattttttaattgtctgaaagtgatgaatttcatttaaaaaaaaagatttgtcgaacgactggtgtgacagagatctcttgcagaaattctagttagttaatttcatcattatgttatatgctactcaacataacattaagtcctcttaaaacgtattaaatctattttatttgtataggtaattgcgggtatttgtgtacttgtgtgggttgtcaacattggtcacttcagtgacccttctcatggtggattttttaaaggcgcaattcactattttaaggtaaagaaatttgatcttctcttatgacagctttgaattcttagttagggagtagataatcagttttgtgtgtcccactcttgctgtaatatcaaaagatagattttacttctccattgtttcggtgacatccccaaaagtgattgcatacaggtacaaagaaattaccaaagaattgttaactcactaaatcgacattcaacatttgaatattgaaagtcacaaataagaaattttcgttctgcaatgggtggatttttatcatttgcttatttgacataactgaagatggatgtattgtcctctgagattgttgactaataagttaaagtttggtaacacggttgttgctttccttttattttcccagattgcagttgcccttgctgttgcagctattcctgaaggacttcctgctgtcgtgacaacgtaagtgttcactaagtccattgatagcaaatacaatattatgagaaaggctaatgatcgttgaaacttaagatgatttctgtggaacgttagtgataccttggaaacaagaagtttcccagaaagtagatggttcttgtgatcgtcaaatgacaattttgtttcaaattcagctcactctaatgttggttgagtccaaaatgctatgaaaaagtaaatttccatgtcgggaggctactcccggttattatattgttgcttaaatagattatgatgtttcgggtatctaggtgtttagctcttggaacaaagaaaatggctcgtttgaatgctattgtacggtcattaccatctgtcgagacgcttgggtgcactactgtaatttgcagtgacaagactggaacattgacaaccaatatgatgtcggtgtctaaggttagcattcttagcaccagtcctcgggactgttaactcttactggtatctgccacttgcaattttctattttaattgtttctaggaatatattgtatgggcaaatcttggtaatgtagttcatgtgtgcacatgaccatatatgtttgcaatgttgcacactgggaagtagctaagatagatcttcaggtctaattaggaaggattaacaattttgttagcagatcttgtgattttgtgaataactaactgcagtgattgcattcttgcatatactttttctcattgtgttgtctccgatggtaatatttgaattctcttactcttctgcttgtatgtcagatatgtgtagtccaatctgcagagcatggtcctatgattaatgaattcactgttagtgggacaacttatgcaccagaaggtaccgtctttgacagcaatgggatgcaggtaatatttcttctcctctggactatgtaagtaagcaactaattcatatacggcacttttaacttttgagggtgactggtagttgtttacctacatactcagaaattgttaccatgcaactattaaaggacaggttgaactgaaaatttcatctcaggattgcttgataaaattgatctggatacttgatgacagtagaacctaaaaaattgactgtctacaagaatcatgatttctttcttcttttattttatacatttgatgtatcttacattcttcatatttcaattgtttttagatttcgcggagttctttctcaatgatttaatatttgtgaaagataaaagagcataaactcaatagcaatcttcaaactactcgcacatgccttgtcacaacacacaacattcttaagactagtgtttactttttttgcagcttgacttacctgctcagtcaccttgccttcatcatttagcaatgtgttcatcactctgcaatgactccatcttgcaatacaatccagataaggattcttatgaaaaaattggagagtcaactgaagttgctcttcgagttcttgcagaaaaggtttgtgtttctgtgaaatctttctttagtagactttgttaccacaacaacaaaatccgtggaacataccagacggtttctctattgacttgagtgaccatttacgggctcatattgtttagcacgatgtttaggtgctgtgagcatccatttcttgtcatcttactatatacccagcatagaggttgaacttactatttactaagtctggaatatctgattaactgtccaagttacttctgttacttatttttcaggttgggctccctggttttgattcaatgccttctgctctaaacatgttgagcaagcatgaacgtgcatcatattgcaaccattattgggaaaaccaattcaaaaaggtgtgactctagtaaaactaaactattctattatgttgaccgtcattttacatgccattggataatgtaattcttttgttcctatagttttctgaaaactatgaaattgagaaaatactagacctggaatttgtagtagccaatgcgatacacactttttatctatgttgatctctgagaagaagctcataacttcctgagtaaatctatataatgttttcctttcgcactagatagctattttaagagctccactgcaccagtataattagaagttaatattgacctgggaacatcatatttcaaagaatataatagtaatttagtatgagtaactgattgctatcttcatcaaggtttatgttttggagtttactcgtgaccgaaaaatgatgagcgtcctatgtagccataagcaaatggatgttatgttctcaaagggtgctccagagagtataatagctaggtgtaataaaattctctgcaacggtgatggttctgttgttcctctaactgctgctggccgtgcagagcttgagtcgaggttttacaggttcgacatcaacttgtttaatgaatatgattacattttcatattacttcgtgatggttatctttcgatgcttgtattttcacttcttatagtaattttgctgttaaaggtttgaccgaagtgggttttccattttctaaccatgtctttctgcaacagttttggcgatgaaacattgagatgcttagcattagcatttaagaccgtgccccacggtcaacaaactatttcctatgataatgagaacgacctgacgtttattgggttggtacgcctttctttcaaatatgatggatttaattaagtttactggaagattcaccatttttcttttactgttgaagactagctcatcttgtgtttcctttgaaggtgggaatgcttgatccaccaagagaagaagtgagagatgctatgcttgcgtgtatgactgctgggatacgtgttatagttgttactggggataacaaggtactagaaaattgagcatgcggtttgttgattatctccatcatttttgtacttattctgattagcatgaattttcagtccacagcagagtcactatgtagaaaaataggggcttttgacaatctggtagacttttctggtatgtcctacaccgcttctgaatttgaacggcttccagcagtgcagcaaactctagcattgcgacggatgacacttttttccaggtatttgttcatctcttgttttaattgatagtgtttttggaatctcggaactgaatgtttacttatcacgtgtatttctcttttcttctccaaagttcgagttatagtcatttatgagaaaaccaaaattttctgttgtttctctatttgtgtagggttgaaccttcccacaaaaggatgcttgttgaagccctacagaaacaaaacgaagtggtaattccctggtcactaagttgtcatcattacccatcttcgttttgtctgtgtttcagttcacatgcattcttattttgtattcatggctttctttttgtctgtgtttaagtttctaatatttttacttattagagaagaaaagttcttgcctctaactgtagcacttatgaaccttattctcctaggtggcaatgactggtgatggcgttaatgatgcccctgcattgaagaaagctgacattgggattgccatgggttctggaacagctgtagcaaaggtatatacttagtgtttgttttcagtatgcttcatgtattcgtgtcactttaatttaatttgtaccattcaaatttatcatcattttcaaataatagctagccattatctcctgtccatctgcttttttttttatcttgatctcttcctctcgttcagacatggtaatcagttgacatggtgatccaattatgaggtccttccgcggtcgttttcttttatccctaatgttgcaattgaaaacaaagcatatagtgaaaaaacaaatctggttattgcttgtggtatagaagtgatacagtgtaatgtgactgctatacagaattcttcagagctagcacactagttatgctactaagactggactgttactgttccttccttcaataaactggcttgctaaggttttttatctctatgctcttctgtgtttaacctatttttctctccttcctctgaattccagagtgcttcagatatggttttggctgatgataattttgcttcaatagttgcggtatgtttgctccttccatttttcttatggtttttccttaatgcttgattctggcatacagttggcaaattcatatgtcaaatgcaaatcttagttggccatccttctccccagtctgatattaaaaaaaggaaaacgagactataaatcacactgcagtatctttgttgatgcaaatcctaaactgtttctcatcttgacaggctgttgcagaaggaagggctatatataataacacaaagcaattcattagatacatgatttcttcaaatataggggaagtggtctgtatatttgttgcagctgtactgggaatccctgataccttggcacctgtgagtttgtttagcgtggtagtaacttatctgcaaagtttatttttatcaagctccttctaaatctatgattttcgtggtaaataattgtaggttcaacttctgtgggtcaatttggtaacagatggattgcctgccactgccattggctttaataaacaagattccgatgttatgaaggcaaaaccccgaaaggtagcagatgtaactggacggtatctcttgtgtattttagttcattgagagaagtaatgtgacaaacgattgctttcgcccgatttgcattagtgtgaaatcactaggagagctcataatactatactcattatttaggttttatgatgctttacatctccctttggccgttaccagtattatgggttttagtgatgatggtgcaaggttttgtcatttaatgaagaagggatttagaacttctcaattaactatctgctagtagtgtgctaatttcttctcaaactagtcacaccttttatcttcattattgttctgtttgttgttgaattccaggttggtgaagcagtggtcactgggtggttattcttccgctatttggttatcggaggtaaacttaaaatgttggctctgtaacttatctaatcatctttcgaaactaagatcgtggaatctttgtggtcaagtagtaaaagttgaatttattcgccttcaagcttctatgtccctctagaggacctatctgcttgagctgtctatatttctttgcagtttatgtcggcctggccactgttgctggctttatatggtggtttgtttactctgatggtggtcctaaacttacttacagtgaactggttaggttttatttccagctacatctttcagattatttcatcattcatgtgtgccaacctccacatttttgaagttgttttcgaagttgctgatcaaacgattcatatcaattcagatgaactttgaaacttgcgcacttagagagacaacttatccctgcagcatatttgaggatcggcacccatctactgtggctatgacagtacttgttgttgtcgagatgtttaatgctctaaataacctcagcgaaaatcaatcccttctgtaagcgtagattcttcctttctttctttccttgttatcagttatatttgctttagtaaagaaggtatgtgattgcagggttataaccccaaggagtaacttatggcttgttggttcaattatcctgacgatgcttctgcacgtgctaatattatatgttcatccactggcagtcttattttctgtaagtttcctctcttccaaaaacctgtgtacaaaacctggcgtacctgttttcttcttctcaatcctcatggtcactgctttatataggtcacgccattatcctgggccgagtggactgctgttctgtatctttcgtttccagtaagtttttgttttcacttttagcttcttctgcatagtctactagaactctcatgcatcctcacactggaatctaaccttgtcatataccaccttcgttctcatatggatgcaaatttgtttaaggaaaagcatgacaataggcagatctttcagctaagagagaatctttttagaagaaatttaacacctcaaaaatgattagtttgatttgaaacttaatgtaaaaactgcaggttatcatcatcgatgagcttctgaagttcctctctagaaatacaggtaatgcttactatgctttttcagcagttattaagaccgcctatcgtttcaactgaattaaaagtgtatatagaggccttaaaacgtggtccattatcgatgagagtcctgactctgatgtgttgttaatgtaggcatgagattcaggttcagattgaggaaggctgatttactccccaaggaccggcgtgacaagtaggataagaaagcaagagatggctttttcgtcatacagattttttttttggctatatagatacaacagcacacagagaagggaaccttgggagattctaatttcaatccaaaaagcccccaacaccataaaccataaaactctttcgcttttgattgtaccaaatttcactgtattcttacatcaaatcaatgactagtgctctttgtgtcatgcaagtgaatcggaaattctaacatttacaacttaaaatgtgattcgcagattatttggtttttatccagtattagctgctattaatctatagaaaatcccatctatgaaccactgcattgtcacaattagtggagccatgtcactaacgaaatgaaaagaagatggtaattttattttttaaagtagagaaaacgtaagaaatattgattcagtgtatataatttgtgtcgacactcggataattagttagaaaacattatattaacagtggggcagccctatatactctacttaattaggtaaagtagatttggttggcagtggccagttgttggaggacaaaacaacaatatactatactaatcaaaacacgaaagagaagattacaaacatccatgattcataagctt

SEQ ID NO: 28 - DNA, 100746 bp, Arabidopsis thaliana
gaattccagagtgcttcagatatggttttggctgatgataattttgcttcaatagttgcggtatgtttgctccttccatttttcttatggtttttccttaatgcttgattctggcatacagttggcaaattcatatgtcaaatgcaaatcttagttggccatccttctccccagtctgatattaaaaaaaggaaaacgagactataaatcacactgcagtatctttgttgatgcaaatcctaaactgtttctcatcttgacaggctgttgcagaaggaagggctatatataataacacaaagcaattcattagatacatgatttcttcaaatataggggaagtggtctgtatatttgttgcagctgtactgggaatccctgataccttggcacctgtgagtttgtttagcgtggtagtaacttatctgcaaagtttatttttatcaagctccttctaaatctatgattttcgtggtaaataattgtaggttcaacttctgtgggtcaatttggtaacagatggattgcctgccactgccattggctttaataaacaagattccgatgttatgaaggcaaaaccccgaaaggtagcagatgtaactggacggtatctcttgtgtattttagttcattgagagaagtaatgtgacaaacgattgctttcgcccgatttgcattagtgtgaaatcactaggagagctcataatactatactcattatttaggttttatgatgctttacatctccctttggccgttaccagtattatgggttttagtgatgatggtgcaaggttttgtcatttaatgaagaagggatttagaacttctcaattaactatctgctagtagtgtgctaatttcttctcaaactagtcacaccttttatcttcattattgttctgtttgttgttgaattccaggttggtgaagcagtggtcactgggtggttattcttccgctatttggttatcggaggtaaacttaaaatgttggctctgtaacttatctaatcatctttcgaaactaagatcgtggaatctttgtggtcaagtagtaaaagttgaatttattcgccttcaagcttctatgtccctctagaggacctatctgcttgagctgtctatatttctttgcagtttatgtcggcctggccactgttgctggctttatatggtggtttgtttactctgatggtggtcctaaacttacttacagtgaactggttaggttttatttccagctacatctttcagattatttcatcattcatgtgtgccaacctccacatttttgaagttgttttcgaagttgctgatcaaacgattcatatcaattcagatgaactttgaaacttgcgcacttagagagacaacttatccctgcagcatatttgaggatcggcacccatctactgtggctatgacagtacttgttgttgtcgagatgtttaatgctctaaataacctcagcgaaaatcaatcccttctgtaagcgtagattcttcctttctttctttccttgttatcagttatatttgctttagtaaagaaggtatgtgattgcagggttataaccccaaggagtaacttatggcttgttggttcaattatcctgacgatgcttctgcacgtgctaatattatatgttcatccactggcagtcttattttctgtaagtttcctctcttccaaaaacctgtgtacaaaacctggcgtacctgttttcttcttctcaatcctcatggtcactgctttatataggtcacgccattatcctgggccgagtggactgctgttctgtatctttcgtttccagtaagtttttgttttcacttttagcttcttctgcatagtctactagaactctcatgcatcctcacactggaatctaaccttgtcatataccaccttcgttctcatatggatgcaaatttgtttaaggaaaagcatgacaataggcagatctttcagctaagagagaatctttttagaagaaatttaacacctcaaaaatgattagtttgatttgaaacttaatgtaaaaactgcaggttatcatcatcgatgagcttctgaagttcctctctagaaatacaggtaatgcttactatgctttttcagcagttattaagaccgcctatcgtttcaactgaattaaaagtgtatatagaggccttaaaacgtggtccattatcgatgagagtcctgactctgatgtgttgttaatgtaggcatgagattcaggttcagattgaggaaggctgatttactccccaaggaccggcgtgacaagtaggataagaaagcaagagatggctttttcgtcatacagattttttttttggctatatagatacaacagcacacagagaagggaaccttgggagattctaatttcaatccaaaaagcccccaacaccataaaccataaaactctttcgcttttgattgtaccaaatttcactgtattcttacatcaaatcaatgactagtgctctttgtgtcatgcaagtgaatcggaaattctaacatttacaacttaaaatgtgattcgcagattatttggtttttatccagtattagctgctattaatctatagaaaatcccatctatgaaccactgcattgtcacaattagtggagccatgtcactaacgaaatgaaaagaagatggtaattttattttttaaagtagagaaaacgtaagaaatattgattcagtgtatataatttgtgtcgacactcggataattagttagaaaacattatattaacagtggggcagccctatatactctacttaattaggtaaagtagatttggttggcagtggccagttgttggaggacaaaacaacaatatactatactaatcaaaacacgaaagagaagattacaaacatccatgattcataagctttccgtcatttagtgttaaagcacaatgctgtccttgaattaataatagtcactaatcatcgtatatacgtatatctgaacagaactttatcaatgacatgataaatccgaaaattgagatgcatacatatatcagtttatgagttcaactgattaacaaggtacaaaaattataaatttccacacaattattctacctaatatatttacgtcaaacttacgatgtaaaccaaacttggattcgaagctagagtaggtttagttatttatttctaatcaatccacaaaattattaaaatcaagctaagaaaatagtatttcacagtgcacgaaaaatcgagctagaaaaatgataatcaatccacaaaatactaaaattaagaagaagaaaaaagaagaagagaagttacaagataggggtactagtagtaacggcgtaagatttgctacgaggatacaaaagatcagagactttcttagtcttcttcaccttcggattcacagatccttcctctgtttcttcctcttcctctatcctcgccatcccagcactcgagctcttaggcaaccctccttgcttctgttgcttctgctgttgcagcttctcttgtatcaacatgtctatctcattcttgtgccctaaactcctcaccgacgcagctctcactagctcgctgtaatcttcatctatcccgaaatcggtggttctccgggatgatgcggaggaggagaaggcggcggaggaggagctccggcttcttggaaaaggagcggagacggaggcggaggaggaatattgagtacgagctgcgcaaccggtgatgcttctcacgtagaaatcacgtgccttgcctaaagctcttagaggtgttgagattattctcaagaacttgctctggttttgtttcatcctctgtttttgtttttttttttttggggaaatggtttttttgttgtttttgtgttttgtttgaatggtgggtttgatttttttggagtgtggtgtggtttttaagggttttaaatatataataatgtttaaaagagtgttaaaggagaaataattgagagaatcaaacgtgactttaaggatttgtttagatatttattcaaaaaagttgattttacgaaaataatagtcgaaagagtgttggagagagcagtccacaaggtcccattgattaaaaatcaatcattaatcacaatttgatatgttgaaatagtatttggagtttgtagtacattagttttttcatttaaattattactgcatcagcacatataaattagaccagtgggttagatatgttattatagttcaaataaataaattattgtagtgaagtgtaattcattttgaaactaatctagatttaagaatacctaacattggataagtcataaaagactcacaaccatgaagtaagaaacgccgccttcgattttcttctcaattatgtcatgtgtttatttctttgttcaaatgtaaatgtcaaaaaaatacgaatgtcaaagcctgaattgtacggttagtcaaggttgtggatttgtcgtcgatttgtagaaatacagaatagttttatatatcgaccatgttttgtttaattttttcttaattttcttatttaagttatgttaagataatactaaaatacattttctttaaattattgactgaagactgaatatcatggatttattattttgaagattgacgattcattacgatgttgcttgtgagaaaatggtttttactttgatttttgggtcaaggaatgtttgtttctattgttttctaaaagagataagatggtcagaacttttgataagtaacattaacttcaaaacctgtttgattttctctactacgaaacctgtaccggcctaccggttaaattatgtcgttactatatagaaacttctaaatttgcgtattaataaaaaaaaaaggaaacgtggtgccggacacaagatatggaagcgtgggaaagaataaaagagaggtgggtttggactttggactaatgcaggtataggtacatcgcatgagaaaaaacatctcttatgatgagaatataagataagaacaacatgtggagccatgtcggaagtaaaacaaatctatatcaatcaatgcttctagaaacaactcttatatttaaacatatctgcattccttttttaattaagtagattagccgataagattccacgtgattaacatcaaatcacttcttgttgagaaaacaactatcaaatggctatcattaaaacatcacatcataagggagaagaaatcgtaattggcttataaactgaaaaacaccactttctcaaaactaatttttgaagattagttctaccattaggtttttaaggtatgggtagacctaaatctaacagttagtgcagcgaataatcgtaagtccataaaacatcgcaacttttttggttggtccacgtccacagaaccaaccgaggtggaacaaagccacatggaccaaccaagagtaaacgtccaaaataaactaactagaaatgacccataaacataaagtagacagttgagataggcttaacatggacatgggcatcgatgtcagtttataagatcatcccgcattgaaagaacggtgactaagtatcactaggatataccacacaaaaaaagaatgagagaaacaaaaaaagtaaatggcttataagatcatgggtaccatgccaccgtttcataagctatcttgtgaaagtgaattctacccattaagcttttaaagtgttgttaggcccaacctaacaatagctactaagattttgattgatacatgtaatattgaatccaagttagtgaactgatgtgatgtattttgtcagaaaaatatgataaaagcttaaaaatattttgataaatttatgatttatgaaaatgtaaaagagacattctcttgatgtttttggcaaaacccatcaaatcatcctatgccacctctccaccgttccaaatctcacattgccacaaaatttatgccaaaagatcaacatgtccacttgtcaagtataaaataccgacgtcatcaaattacctatataaatccttttatatttatttagttgaatttttttttggtcaataaactattaaataatttactttcaaagataaataattttcaaacaattaaaaaaatatttattaaaaaaatccaaattatttttttcgttattgaggaggaggttcatttatccaatcaaaaccgaaccgttttgttgtttatccaacttgtcattcatcgatgtctctctcttccagcctttcttgaatctctcacctctcacgccaatttcattttcatgcatcgctatttccccttatcttcttcttcttcttcttatctcccaactaaattatctgtctccattcatgttattatggtcaacaacagaatctgaatcccatttccccattttcggatcacaataactaacaaaccctagatttctatctatagtccttcgatctgtttctgtgtctccttaaagctgtgatttttgcaattggggtttgtgagattcgatcaattaattgtgtttgttgaatggaccttcttcgattgagagaaaagggtatatttttatctcagagaagaaggaaatggctgatttttatggcgatctctggagtttctggctatggagcttacaaggtttatcatttgccatctgttgccagaaaaaggaagcgtctttttaagcttttcggagccattgtctctgtagctgaattgatctctgattcagctgagaccttaagtatggtatcacgagacgtgaaggattttctcaattcagattcagatgaaatccctaacagcttgaagcagatcgcgaagatcacaacttcgaatgagtttacggattcgctttctagggtttctcaggctgtgactattggtgcctttcgtgggtacaaatccgaatcgtctattggtgattcaggaattgagaaatcatcagactcgagtgttgttgatagagtgattgataaggttttctcagaggctggaactggttttgtttcagttgttgttggtagctttgctaagaatcttgttcttggattttactctggtaaggtagagagtggtgtgaaatgtgagggttctgattcttctgagacacctagatgggtgactttgcttggtgatgacaagtgtagagagcttttagctgattgtattgagagattcaccagcactgcaattggtgtgtatcttgacaagacgatggatatcaatacttatgatcaaatctttgaaggcttgacgaatccgaaacatcaggatagtgtcaaggacgttcttgtttcggtttgtaacggtgctctcgagactattgttaggacatctcacgacgtgtttacatcttcaaggtctaagaatgtgatagaagagatcgaagatgatgatttcaagagtaatggttccgcgagaagcaagatggtttcggaatcaggagatggggtcaagagtaatgggtggactgaggctattgcaactacattggcagttccgagcaatcggaggtttatgtttgatgtaacaggaagagtaacactagaaacgacgagatcaatcatcgcatttataatggtgaagacatttcaagggttcagaaaaagtatcaatgtggttcatgaagaggttacagacagaggacgccaagcagttgaatatgttggagccaaatcttctgttataatcactgtatgccttgcgttgtacttgcacatcataagcggctgtgttcggaattctcccataggcgtaagccagcatttttagttcttcagatgaagaagagatcatcgatttggttggatataggataatatttgttaggtacacaagatttatcagctcgttgtttatagttggagctgagaatattgtaaagattgtgtgcgtgtattagcacaacttgattcttattgatggatcatggatcttatatatatatacatattgaaaaggttcttggggcattgatctttgagatatatagtctttaatttctttacacttcttcaacaaaagcttcatagatcaacaagcctgttttccattttccggtccacacttcatacaaaccaaattggagcttggtgtcttggtttattgctaccttgggacttacaaagatctcaaaccgaccatcagtctcatctggtatgttaaccggtccggttccgcctttgagtttgtcaaagttattgttaaccgatttgatcctcttccaaattgtcctccctttctttccaatttttgctgacatgaaaactggagcttggtcccatccggttgcatcagctgtgaacgagattttaaaaccaattcggtatgttttgcctggttctatcttgtcgtacgaaccggttacttctaaccaactcactttctttagttcagcaggcgtcctgaaaacaccaaaagactccagtttattattttacttttaacatggaaaaccaaaaaccggtttattcagaatcaaactgatttttattttggttaatgtgtatataacgtaagatgaagggtgtgtaccaacctgtcttcgttagggatgacccaataccgagaatcacctccccatatgaaattaagaccacttggcttaaagacccatgcttttctaacaatctattaaccaaagtttgatttttagttgcaaaaaaaaaagtttgatatttagttgcaataaaatacccaacatatataaaataacttaagtgaaaaaactaataacaattgacttgttattacatcttgttccatgttggattctgcctcgtagtgagaactcttgacagctttttggacagacatttctctctttcttctttgctgtttgtttataaaagaacacttctcttaagttggctttatatagagatttgtttcttttcactatatggaaactttctgtagaaaaaaattagtattgtgacagaagaagaataaatgaagttggacccaatcttttcttctcaatattctccttgtaagttttactttagtgccataaccatgtaaaaggtataattcaattggatggcaaaagctaaagcaaatattctcagtttgtggctcttcttctatctctgcttttgtatgagaatcaaatgatcacatatttgatttcaatttgccaaagagtgaaatttttgagactgtaatgaagttttgaactagttggcctttgtcattttagattcctatgtcctaatgatgttctagattttattctcgataacaatttttgctagtgggcagaatatgacacatatgggaagtgcttgaattgtggcaagtatggtcatttaataagccgttgtctcatccccttgcagaagaaacttccctttaaaaaagactatccctccggggctaatgaagtggctctctctgctgttaaccttccttcaggtgctgggatttcagaaactagtgtcattggttcagcttcagctaatccacctgagctcccttggtccaaaccaaaaagaaggcgttcgagatcaaagaagcgctctctcagttctccacctcggattgttgacccgttgattcccatttctcagcaggtccctctattgcccaagccttcggctagtaagaaatgggttgtgagaccaggtttgaattcgccagttcctactgttgtcattggtgcagattctggaatttctcaacctcctactctccctaaaaaatctatgagagagtctatcaaagatccggatccaaacttccctcttcccctgggctgggcagtgatgtctactaaggcaaaaaagaaagaacttaagaagtggcacaaccgtattcgtccccccgtgacagagcttcaaggtttcgtcgatggcagggccggtgacggtccttcttctcattgaaagctttgctttcaccttcaccttttgttgtgaatatgaaggtcttttgttggaatattagaggcttaaatagccgtaatcgtcaacgagttgtgcgaagctggattgcttctaataatcttcttgtgggatgttttttggaaactcatgtggcacaagagaatgcaaactcggttttggcctcaacccttccgggttggaggatggatagcaactattgttgctctgaacttgggaggatatggatagtctgggatccttccatttcagttttggtgtttaagagaacggatcagattatgttttgcagcattaagattccttctcttcttcaatcttttgcggttgcttttgtttatggcaggaattctgagttagatagaagatctctgtgggaagacattctcgtgctgtccaggacttctcctctttctgttactccctggcttttgttgggagattttaatcagatagccgctgcttcggaacattattctatcaatcaatccttattgaacctgcgtggtatggaggatcttcaatgttgtttgagagacagtcagctttcagacctgccttctcgaggtgtgtttttcacttggtcaaatcatcaacaggacaatcccatccttcggaagcttgacagggccttagctaatggtgagtggttcgcggtctttccctctgctcttgcggtctttgatcctccaggtgactctgatcatgccccttgtatcatcttaatcgataatcagcctcctccttctaagaagtcctttaagtatttctccttcttgtcttctcatccttcttatttggcggctttgtctactgcttgggaggagaatactttggttgggtctcacatgttttctttgaggcagcatttaaaagttgctaagctgtgttgcaggactcttaacaggctccgtttcagcaatattcaacaaaggacagcccaatctctaactcggcttgaggacattcaagtggaactcctcacgtcaccttctgatactctttttcgtcgggaacatgttgcccgcaagcaatggatcttctttgctgctgctttagagtcattctttcgacaaaaatccagaataagatggcttcatgaaggtgatgctaatactagattttttcacagagctgtgattgctcaccaagcgactaatcttatcaagtttcttagaggagatgatggttttagggtcgagaatgtggatcagataaaagggatgttgattgcttattattcgcatcttcttggcattccttcagagaatgtcaccccattctctgttgaaaaaatcaaaggtcttctcccctttcgttgtgattccttcctggcttctcagttgactactattccttcggaagaggaaataactcaggtgctcttctctatgccccgtaacaaagcaccgggtccagatgggtttccagttgaattcttcatcgaagcttgggcgattgtgaagtctagtgttgtggctgcgatcagggaattctttatctctgggaatcttccaaggggctttaatgctacagccatcactctgattccaaaggtaacaggggcagatcgtctaactcaatttcgccctgtggcttgttgcactactatttataaggtcattactcgcatcatttccagaaggctaaagcttttcattgaccaagcggttcaggcaaatcaggttgggttcattaagggtcggcttctatgtgagaatgttcttcttgcatctgagttggtggataatttcgaggctgatggagagactactagaggctgtcttcaggtggatatatctaaagcctatgataatgtcaactgggagtttctcatcaatattttgaaggctcttgatcttcctttagtctttatccattggatttgggtctgtatatcctcagcctcctacagcatagcgtttaatggagaattgattggttttttccaaggaaaaaagggcattcggcaaggagatccaatgtcttctcacctatttgttcttgtgatggatgtgctatctaaatcgttggacttgggagctttgaatggtctctttaaccttcatcctaattgtttggctcccatcatcactcacttaagttttgcagatgatgttcttgttttctcagatggtgctgcttcttctatcgctggaattttgactattttggatgattttagacagggttcaggtcttggaattaatagggagaagactgagttgcttttggatggtggtaactttgctaggaacaggagcttggcagacaatcttggcatcactcatggctctctccccgtccgttatctgggagtgcctcttatgtctcagaagatgagacgtcaggactatcagcccctggttgatcgaattaactcgagattcacctcttggacagctagacacctttcctttgcgggtcgccttcagcttttgaagtctgttatttattctacaataaatttttgggcttctgtcttcatcttccccaatcagtgcctgcaaaaacttgagcaaatgtgtaatgctttcctgtggtctggagctccaaactctgctagaggagcaaaaatctcttggaacattgtgtgctctcctaaagaggctggcgggctaggcttgaagcgcctctcctcctggaacagaattcttgctctgaagcttatttggcttctcttcacctctgctggttctctatgggtttcctgggttagactgcatctcattgggcgccggaacttctaggaacttaatccttctctgtctggcagctggatatggcgtaagttgtgcaagctacgaccttttgctcgtcctttcatcatttgtgaggttggatccggggtgactgctagtttctggcatgataattggactgatcatgggcctctccttcacctgactggtcctgctggtcctctcttagccggcctgcctttaaattcggttgtcagagatgctctccgcgatgatacctggaggatctcttctagtagaagccgcaatccggtaatcactttgcttcaacgagttcttccttctgctgcgagtctaattgattgtccgcatgatgatacttacctttggaaaattggtcatcatgcaccgtcaaatagattctctacagcggacacttggagctaccttcagccctctagtacttcagttctgtggcataaggcggtttggtttaaggatcatgttccgaaacaagctttcatctgttgggttgtggcccacaacagattacacactagggaccggttaaggagatggggcttctctatcccgcccacttgtgttctgtgtaatgaccttgatgagtctagggaacaccttttctttcggtgtcagtttagctcagagatttggagcttcttcatgagagccttaaacctcaatccgcctcctcagtttatgcactgtctgctttggaccttgactgcttctcgagacaggaacatcacgctcatcaccaagctccttttccacgcttctgtctatttcatttggcgtgagcgcaatcttcgcattcactcaaattctgttagaccagctcatttgatcatcaaggaaattcagcttatcgttagggctaggttggaccctctgtctcggtcttcccgcgtcgtctctcagccaggctcttctcttcttgcctcgtggtttggagtgtttcagcgttcacctgtctctggttaatgtggagtttattttgcaggtcctctgttggctcagcgttgttctccttttgttttgctgagatcttgtcgtccttgggttctctctgggcctcgtcgctgggattcaggttctcggttttttcttgttctgttagttgttgggcctgcgtgccttctctgggcctgcgtgcctgttgtatggccttctaagccttgtaacctttttcgttttattggaaatttatgaaaaaaaaaaaaaaaaaaaaaaaaaaaagaatatgacacataaaagagtttttttttcactattcctaatgatttcagcacctaaccgttaattgcagaggagaaaatgatttcaagataaagagtactaatgaatgaataaccaaccttagtgttgcatcattatgtcaagaataaaagagaaaaaaaaaagcgttacaaacatgccgtttcacaataactgaagttactgaacaatgggatgtttttttagttactacataaataaaccaaacgcacgccaaagatgccaaaacaaaaacggcacgtcgttggctatcacctaagctttgaaatggactcatcacagcatacgcacacgcatacagtctccattatatacgtctgaacaatctgccgttttcatacatcacaaagaagttgaaaaccaatcacagtcgttgggtatatgctctcactcacataccttctcccagtcatccaccacttcttcaccggagccttccaccggttgtttaccggtagtttttgaactactgctctcttctatctgagcaattggctccaaagtggatgtgctggccttcttgggctctaaaacactccaacggttaaccgaggtaacaattggagagttgctctttgctgatctcagcgcagaggcttgagcatctgtagatgatcctccaatgggggaatcttcagctccccaggagtcatcactctcctgaatcacagctctcctccatggatttcctttgtcaacatcccacgccgagctgccaggtaattttccccatacattattaagtgatggagattgcccgccgctctggacaaccacagctccatgatatactgaaccgtgctcaagcctcctcatggcagtggcagctcgggcatggtcgtggaacaccgctaaagcattcttgtcattcagccaaacaagctcacattcacccccaaatctcagtaccaaggcgctgatattcgcctctctcggaagatccagaaaagaaaccacaagtccaggatccatatccaccagcgaatcatagaacggtgggtgtggccctcctatcgagatagcaccacccctagctccaatgatccttgttggcggtttcgattttgctgttacgtgaaccactgtaaaccgttttggctcccaccctgcgttgctaacaccaagtttccacctctcagctataagtcgaaccgtgtctcgtttatccttctgcatcgggcagaagatatggaccttaagggcacttgtgcttcctcttgctttcccaagtaccaagaacttgcagcgctcttcaacagccagtacccactttggatcacgcctataaaggtctgaaataatctctgtcatagcagaattctcgctgaaatgtaatgcctccagatttgggggagttatatcaaatgcatcttgaagaacccgcttacgctccagcttcgcacactcatcatcacacgaaagctttctctgcccgagggggatacggtttccgctcgattcaacaggctgaagtggagctggaagcttctgtaaaacagaggcttcatcataggccgcacagtaaacattagaaccgttggcacttcttcccccagcatcacaagggaccgtagcggttatacgaccacatgaacaagtaattgtgactgaaaattcacatcttaggtcagggcaaggcgcagaaggatggcagagtgctgcacaagtgtgtctgcaatctgttctaggagcaccacatttctgtctacacgtaacacgcatacctgcttcagattcattgaagctgtcacaaggctccgggtgacaagttctggcacaagcatgcatgccacaacgcctcgtctttccacaaatcttggtacatctaatgtctttcaacccacagggtatgtttctgagaaccacatgaccaccaacgcacttcttttccacaggggtagaacaaggaggacaatctccaaaatggcatccatgcgtatcagaatggccacaaggctgaggaatcgggcatggaagctgacagctaggaacaggtgtcccacatgatagtggaggaggaatcgaagttcttccacaagcacatgtaagatcagtgaagatcatctcgagacaaggagggcaatgtccactgtgacataaagattcacaggaatgctgcccacaccttagcttcttctgacaaggtatttggcagacatgtgggtcccaatcgccagataaatcattcttcttcccgttcaagagagggcagcaacgctcgctacatctatgtctcccacagttcttcttacgtccacatggcttagcgcacacaaacttctctgcctctgaggaagttgttatgtagcattccacagccctggatgttgacccacaccggcatttctggttaacttggactaaacaaggcgggcaatcacctgcatggcacatctcattgcaagtatgtaacctacaaggaagaagcttcctacatacatttgaacaagaaggaattgggtccaagcaactctgcctgatctgttcttctaaacgcgtattcccacaatagcatgtcttaactctactgggcagtaagtcacagtccccgcaaggtccaggatggcatacctcggaacagaaatgattaccacatccaagaggcttcccacagttaaaactgcatgaatagacaccatcttctgctttcaattcccccttcacattcatatcaccgcaaatgacagtctccacttttttcttgcagaaacatgtggcatttaccagtacctgacaaggatcacaagggccaacatgacatgtcctttcacattgatgacgcccgcaactaagaagcttatcgcaacgctgcccacaaacaagatcagatctccgctcggagcatctagtagtaaccatctttttcccacaaggacagctacgaggtggagcaaaggctttacagggaggacatggaccaggatgacactgcaaaacacatacatgaggacaaagatcctcttcagtcgtctcagcaggtgcaaactctttctccagcggtttcccacatggttccccgcatgagtgtggagtgagatatgggtcagacggtggatctcttctctttccacaaaagcaccgataggaaatctctttagatgatgtcaactgtacagattggcaacctggacatctccagttatcaccttggtttttctcagctagcaaatcaactgaagttggtgctcgagcccacctcttgatacagttgatatggaagatggaataacagctggagcatgaccagatattggcagacctcccaaccttgtcataacaaatcatacactcaatagaactcttgacaagcttctcctgtaactcttgaacaagttgaggcaagtttgggtctgtcaacacaacattctcctccttcgctacccttttcccctgattcacaggccgcgtcctagatgcaactctttggcgattatctggcagagttccagaagcattattccttctttgtcgattaggtggaggtggaccaatgttatcactcctttggtgctggttctcaggagcattatttcttctatgtcgataaggttgaggtggaccactgttatcactcctttgatgctggttatcaggcgcattatatcttctatgttgattaggttgaggtggaccaatgttatcactcctttgatgctggttatcaggcgcattatatcttctatgttgattaggtggaggtggaccaatgttactactcctttggtggtggttataggacggaggaccagaagcgttatgctgcctttgcagataaacaggacgggatgcagaaccagcatcaagggtttcagaatttctatctgtattaggaggaagcaaaggctcatttaccaccacgctcgaggtagatgagtttctaggaatccacgtttgctgatgattgaatcgatgagacctatcatcgctcctatctcgcctgacttgaaagctcatattctgccttgactccacaaacacagaactagatcctgtacccgtcactgttggagcaatggtgcttctgtacaaaaagaaaagcaaatgagaaacattcagattctagcaatgtcaaacattgatggcccagataaattcaccacacacgaaaatacgagcaaaccaatctacgtaacaataaaatcttacacagctacaacgatgttgaaattaactaaagccaaatcaaacgaatcgaaaattgatagcaagacgcctaaactattcctccttctttgggatctaaaaaagggggtaaaatcaaagtgccctattttatcatatctaagaaattttggtgaccaacaccaaccaacacacaaattttggcttcgatattgctgaatcaaagagaacgataaaacaaatgattagaagctcacaaccaaagagggggaaaaagtttggtacctgacaagaatatacgaaagcgtataaagaaggaaacaatcgccggaagaatcaaatacgcaggagattccgattagtctcccttgttttctcagggagagagagaaagagactgtaggagaaaatggagcgatgaggaagattatatatagcgactgaaagtgatagaccgccttgctcccaaaggaaataaaagatagagagagagagtcgcgtacgacttttctttttcaccggcttgtctgaattattttatgcttgacaaaccctcaagaaccgcctcatccctaatgggctaacaatgggcctatactaattgacttaaaccaatctaaaccagtaatttaatttgcagatgatttcggttaactttatatatattaacttgagagttttgagagacttgactacaggatacaaactacaaagaaagtggtcaagactcagaatcggtgaaagatggactctctaggtcagccatgcttgcagaggcaaatgactcgaacgagtccactgtggagagtgaagatgtatcttcggaatctgagtcgtcatccatctcagggaggacgatgtgatgatcgtcttcttcttcttcttcacactcatattcttccggttctgaagcatcctcagaccccatgagtagcctgttgatagctgacttggcggcttctgtgaaccactctgtcttcgggagtgagctggtgaaagagaataatacactttttaggtaattcgttatgttgagaccgagttggaagaaaattcaaaaagagtgttgtttcaattacctttgtgggttgatgcctctttccgagaatatgttgatggctcgattgatcaccactgatgcatggttctgaactactttaaatggataacctgcaaacctggctatctccactgtgaagttcatgtcgaggatcaactgcaacacgtgacaacaaaacttcaactttcaaccccaatcttctcaagaaatgaacttcaacatcaagtttcaattgtttcccatttcaaattttcaatctttgactgctgagcctgagatcagagaatagctgaggtatataagagtggtgaaagagagtgtttctacctgttgcaatccagatggctgaagtggatttgactcgtcctcgaatgcactccaaaactcctgctcgtttgatagccagattataaccgtctctgttaatctcgctagtagaatcttttgcagcttctctttaccaagcagaacatccccagcaattatggccaactgttgtagcttagaaaacaatgcctgcataagaacagacacagatgattctgtgtgctaaaacttataaactgggaactataaaactagatcaaagaagagggcgagacctgaaacggtaaagacggcagatgcaagtcatctggtgtttcggttaaataaatgagtgcgtctaatcgcgttagtccttccctagagtagatgaagctcaagacaaactgcagacagaagtagtttctgagtttgtcaaatgcttgaaccatatggcgtttccattctttcagttccggtgcagcactactgtttagagcggcactattctcaccttctcctccgccattttcaatctggagtttccagactttaacaagtgatcttggtaaaagttcgtcaagtattgtaaacgcagctccaagaagcgcaagctgctcagaatctgtctcagctctagcgagtacggtattatcttggagctcaggtagaccatcctcatctgaatggccaggcaaggctttgatcagaaagtcgatgtatttatcatatagttgcaatatcctcgttagtacactctcaccaaagtgtaacacaactaggtgtgttaactgctcaagtatgtcctgaaagaacaaataaagcttctataaatttatgccaacagaatcaaagaaaatagtaagatcagtgttcaaaatcaacttacttgcacaatttgcatgaatcgaatgctacaatcagtcatcatagtatctgaagcgatagcgaattcagataatattgtcacaaagtcagagggtgattccaagccctcatcagtttcattcaagtcaaagataacccttcgagcccgtctaaaattcaactccaacacttcttcaacataaggtcggaacagcaccaaaaatagcttagacagaaataagccttgtggttccaacactttgcaatagttaagacaatcttgaagacatatactggctgcccgcaatgcagaagctgtttcggaaggagaagcgttttctttaaccaaccgcaccaaatattcaacttccctctctgcccattgaacaactttgttggaatatgcgggattatcatcgtcaccaaacatggctgcggattcttttgtagccactgagatgttagagaaaacaagcttagagagagtagcaggaaacgtgtttgggcaagtcaaacatgaagggagaaaggcctcgattcttctgcggaggcttgtggcgtaaaactttagaagcaattggtgagctgaaggtccttttccaagtctgattaacccaatcaatgcatgcttcaattcagctacacaaatcgagggttgtttagcgatcctaaggagctgatcctcaagaaccgcctttctttccataaaggcagacttgtaagaagacatctcgactgatcctttaagatctggactgcttctttcctcagcatccattgcctccagtgcttcatccactttatgttcagccaaaagaaggtcaattttctccaggaactcagactttggatcggttacttcattaggcaaggggtcctcttcgacttcagcgtcatgtacatcaccaggtaatcgattccaatcatccatctcacggcaaactccagccatcagatcctgcacaagaatcccctgagaagaaatatgtttccgtagctcaaccaactcatgctccatctccaccgcttcttcagatattctacacaaaccaagcataaagaaatgaatctcagaaactagcacaacggatacaaagaaacatgacgtaacctttgaatccggaattgcagattcaaaactcgcaaatgaaataacaaagagaagttagtagcttttatacattaccttaagaaagcaaggtacttggtacgcatatcaccgcacatattttccacagcatcctttaaatccataagctcacagcaaagctttctaatcccctgcattgttcaacattaccagatcaacgagcataaacccatggaccaacaggagaagtaatcatgaacaatcgtaggttcaacaatttcaatccaagacgtaaaattcgagggctactgattcttaatccagattaattcgaaagaacccatttgagataaactatatccgagtgcaatgaatcagttcagagaaggaaacaactcagaaaaaagaaaaggagagaccttttcggtgagagactggtgaacggaatcgatctttgactgaggagtgatgctttctataaatgggtactcgtcgtcttcctcgctgctctccatgtctctcgctctatctatttccccttcagttttcctcggagtctcactgtctcagacacggttgccgaaagaagcacgatagtgatgctttggactctctctgctctcaagacacacagattcgtcggaattgtaacattgctttttttgtacacaaaacggcatgtagtgtaatatctcaagccaaagacggcacgatggttcttatggtttttgtcatacctttttcgccatgaagaagtaagtctacactatttcctaaacttctactacaattttaatctcaaaatcaaaattttgtttaaccacaattcacaaaacgaaatatctcgttgacttcagggttgaccaattcattaaaattcaaacctatatgatgaccaatacaaattgcctgctcgagctggaaatagagcacaagaggtagtaaaataaagaaaaagaaaggttttgacatttgatgctggttttctccggttcgctcttaattcctgggtatttgattcgctttgtgttgttctctgcggtgttggatagttcggttcaaggattctaggatccattgagtgttttagaaattcgatttggttctctcttttttaaatccctttttagttttttccttcaaattaatatatattgataatgggccttcccgacaaaaattgggcttagccatggacattataaaacagacaaagcaggtacaaaaaggattttggttcttttttggtctattattattggttcagatatttgaatggagaaccaaagtgctaaacaagtaagtaagtaacacaagctgttaaatttcttcacgggagtattttctttttcgtcactatagtaacaaatgttttctccacacacaaggccattcggcccattcctatattttatgtgttccaaaacatattttataaaaccgttcttctatatttattagtaacactagttaatcacccgcgctatgctgcggtattttcaaattttttgtatcgtttaatttaaatataatttttaattatctaatcatttacttatataataagtaattattcttagtattaaaatatattttttctaacaacattctcaacaatgcattatacacacaattcataaacaatgttcgtcttaaactaattaaatagagggtaatattgggattctcgaaacctaagaatttgatgattaaacttcttacatactcttcaccctcggcgatttattatatagatatataacaatatgcaaactattcaaactattaattaatccatgactactatacactcataatttgagttaagattacagaaaaaaatcttttgagtatgagaaaaccaatcaaattattttattgaaaaacatttaataacaaaataaatttagtattagtacaattaaatatgtaaaattaaataataaatatatcattaatctataaattaaaagttgaagagcttacattaattattcagtggacacatggcaaatgttaaagtgatgatgtgtcaatcatatggagagaattggtcaactttcatatatatgatttatctcacaaaaatactatttttatttttaccttgtttttaaattataaatttttattatgaaatttttaactcgtcgagtacatctcttattagttaaatattcttacatttttacaattggttccaattatattttctaaaaatattgggaaattgaaagattttaattattttcggttttaacgtggattattgatgtgaattattttttatttatttcttaattaaaaacaaattaaataatattagctaatcaaaggtgttaattataattacacaaatactcaaaatatatgagtaacttttaaaagatgtatgatattctagtaatattcatacttttctataacatctaagtaattaattcgtttttgtgactgaattttaaataaaattcaagatataacaaaatggagaagaaaaagaatagtaaacaaaaaacgtagacaacaaaatattcacacttataacttggtgagtgttaccaaagtcactaagcaattttagattgttcaccctatttttaccttgttttgtttccaggaatcaattataatcaacgaggatctagttcgaaatatttcttttagtacaaacatttataatcttaaaatccaaaagaaacgcatgatgacgatatttattgtataatcaagtcaatgtaatgttttattaatttttattccacagagatgtaattaatcatatttagatattccccggaccaccgtaaaagattatatgaccggcttctgggtatgcgggaatattatagtcgtctacaacttggtagccacgagtatcgtccacgaatttttcggtatatgccactttgcggtcaatgttattaaaaccgtcgattacagatatccgtttgatatatgcatcgtagcgcatactagcatcaagaaaatatccatatcccatttgaggactcggctgtgatgcactatacgcttctccaccccactccaccaaatttccagagctttgatgaaatctactcgacggccaaaatccaacttcctctgcagcattaccaaattgcaaccaccaatttccatttatttggtcctgttacccgaaaataataggtgaattttttcattagtttaagaaacacacaaatatgtatgcataaaattgtgaatgctgtgtcatactcctaattatttaaaccttgattagaccgaagattgcataatgagttgtcttagcaccacgaacagacactggcaataatgccataccaagatgaaaatcttgacgaacgagtatcattcctacgtcgcagtcattattgtaacatgattttccacctgactgttccatcaatatatacattttcttactaacatgtatacaaaatataaaaattaaagaaaaaatttactagcatgatatgcgtgactcacatttgtatagacgaaagtccgaggttggtcgtccttgtacaatgttggatttacctgaattagtacatataatatgtgttcatgaaacaatataatacatattttgttagttactaaaataaattaagtaactagagctcgttgacaggtgcttttatctagtgcaagttgtagatggcaaacaaattaaatcaaataacttacagtaaaaccggtttggaggaaatcacttccaatctgaatgtgaagtcgagaagcactgaattggtttggcctaaccttaggagcggttaaacaaagttccatcgttgctccattgaacctcttgtcttggccaaccgtcctagccaccgcaaactaatagcgttcaatttcattcaataaccaattcttattatcagtaatcagtataaatatatcaaaacattattaattaaaagaagcaacgtacatgatgttggttgtcactattagtatcatcagtggtaaaattccaagagccacgaggtttatgattatcgccaaatgagtcgaatctcaaaagatcttctttggtgactctttgtatggggacggtaccaatgggacaacccacaccattctcccataggtaaccaaaattggtattatttgtctttctttctctcattcttttccatattgggcgcatctaaaacatgtcgaacaccataaatatattactgtagttttcttttaatgtttctaaaagaatataagtatatagaactgatatatgaaattatatataccttgtaatggtatgtgtgattcttcattgaagggtgatcaaatgctggttgcttgaagaaatccacacatccgtatctttctccatctatactctatcattacagcaatatataaagaagttaacatttattacttaattgtataatatatagagaacagtaacatggttatgaagatatattaaaaccttgatgatcttgacagcaggtttgttgatagtccttagtctcttctcgatttctaaatcttcaactttagaaaggctcttagcttcaacaaagtcattgttatgatttataattatgttaccaaagatgcaacacattaagaacatccatatcacttccatttgaatcaacaatagagagagacgagagagttattgattttgaagcatggaagataaccctttaatatataaggctggaggaggaacaaaacatttttcaattaattcaagaccattgaccaaaatttttggggaaagagttttatggtagattaatcaattagcattgaccaaaagtaattagtgtttgttcaacaattcctgagataaaaatctgttaatattatgaattaacacataataccattgatttaaatcattttggtagatttacaatagggctaataagtatgtctactttctacttgtaattaatttcatatcattgtattatatctatagtagccattattttcccgatttttccttgaagacaataacattaaaacaaaaaatccatgaatcaatatgttttgtttttacaaattcaagttcacgaagtactttgcaaaatttttgttagccttctccgattgagtttcggcaaagggttgttttctgtgttagtgcgcctcttgtgtaggggttttcgtcgattggtctcctccgagttgggactcatgggtttggtcgttgggcctattaatgttatgggttgtctctcttgtttcggtttgttacccttatttgtttgttttattttatgtttttaatctatgttaacatttgtaaggaattagcccaatatgtttacatctccatcctctatcttcacgcgacttcatcatcctctctgccaagagtaacaaattatcaataacctgaatcaacgatggtagcaattgaatcgatcatttagctgaagcttaaacttcacgaaaattaatttatatcatatgaacgtaatacatatatatctcataagcaaacatccattatttctttgtttctctagtttcatttcaagaaacccaataaaagagtgaacaaaggtcccaaaaaaaaaaaaacatattaaagaccaaaaagaaaaacacaaacgtaggaagaaacaaaaccaatatatgttatcgatcgatggagaagtagtgactcttttgattcttcgatagtcaaaatcatcccagagagattgaattgtttctttaagcagcgacgactttgtccttggcggcattctctcctcctccttcgagctggctcaagtttcctttctccttgatcagctgaatatgatgatgcttgcaatatagcttaccctcgtgagctatgtaattcgaagggcttatcgtgcagcctccatgtgtacacttgaagcagctcttgtggtacaatgttccattcaccgatacctacacaaagtccacattataagcaatgtttcagctctggtttaagccaagaacagatcagattcgttatggaaacaatctaacaatcttctttgacacaacttgattctgatcaggaaagatttgagattggataccttctcaattggatacacggttttgtcgcaaccaacgcatttctctcgtgttccaccaaacatattcgaaactttggttccagcaggtctctgttaaacttctctcatgttaaatgttaaaaaaattcaagaacctcaaaaacagaaaaagggttttgttctgctgtccgaaagtacctctccctccaaaggcctatcaggtttcccaatctttggtgtccctgtacatatatatgaatcaaactttagatagataattccaaatttgaaatccccactcacaaagcttttcacattttgatctgtttttggtaatttaccttcgaagcttttctcaagacttccagttctcttgaagttttgatcgaaatgtggtctgcagtagagaactccttcaaaggagttgtaattgctaagctgactcatcaagaagaagaagaagaagaagaagaaacagaacagtcaaatctttagaccaatcagtttccatagccaaaaattcaaagatttctacttaattgattggacttcttcatctacatatatatctactagatctacttctggattaatgagaaatcatcacaaactagaatcaaagatcaaaccttgagagttcctttgcaatggtgacatcggaaacaagctttgtggtagacccggttatcggcggttaacttgtcgacaagataaactgttttgtcacatgccatgcatttctgggttgttcctgcgaacgccattcttgtaagagatcagactaaaagactcaggaaaaaagaaagaagctcaatagtcttgagagagagagagagataaagaagaataagatgaagatgaaagaaagagattgtcaattattgttgcttgttttaatatggggaccagatatattgaaaaatgaacatgcttcttctttttaaatatttaaagtaaaattcttttaggaaaaattgaaatttttaataaaatgtcacaaacaaaaaagttcaagatgagtatcgaattttggatgcaaattcgaatatttggtgtttctgacaaccctagcattgtttttcgtggttgtctaatccacaaaacaagataagcgatgaataaataaataatttgaacgttagcaacaaaactaaaaactgtactacaaaaagaaaaggtttcaacggcattttttgtgttcttaattatttttgtccaaacttgaagtaacccgtcaatatctgtctcctagatattttgcttatattttttttacattaattcagttcttttatatctagagtcaggtaattatttagagaatgcatgcagttgcttgacagtgcgtaagatttacacaaatttttctcaacagtgaaggcaatgctcaatagtcaataactgtttgtaaggaaatagaacagggaaaaccaactggaaagaatctttgtctggttttagataatgattaaaagctgtattggttatgttgaattagttggaaatctctaaatatctatacactatttattttctttaatactatatgttgtgtagtgtgtatatgaataatgaaaatatctgaaacatgctttaccataaaggcttttgatgagctgtagtattgacataattggttgaagagaatgagtgatcataatgatacctaacatcttttatttaatcaaaaatacctaacgttatttttatttgctactataatagactccaaccaatttattagtatcattttatacagtttctaacatttttgccactgcttagatttatgggctttccctttctgtctgcatgggcctcctctcttatattaataatctgacttaatgaaaacttttaaatcttttgtagtttattttcctctagatgctaattttagcaaaatgaaaagatgtgtgatggaaacgtaaagttaaagcaaaagaagatggtgaattggtgatgcaatattttagtcatgtgtcattgtttacatttatgatatattttactttaaaatacttttcttcattttcaatttttataaatcttcgtagaacacatattcacaaatgatgctactttggtgatcagttactaaaaaataccgaaattgattttagaagatagagacgtgaatctgtttgccaatattaattgggctcaacttaagcccaaattatataaggaaagactacctagtaacgaacaagtagcaggtcaactgtccgagcgttggccaaatctctctcacttccacaggtttctctctccggccaaatctaacctccggggaacgtcgttggtcacttatcaccggttagaatttccttcccgctttatcccgtaaacttttttcccattgattccgatcgtttatgttccttcaccaaatcgataaagtttgatctttttccttttcactattattaacagaccaatctgtttacacaagaaatctacagtaacttatcacttgaaaagttttgataaatagttagtataataatttgttaattgtgtgtgtaaatttgatttcttgattgtgtgtgaattgtgatgaagagggaaaacaaaaaatggcgactttggttgatcctcctaatgggataaggaatgaagggaagcattacttctcaatgtggcaaactctgttcgagatcgacactaagtacatgcctatcaagcctattggtcgtggagcttacggtgttgtctgctcctctgttaacagtgacaccaacgagaaagttgctatcaagaagattcacaatgtttatgagaataggatcgatgcgttgaggactcttcgggagctcaagcttctacgccatcttcgacatgagaatgtcattgctttgaaagatgtcatgatgccaattcataagatgagcttcaaggatgtttatcttgtttatgagctcatggacactgatctccaccagattatcaagtcttctcaagttcttagtaacgatcattgccaatacttcttgttccaggtgtgtggttgatcccgttcatttactgttggttctagctttgctttctcctgaaattttgctttgctttgttctttttgtgtagttgcttcgagggctcaagtatattcattcagccaatatcctgcaccgagatttgaaacctggtaaccttcttgtcaacgcaaactgcgatttaaagatatgcgattttggactagcgcgtgcgagcaacaccaagggtcagttcatgactgaatatgttgtgactcgttggtaccgagccccagagcttctcctctgttgtgacaactatggaacatccattgatgtttggtctgttggttgcattttcgccgagcttcttggtaggaaaccgatattccaaggaacggaatgtcttaaccagctgaagctcattgtcaacattctcggaagccaaagagaagaagatcttgagttcatagataacccgaaagctaaaagatacattagatcacttccgtactcacctgggatgtctttatccagactttacccgggcgctcatgttttggccatcgaccttctgcagaaaatgcttgtttttgatccgtcaaagaggattagtgtctctgaagcactccagcatccatacatggcgcctctatatgacccgaatgcaaaccctcctgctcaagttcctatcgatctcgatgtagatgaggatttgagagaggagatgataagagaaatgatgtggaatgagatgcttcactaccatccacaagcttcaaccttaaacactgagctctgagctcaagtcttgtttgtacgggtaatttacagaaaacttcttcttcttatgtctgattgtcatcatagactcatagtgtatatagtcttgaaaaataagatgaagactaacttatagtttaagcgaatagtgatgccatggaagctctgttttatttaattacaagcttgatgtgtgtctgtaacatatgtacatagagagagctgttttttttttttaattacaagtttgatgtgtgtctgtaacatatgtacatagaaagagctgtgttttttttttaattacaagcttgatgtgtgtctgtaacatatgttcatagagagagctgtgtttctgtttctctgtttgtttgttgcgttcttgcagaacttttaaccctctcatgcaatccaagccttttgatgaatcaagttttcatatagttgttctcatatagcttaaatctaagaatatcaacaattaagcattttgttatatgaatatttgatgatcacaccatgatcataggccttcggattcatagaaggggtaggcctttgcaccgaacctaactttccaaatcgtaacaaaaacaatgtattgtttttctttcaatttcttaatgaagttctataagataattttggtgagtagtatcagtaccctcctcattcatttatcacatgatatgcttcatttttttgtcaacacatgatatgttgcttctattggttaaaaagccttaaaggctaaaagctttttcttctacaccaactttccttctcataattcatttttcttttcatagtatataaataacttggaggattttccaatttttgtaaacccatcagaaatttaaattaacaatgaatattccaactatatgtttatggttgaatcacttttgtctttctttctccccaagtcaaaactaagttaaattaacaattagtcaattacttatgataaaccaaaaaaatatgattacaccatcatggaaatttttttgcagcttcttccgcaagaaagtcaatttgtaagatcagcaaaatacatctgggatgacgtttcatttggtagaaacttatcttctattcgtcctaaaagagaacaaaaaaagtgtcaacaatacgtgatctgatcaattcatcacatttaatgagatctggtcaaatcaccaatccatttgtgtatctgaaatatttacaattagtttaagacaagtctcattatgataacaataaagccgtctctcttgtccaaatactaaatcctgcctaacaactcctccgtaaccaaattccttcaagctctcaaattctcacaacctctccacacaaaggaccagtaacagaaaaaaaaaaaagaggatattgttgattggactgaattgatttgatatgttgagtccgttttcgtcacctaggagatcgagaagaggaaacaaagaaagcaagaatccttattcaaatcaaggacttgacaagttctctgcacttctatctgagctcgatgagaaaagacagagcatttacgcaaagaggcttgatcctgatggaccgcctcttgttcggtttgtcttcactagctccggcgagtgcgtccctgtaatgatcaagacaaagagggcaagtcagaagaaggatgttctagatgatttcaaggtcaagaagaaggacgttctagatgatttcaaggtcaagaataaggatgttctagatgatttcaatgtaaagaccgaatcaaaaacagagcaggaaaaagaaataaagcaaacagatttggaaacagagcagaaacagagctgtgtattgaatgagaatctgaagaagatttcaagaccaaaccatttattacccgtgacagtggtgctggttctaatattattggtgtttttcggacggaccgtctcgatcatgtgcacttgtatcgtttggtacttggttccaatgatcaaggaacagagcagaaacagaggatcaacatacgagacgaagaggaggaagaaactaaatattgaaaacagagctgctcctgataaaagtgaaacccggtgacgaaaatcaaaactttttctttttttgtgaatttcttttattcgtttcatctaacattttccttggtttcttttgttctgtcttctctgttttgtccatagttgttaattttgagacagaaagatacgtaaattcttcttctttgtttctcctttctctaatgctagtgaaatgtaaactattcaaactgattatttttgttggtcgtggtaaagtgtttcttgattcatttgtgtacaactttcgtctaattgatgatctgtaaatgaaatttttttagtttggagttttgatttcttgttgtttggacaacctgtactatttctttgtttattatacatgctcacgtttggttttcttttaaggaaatagcacgataaggctggaggatatattatatgatttagattgaaattgaaattaaaaatagtattcaagattttggaaatcgatgattcaccaactcaggtcaatcattcggtttagtgtggagtttggaactagtgtggctaggccggtttgagataaacttaccaaagccaattgggatggttttggtatagtcagaatagataatgatattaaattttggtccgcggatttgattttgtttcggtaccgtcgttcttttggtattctcgctcttcgccattattgataaattgaattgaaccgttcaaacccggtttactggctaaaacggttctttctttcaattcaaacggttctttctttcaattcaactatacaagtaacactgccacgtcaactcgaaaaaatgggactatggattgtagtttacacaaagaccaatttcagttttatttgcttgtaatgagactatggattatagtctttttatttttcttagagatttgagatgggttttgaacttttgatgatctctttatggaaagcgacaaataattaataacatcatgtgaaaagccaaaaaaaaaagtttgatgaaatttcctatgctaaacgacagaatattataatggttaattgatctgcatttcttttagcaagcttaaaccgcatgcatacacaatggcattagcagtaaaattatgacaatatggttacaaacccctatcaatcatatgctttcacggttttattaaatttggaaaatgtagcttaatgtattaaaaaatcgttaattaatgggtgtgtgccaaactaataatgatacatatataatcaaagattttggattaaaagaacagttattttgaacgaagaccaaaaatgagtaacgtgggtgtgacagtacgagatcgagagcggcttattcgtacggtaaagcttaaaaaggaaattggttattatcctttggtagccaagacaaaaaaaaatgaaccagctggtttcaattacgtggcagattttgtttttgtttacatcactcgctttctcattcgttcaggttcattgcagacttccctcaccgccgttatcttgtctcttcttctctctcaaatcacatatcttcctttttgttttgttttttttgattaacttattgtttgttttccccagttgatggagagaatgaacatgagcgaagaggaggagcaatgcaaaagaaaccaagaggcattcaagagattcttcgagcaaatccccaggactgcggtgataggcatgctttccttcttcctccacggccagatgagtaagttcgagaaagctccaagcaagcctctttccaatgctttcgccttcgcctccgtgggctacgttgtgttgcaggtcgcacacggctttgctcgagctaatcgtccttcatctttcgctttcgacttcctctctgttctctgtggacttgcatccgttgccattctcttcactgccatcttcaacgactgagtcaacccccaagtgagttagggttctttttctctaaataaaaatgaaataaaatctgagattgatgatatgtttcttctagttgagtcattccagttttttcatttctgtaacgaatctatggatttatgttaaaaccctaatgtgaaaaaccttttggttgatcatcatccaagacggcattttttttgtgtcttttactagcgaagcatcttgatattttactctagttttaggtactaggatcggttttctacaatcggattcctgatcgattatcaaaaccaatcaacctagaactggttcagcaaaatttcaattttttctcttccgaatgttctagaatccctccataaacagaaatttggacttattcgagtcaaatccctaaaggtgtgtatgggctttgtaatagtttggcccattattccgaatcatttccttgttaattgagtgtattaataaatgttttggactggtttgtaccaaaaaataaaataatgttaagcttagaagattagaagatatacaataaactttccaaatcggcaacaaaacaaagtatttgatattggtttgatgtgtttcacgaccatagaacaagacggtacattatactatatgaatgttggcaaaagacaagtttttatgtttagttacgtttctctgcaaacgaagatattttttagtttgatcggttttctacaaaccggttccaaatcaatatgatcccattttggttttctcttcagaatgttctagaatcagatgagtgggacttgttgagtacagccgtataggttgtttgggctttatgaaatctttaggcccataattctgatccattatatttccttttctcccctacttgtaagggtttattctggattactcatttgccttataacaatggcttcttcttccgaagagattgtgtccgccggcgaatcatcagagatcgaggaagcggttgcgagtctaaccatgtcttctaacaagattttgttgacgagttccgatggcgagtctttcgagatcgacgaagcggtggcgcgtaagtttctgatcatagtgcacatgatggaggataactgcgccggtgaagcaattccgcttgaaaatgtcaccggggatatcctctccaagataatcgagtacgcgaagatgcacgtcaatgaacctagtgaagaagacgaagacgaggaggcgaagaagaatctagactcgtgggacgctaagttcatggaaaagctagatctggagaccatcttcaaaatcattctcgctgccaactacctaaacttcgaaggacttctcggtttcgctagccagacggttgctgattacatcaaggacaaaacaccagaggaagtacgagagattttcaacatcgagaacgatttcacgcctgaagaagaggaagagattcgcaaggagaatgcttggacttttaatgagtaatccaactttagggtttgcagaatttcgtttcgaattgcacaatttagggtttctcttctcccccctcttagatttcgtgaatgggttcatcttttcgttatcgacttggtctcaagtaatattctttgtagattgaccaatgttgttcttgctctattagcgttctaattcgattctcgatcttgttcaaaagcctaaaaaaaataatcagtgtgttcttctattgttcttcaattgaaaacgaagatactagtagaaccggtcgtaaatcaattctattatctggccggttatctattttagttctctccagaaaattttcaaaattctaattagtggcaaatgaatgatcgacgcgtgtatgacagcgctcatcgagaggacccactctgtgcgaccatctttgttgtcgttgacgtattggtaaggatttgggctttgtgagaatcacgggctcatttgaatgcataatcttattaatgggaattttggacatcatggtactatttcgtcgaacacgacgaatttaaggttgacttatctttcttttttttgtcaacgaatataagattgatatttttaacaatgcataagttaagataagagttacaatcttgtaagattaggttaataaagtaattatgttatctaaaaatagttagacacgcatagcatttgtggtatcaaaaattcctctgcacagaagaagaaatgtctctgatagcaagtgaggagacaggctgctctctgatacgggataagaggatggaggtttgctcagttgcaatatctagcctctccttcgatttagccgattctgagaccagagtcgaaaccagattctgcagaagctgaactctctctccatgatcctcagcgttacttctgaacgtcttgctaaacgacgtgctgatcctgcgccacctaagtggaagatacctatcagggacctgaaaacagtttcctgtggagagaacacggagtgcgtgcctgcagagaaacccagagaactcaaacagttggcaactgcagcttatgatgccttcttgaggaacccaatacacttttcttcctccatcgagttttgtgtggtgcctcacgagatacccctcatccatctggaacgatgcgtagtgagcagcaagcacaagctgttcttggagcttggagaatgcaaaaggagtgagcaccgaggctgcgtgagattccatgggggcgccagtttttaggctgatgttttggagattctgctgcattgtttgctgttctgtagcttggtctttaaaatccacaacaacagccacctgcatattcacccataactcaaataagcaaaaatagcaaactcaacacacgtacagtaccatttcatgagattaaaatgcataaaccctataaaataaatgcttgaacaattactgcatagaaggcctaagagcttgaaataactcatttcactagcaatgaataaacactgtcagaaggagaagagaacatacttgttctacaaagtgagctagccgggtttgtgcgctcaagaacctctgaataaaggcgttaatggctttggatcggccagtcaaagtcattccagctagaaaatggcttctcaggtatggtaaagaccacaaggaacgtgaggcatacaagttgttgatgtgtctgtttgtgtgcagtccaaaagagttcaccatgtctctccaacccaactcaaactcctcaacggattccagatggtagaggcgataaaattcagctttccagtcgttgtaccgctccccaagaccggcattaaaccaggatggaaactttccaacaaccatccatatgcagagtgcatgcttagtggctggcatctctccagctatggcttctttgagacacatattatggtctgttaatatcgtttgaggtgccttcccattcatgaaccctgtgaatgccttccataagagacaaattaaagaaaatgtcagagtacaaacaaaattgatttgctttttggatataggagcttctacaaataacttctacaacaaatacaaattgatttgcttattcgccctacccacagacaattgccaagaattttaaacagaaataagtggacaaggaacttaatcagcttagtgtgccacaaacctgtagtgcccatgaccacgatctcaaattttcatcccgtagaagcacacaaccgaagaagcaagggacaccatagttattaactccaacccatattccaagtggcatctcaacagcacttaagcgatgtgttgtatcgaaaacaacagcatctccaaagagttcatatgactgaatggaagaagcatacgaccaggcaatattttctaacttatcatttgcatccaaagtaaactcgaacttaaagttagggtctttctcctttatgctttggcacatcctcaggaaatcaatgttctcatcctcaggatcgagtttcttgaatgactgaagcaaattcctgacatccttttcggtgaatggtaaaaatcctggctcgacacacttctcaagctccaagagcctcatcatctgctgaactgaaattcctgtcttggaaaacatcaaaatccgacttttatctgcatctgatatggacctgtacgcaggaagaaaacgaacttggtttggttctaagagctcatgattgtggtgattagcaaaaccagtaacacgccattccgttgaacctaactcagtaagtttactaatccttaagtatgcttgacatccacatcgagaagaccttctgtttctctgtggttttccttcgcttagagttttgataggtgtgttaccagcacggtgacaaacaaagtagcgcctagtaagtcctttgccaactccgtcttttccttctgtcctgtgacggcgtatggagaacccgcaacgctttgcaaatgtactatagaactcgtaagcagtatcatgtgtaaggaaaatttgtccgagatagggaatggcattgtgaactgcttctaaagagagattgttatcgtctggagattcctcagtactactagcatcatctaaagacaaggatcgctgatctgaaggatcatcatagatgagcaacatctgtccaggatcatccgacatttagctcctaaggtatattcagcactttgcctgacaagcacataacaacagcacttatgagactctgtaacattactatctacaataaccagataatctccaatgaagtgctacataatctgtaacaagcttttaaactcatgagtacgaagctagaaagattcagaattcaaaaatttcgtataaagattgaattttctaatgtaattaggagctttcgaagctaattcaattcgaattttccgagctaagcacattttggatgccgataatggcaattacaagatagggttttcatagtttctgaagaaatttgaaagtcgctgttttcgaaaagtttgaaatcatcacaagaacataagctttcaataaaactcgcatgattcgaattttcaaatatgttcatattctgttaaaaaatgactccttgatacacaaatgcgtgaagagattagaaacagagaagttgcaagagatagagacagagaaagagagagtacactgatttaagctggcgaagagagtcttgcgaaggagaagccctaatttgcgcaggcaagtgacaataatcctttcctttctcctacgcatcttgttatcttacgcctcttccctactcgtatttagaacaacattacacgtactaccaaacagcccccatttatcaatacgacgtcgttcggtaattttcatttttattatttttgaattgctcgcttctatctgaccaattggctctaaagtggatgagctggcattctcgggctccaaaacgctccagcggttaaccaatgtaacgattggagtgttgctctttggtatatctttgcctcatggaggatggcacatgcattctcatgatacactagatcaaatcatcttcccaaagttttctgtagttctcatacgcatgtagttgcagaagcttggtgtctgtttcatcagatgcaactgcatggagctgaagcatttccaaaaaccatcccagtgatcagatgaaagagagagaatggaagtagagagtcaagaagacaagacactagttttgcttacatgcttaacaaacttctgaactagcttgtccaatgtgaaaagaacatatgactgtgctccaaaaatagctcggcactcatcttcaaactttgtattgtcgtcaatagaaccgtcaagtaaattatagagtgcatccatgaacctagacgtgttatgctttgaatatcagtaaggaatcgtttttcaagtaaagctattaacttggaagataaatctgttagagtaaaattcttttagaggtaatggagaaagtgtttaagtgttttgagagagttttttaggaaatagaacttttattactttgctttaaacttgaatacaacttcacaaccttgctttggatgatttatacaaggtagccctctcaccatttccttccttgaaagcaactccaatcctccaaaatttagatgtccgaatcgaagatgccatagccaagactcctctttgtaacacatcttaagacattgtgcaatgtcatttcgaatgttgaggacaaacattctatttttcgacattggcaccttggtaatgagattgctttcttggtctcttattgaaaggttattatcttttaatctaatatcataacctttctctaagagttgtccaaggctcaagatgtttgtcttcatgctcggaatatagtaaccgttggaaataaattgatgatctccattcttcaatcgaataagaatgtttcctttaccttttacctccatcttcgattcatctcctaaagccacatttcctctcaccgattcatcaagctccgcgaacatactttttctcccgcacatgtgattacttgcaccactatcgaggtaccacttatgattctcttcttgttcatctttcttgtagctagccattaataacatgtcttcttcttgaattttttcttcaacgtagttggccttctcctcaaatgttttgttgctaggagctttacattcagaagcataatgtccaaacttcccacaattgtagcaaaatcacctgggataagaatcaggtgtgattgtcaatagactacgaatggttagtgctccagatctgccaaatctcacaatgagcaaaggaatgcctctgcggctacaactgattgtttgtgtctgcttatatgctccaacgatttgtttaacttatatgcataccatctcagtttcctgcacatatccagctaatcccatctgctcttatatctcatcaatcaacaagaaagctgagtgagacttgtcagctgcagcaaacatatggtctcgtttatttgtccgtctcgaacttgtcccaggacatattcatacatgctaggaaatcggctccaaaaccatcagtcgcagcagcactcggggaactctgtgaatccgccgctgtatctgagatttcaaatccaaaaccggagataaccatatctgaatagaaccaaattgaccgtaaaaacacaacgaacgactccaataacagtattccgattcagtaacccaattactgacatcctctcgccatcgcctaaaagtaaaagtgaacattttttttttgtgtattaatagttttaatttcatcaaagcaaaaattgtttttggaaaaaaaggccaaaacgcttccctatgcctagccaacaaattatgggccgggccagatgaggcccgtttaatatgttcacgagtataaatttagagcatggttataagtgatactcataaagtattattaaacattttttagtattatttattatttaaattttttcaatgatttttaatgatcttttatggttatagatgatactcataaagtatgggtatatgtgattttttagaattttttttttctctgttttttcctgacgaatcagttgccgtcacgtcactcgatactgggtattagaagtatcattccactctgatcaggtccaactgtatactctgatccattaaacaattattgatgggcttctgatactctgattatatcagctatgtacatggtcttacccctttaatatcattatatatatcgttacatatcgtatgatcaatcccttcttgtttcttttcctgataaacttttctccacaaaaaaatggtttcaagcgattaagattctcttgtcgttacccagatcaccacgacgaaaacagttcacaaaggatcttccaagttgttctagttcatttcgctgaagtctttttgtcgagaagcaatcactaccgtggaagagaagaagaagaaggtcaccccaaacaccgatctcatcaagatgaaaaacgaagataacgccaaggatattgcaaagattttccctctttatataacatagggctttgaggctgtcaaaatatggggcatggagatgtttaagaagaagatgaacaagaagtaaatcatgatttgttccatgtaaagttcaacaaattcctgttttcacgttatatgagcatcttttcatataaaatttcacatatatctttaatactgttaatgatctttcttcaaaaactagtatgcatgcagttcgaacattttcgtataaagtttcagtttcaagaaagtttgatttttttctttattatggactcgttttgaatatgagtcaataccgagtttgaatgtgatgccgagtttttcataaagatactggaacttttccaaaactgttatttacttcccggacccatatctgcaattttcacaaaaagcctattatggtcctaaattttaaaccccacgatcacacctttattgtatcatcagaacccacgctagttttgcactcacacaaaccacgacatgcatggcaaaatttctcgacttcttcaagtgatatttcctcactaggatggaaactttccaacaaccatccatatgcagagtgcatgcttagtggttggcatctcaccagctatggattatttgagacacgtattatggtctgttaatatcgtttgggcctttgaaggagaagccctaaataatccaacctttctttacttgtctttggaataacattacacgtattaccaaacagccctcatttaaacactacgacgtcgtcctttaattttcatttcgacattactttttaataaaagtcccatttcttcacatccaagggtttaagccacgagctcgctctctctactcccaccatcgtcattggtttcgtcttcctctaacctctaaaaccctaaatcattttccctccaccatgtctctcagtcacctcctccgccgtctctgtacaaccactaccactacccgtagccctctttccatctcgttcctccaccaacgcatccacaacatctcactttccccggcaaatgaagatccggagacgaccactggtaataatcaggattcagagaaatacccaaaccttaatcccattccaaatgatccttcccaattccagattcctcagaatcacacccctccaattccctatccacccatcccgcatcgtaccatggccttctcttcagccgaagaagccgctgctgagcgccgccgccgtaaacgtcgtctccgaattgaacctcctctccacgctctccgtcgcgatccttcagctcctcctccaaaacgtgatcccaacgcgccacggcttccggattcaacttccgctctcgtcggccaaaggcttaaccttcacaacagagtccaatcactgatcagagcatcagatctcgacgctgcatcaaagctcgctcgccagtctgtgttttccaatactcgacctactgtcttcacctgtaacgccatcatcgccgctatgtaccgagccaagcgttacagtgaatcgatttctctatttcagtatttctttaagcagtctaacatcgtccccaatgtagtctcatacaatcagatcatcaacgctcattgtgatgaagggaatgtcgacgaagcccttgaagtgtacagacacatattggctaatgctccttttgctccatcctcagttacttatagacatttgaccaaaggtttggttcaagctggaaggatcggagatgctgcgagtttattaagggagatgttgagcaaaggtcaagctgcggattccacggtgtacaacaatctgattaggggatatttggaccttggtgatttcgataaggctgttgagttctttgatgaattgaagtctaagtgtactgtttatgatgggattgtgaatgctacctttatggagtactggtttgagaaagggaacgataaggaagctatggagtcttacaggtctttgttagataagaaattcagaatgcatccaccgactggtaatgtacttttggaagtgtttcttaagtttggtaagaaggatgaagcttgggctttgtttaatgagatgttggataatcacgctcctccgaatatcctttcggtgaattcggatacggttggtataatggtcaatgaatgtttcaagatgggagagtttagtgaagctattaatacattcaagaaggtcggaagtaaggtcacctccaaaccgtttgtgatggattatttaggttactgtaacatagtaacaagattctgtgaacaagggatgttaacagaagctgaaaggttctttgctgaaggtgtatctagatctttgcctgctgatgctccaagtcatagagcaatgatcgatgcttatctcaaggcagagagaattgacgatgctgtcaagatgttggacaggatggttgatgtgaatctacgggtggttgctgatttcggtgcaagagtctttggtgagctgattaagaatggtaagctcacggaatctgcagaagttttgactaagatgggagagagggaaccaaaaccagatccttccatttatgatgtggtggttagaggtctttgtgatggtgatgcacttgaccaagccaaggacattgttggtgagatgattagacataatgttggggttactactgtgctgcgggaattcatcattgaggtttttgagaaggcaggacgtcgtgaggagattgagaaaattttgaactctgttgcccggccggttagaaacgctgggcagtctggtaacactccacctagggtacccgcagtgtttggaaccacacctgcagctccgcagcagcctagagacagggccccatggacgagccaaggagtggtgcattccaattcaggttgggccaatggaactgcaggtcaaacagcaggaggagcttacaaggctaataatggccagaatccctcttggtccaacacgtctgataaccagcagcaacaatcgtggtcgaatcagacggcagggcaacagccaccgtcatggtcgagacaggcaccgggatatcaacagcagcaatcttggtctcagcaatcggggtggtcaagtccttcaggtcatcagcaatcatggactaatcagacagctggccagcagcaaccttgggctaatcagacgcctggtcagcagcaacagtgggctaatcaaacgcctggtcagcagcaacaattggctaatcagacgcctggccagcagcaacagtgggctaatcaaacgcctggccagcagcaacaatgggctaatcagaataatggtcaccagcaaccgtgggctaatcagaacactggtcatcagcaatcatgggctaatcagactcctagccagcagcaaccatgggctaatcagacaaccggccagcaacaagggtggggaaatcagacaaccggccagcaacagcagtgggctaaccagacagctggccagcagtcagggtggacagcgcagcaacagtggtctaatcagacagctagccatcagcagtcacagtggttaaatcccgtgccaggagaggtggctaatcagacaccgtggtcaaactctgtggacagtcatcttcctcaacaacaggagccagggccttcccatgagtgccaagagacacaagaaaaaaaggtagtggagttgaggaactagtttgacaaactcgctatttcttctgcaccaccattctcctcatagttaatttggcttttgctttgtggttcctattttttgcaaactctagtagttatttctttaggatcaacatcataatctactacgttcgttgcccttgcttcttcacttgtatgtatggttcttttgaagccaatggcttctaaagagtaatggaattcaaaatcagtaattcgatcaaaacattaaattccatttcttccaaaaagtgatcaaaatgaataatatattcgtaaatctacaactagattagctctgcaggtcggcagaagcaaaactcttacatacaaaaggcttgaccattacgatcatctctataaaaccccaaataatgaagagattataaccaaaagaataaaactatataagaaagaaaaagagtcctatgttatgtatattatatatctcgtagaagaatctcatctcatccctataaaagaagaaagaagaggagaaatgaatcagtttgttttttctcaaaaccccaggacagtagagctcaaattcataagaggagctaaggcagaaggagagaacttgcgagcaaaaaggaagcataacgaagttggctcttcattgtaaagacaatccgtctcgtttttccttatagattggagaaacccttctgtgatattagctgcagcatatgtagctggatggggaccgcctatggaccaatcaacccatgtcacgcttctatttgcgttcattgaaccgtgaaacatgttcaagaaagtagggatgtaatgctcgtctgggtaacaagctggtctgcagaattgtttgaacaatgagtagtatttcgagtctgagatgatgtagatggcgattttacggtttacttcaaaccactgagaccctttgcgccagtgatggagtttgatatccgggagcatcttgcggctataacggccacggccataacgtgttggctcatcataagagtccacaaaactgtaagcagagtttattaggtaagtgtagacagttgagaagttgtaaactgggacacagctctctgagagaagaacaaaacgctcatttgagaagtccagcaatgcattggctagaagacgcttctctgcgtctgtcaatagtggggatccccattcaactctctaaaaaattcaagtataaaaaacccatcagaaccagacagaattctttagatttttttatcaagtagatctagcatacaatgacacagaccatccatgattcatcagatgaccaagttgaagaaccaaacaaagcgttatgcaattaccaggatcattgtgacatacagagaaaattaaagggattactacaataaaaggtgtaaaaatcaacaagagaagcttatataatgtgtctatgaattagtcttttatagtttcctagttcacagctaagcagatcacagctaagcagatcacctctataataaaagctgttcccgatcattaaactaaaaccagctatgttccaaataatcacataatagcaaaattagtaacaaagcttcatctaatacacaaccttgaaacagatgtagctgacagtggaagaaacaattaaaaggttcaaatcctataaacaatctcaaatagtcacgcgccagtgtaacttggattccatcatgccgattagatctacatgttgttcctctagagaactagatctccatgatccagaatgactatatttcttatctacttatctattactctgttcttgtatacaagattaagtcactggtgaaactaagtatttgttttgttctgatccactgaagaacacaagcaagacacaaaaagttcactgtcctgcatcaaaacgtacctggctggggatctggcggtcgtaaaagggagaatcacgagagacattcatgtcgtatccaggaggcgtatgaacataaacggacaagtacttttcattgcctttaaaaaacttctcccaaagcggaagcataggtaaaggccctctcgtcagaaacataaacgccactttcggaaccctatcgtacggatactcttccttcaccggaaccatcgaagctctccagaacaactcatcatcagtcattccatgactcagattctctggccgaacaaacccatcaatgctccaacaatctcgaacctttggtttctccgccttgactcctccgtcgtcgctctcgttgtcgtcgttacctgtgcagtctcggtggatgattgtgcaattggagtaatcaggagtcgaaaaaggaatcgattggaggttagtggttgatgagaacatcctcggcaaagaattgaagtagcgatcgatgtgagaacttgcggcgagaccgatgatgattccagccatgaaaattagcaaaaacgacagcgtttgcgccagctttagtaaccctatgtgtttttctccttcctctttccctcctctcgccattgttcgagaaactcaaaacttgtctacccaaacaacaacacagtgatgatctctgttccccaaaaataaagtttcagggaaacattcttatgattcaaagagaatctgattgtttcaagcacaaatccattgcattcaatctcctcgagaaatttcctaaatttgtaacatataattaaatccaaggatcaaacgaaatcgaaaaaggtaagtggataaatggaaattggatctgtggaaatcttcgaggaaagtgagaaacgatgactgaaacagatcagaaactgaatttcatgcagagaggaagaagaagaagaagaaacataaacaaatctggtcttttgtttcttccagttgaaatctatgtgtgtgtgtggttgattttgatcttatatatataaaagaacaaaattaattggaatgttatgcttaatttaattagattaattgagtttaaaactccacgtcgaaaagcataacgagttcaaagtccgcagatcttgccagatgggaataatctattggttttaagttattgggccggagggcccacgtttaattgtgacgtggtttagtgctcgtcaactctttggtccgacatttcacttttttttttatagaaataattctagatatccagtagtcaaacttattgattatctaatttctatatccttactatttttaaaaaaattacttttaacatttctagaatttttcgattttttctgtacttattaactattagtaaaatttattgatgcttcttttggttatgttatagtattgagacaatgtattgtattctaattttgattttttttttcctttttaatgatttgtagattttgttttttcattattatatttgaaaaaatatcttcttatatcttaatcaccagaaaatctaaaaccgatggctatactaatttccggaatatatgaaatgtttatttttctattaaggatccaaagcagctaattaagattaaaaacttgggaagaactagtatcccaaacaaacaatatgatatccagatgtccaaaaggaaaaagaaatggtatcaaaagaaccaagaaatgtgcctagaaatttcatatagttagcttggaaatttctgatttttatgtccaatgtttatttattttttccttataattatacttgtcatacatcacaaagaattgtcaacattgccaaactagtcctaagatgttggaaggtatgatgatagacaacagttctaaagaagggaagatgagattcaggcaacaaaaaacacatatagttcaaaaaaattaggttggtaggatcaattattcaaaaaacatacaccaaatagattttagtaggggttgtttgtccaaaaaaaaactataatagtttacgaaaatagttacaccttgtgaatagattttttgtttgccttcccttgaggtaaattatgtcgcgagaactatatgaacaacaacgagatccacaacaacatttgattacatttttatttgaaccttcacattgatttagtaatgtgggattccaacatcatctaatgttatatgaatggatctaatagatgataaattgttaaatgaactgataatttttttttatttttttatgtgtatttcacatcacattgtttttttttttttttttttaagtaagaaaaagaagaagcacttgagaccgatcagaaaaaaattagaaagatatgatttttgtaagtcttttgaaatttgaatcttgtcccgtgtaattgtgaaatcttacgtacgtcctctttatgacctcgtcttcgctcatttctgccttcccttacgaaatccccaacgaaaaatcttagcttaacaccatcgcgaccggattccaaattccggcccatcgtctcaccgggaaagaccccgcctattgccgccgatttcggttccggtctgctcagatctaatcgagtggcttccttcttcctccagatctcttcactttgaatcggttactcgatctcgattcgcggagggcttttgctagtcgcgatggaggcgatcgatgagttgtctcagctctcagattcgatgaagcaggcggcgtctctcctcgccgacgaagatcccgacgaaacctcttcttccaagcgccctgccactttcctcaacgtcgttgccttgggaaatgtggtgagttcctcgctctcactccacgctcctcgattttcctctctttaggctcgtgctggttttattctgtgttcgagtgtatgttggattgccatatcgtggatcttctggatctagattaggtttttatcgaattttgctaggacacactcatcgtttatagctagttttgttgggattctctttattagtggatatatggttacatgaggagcgactcgtgccggagaaggctgatgtattttgttatttgttacttatctctttttgcatactgaaccagggagctggaaagtctgcagttctaaacagtctaattgggcatccagtgctggtaagttgtacattgagtctatggttattattggcttactccttttcttatactaatactgacctctgttgtgtctgctacacttactatacacagccgacgggtgagaatggtgctacacgagctcctataataattgaattgagcagggagagttctttgagcagcaaggcaattatcttgcaaatcgacaataaatctcaacaagtttctgcaagtaagtctctatctatgaacatatgcaatttagcaatgctatgtgaggctctttctgcatttatgataaaaaaatttcgatcagtcttctcataatatctccattgtgttctacatgggtatattttaggtgctttgagacattctctgcaagatagacttagcaaaggagcctcagggaagaatcgtgatgaaataaacttaaaacttcgtaccagcacaggtaagcccctttttacttgcacaatcataagtggcaagcctatatctactcttcaaatagcacatccttagctaacctaagttgggtgtatgaatttatctttgatacccgtgaactggtcagctgtaatatcttgctatccttatatactatctagtacactagtttagagcttctagctttactttggtgggtatcagattaaatatctaacggagctttaacataaacagtacacactcttttgaacatgagttatgacatatgacatatgaccgacagtttcgtagtattaaattttctttgaccatcataacctgttacgtttaccctttacattgcagctccaccattgaaattagttgatctgcctggactggaccagagaattgtggacgagtcaatggtgaggcttggaactacttaatgccattgtcatatccttaacttgcctgacaaccacgaaacaaaagattttgactatttttatcggtttcctactgaagtgataatatagattcattatcatgtttatccttttgaaattgttgtttgtttcttgggtctctttgcaagattgctgaatacgcgcaacacaatgatgccatactgctggttatagtgcctgctagccaggcatctgaaatttcatcatcccgagccctgaagattgcaaaggagtatgatccagagagtgagtacatctgtatttccgatctgtcttatcttaatattgtttattatttgtatacctgataagaactgttgatttacctacctattatcacttcagtttgcttaaaatactcattagctaacatcactcctccctacttataggtactaggacaataggcattattggaaaaattgaccaggcagcagagaactcgaaagcccttgcagctgttcaggctcttctttcaaatcaaggacctccaaaaacaactgacattccatgggttgctgttattggccaatccgtttcaattgcgtcagcacagtctggaagtggtgagaactccttagaaactgcttggcgtgctgagagtgaaagtcttaagtccattttgactggggctccacaaagcaagcttggcagaattgcgttggtggatacccttgctagccagattcgtagcagaatgaagctcaggcttccaagtgtcctgtctgggtattgcttctctccatatatgtgctttcttcatgatttttattatggtgttggcatatgacattggttgcttgaacgcatatggctttcaaattctttgtacaggctccagggtaagtctcaaatagtgcaggatgagctagcgaggcttggtgaacaactagttaacagtgctgaaggtacaagggctatagctttggagctttgccgtgagtttgaagacaagtttcttctgcacttggctggtggtgaagtaagtacattcttacaaaagttaactagatttagtcgaaaattcaagaatatagtgagagagaagaactcttcaaatattagcaatcagccatttcagatttggtactagtgtagtggaaagtctcttgctagcctacgcttggtaagagcacattatattgttgggaatctcatgaatctgatagtggatgtttataatatgtgtataagccaactgagtgtttgatatagagtttttgtacttgtctgtgttcagtttatgggctgaagtcccttttggagcttggcaaatgtttttctcaaaactttttgattcttgttcagggaagtggttggaaagttgttgcaagttttgaaggaaatttccccaaccgtatcaagcagcttccattggatagacattttgacctgaacaatgttaaaagggtgggtgtcttcttctgtcctaagtttctgcacgagacaagttttgagacttgatttgtcaaaatatctttgattttcaggttgttttggaggcagatggttatcaaccttatcttatatctccagagaaagggttgagatcgttgataaagattgtccttgagttggctaaagacccggcacgcctttgtgttgatgaggtgtgcttgtttacatgtttttttaggtacatgcagtaggattgaattttagaaatttactgcattgtgaactggctatggcttgtctcactttaattcttcgaactgttatttagagttctgtcaagttttctggtttataagccttagtaagttaatatcccttaccgtagatgtagctattttttggttcctactttaaaactcatgcatccagcttctgtcttatttacgtgttgagctaacatggtcttaacttttgattaggttcaccgagttcttgttgacatagtttcagcttctgcaaatgctacacctggacttgggagatatcctcctttcaagcgagaggtaataatgattttttggtgctttattcagtaatattttatcatttcggtaacagttattcctttctgactaatcatcaaccaggttgtagctatagcaagtgcagcacttgatggtttcaagaatgaagccaagaaaatggtggttgcactagttgatatggaacgcgcttttgtaccacctcaacattttatccgtcttgtgcaaaggaggtattttggcttgtctttctttgcaatttttgtttttattttcaatggttcatgactgaaaattatttctctttctgacgatgcactgtattgactccatcagaatggaaagacaacgtcgcgaggaagagctgaaagggcgatcttctaagaagggacaagatgcagagcagtcccttttaagcagggtgtgtgttcattctgtatcaatttggatatacgtagtgaaaaatgttttttttttttttttatcgttttacatgaaaatatataatgtggaaattctctacatatatgtttatcaggctactagtcctcagccagatgggccaacagctggtggtagcttaaaatcaatgaaagacaaacctagtccgcaagataaagagacgccggaggtctctggtctgaaaactgctggacctgagggggagataacagcaggttgttattctaatatacatctacccagttactgtctaaaaagtttcattctgctttttcactcccgatttgctttccttacgttgcatgattttattgctgcaaagctttgctcttagtccaagtgcatgatttcttcatgtctttttcttctttatcacttaaaactaacttgacaaaactaacttccaaggtagataacaaatacttactcttttcatttagggtacttaatgaagaaaagtgcaaaaacaaatgggtggagtaggcgatggtttgttctgaatgagaaaactggaaaggtcagcattttgaaacgtatattcttcagttgttgagaacttactgactttactgtttacctttttctagcttggctataccaaaaagcaagaagaaagaaactttcggggcacgataactttggaggtaccattctcttcctatgctttattttctgccaaaggtgaactataattagatatgacatggaaaaaagaattagagaagaatatagttcgtattcaccttgttattttctcccacactgtttccttcttggagagtgacaattacttgtgtattttgaagcttatgcttcaaatatttaatagttctgttattatcgatgagaaatttggatactctatagataacattttttccatgtttttctaattatacttcctccaactttattaatccactcaggaatgcactattgaagaaatccccgaggacgaagtagaaaagtcaaagagctcgaaggacaagaaggcaaatggacctgattcaaaaggaccaggccttgtgtttaaaataacctgcaaggttccctataagactgtactcaaaggtacataaatcaatcattataagaattcaaacttcttaatcttctattcgcacttttatgagttttcctcaaactattatgttgcagctcacaatgcccttgtgcttaaggctgagagtgtagtcgacaagaacgagtggattaataagttgcaaaaggttatccaggctcgtggaggccaagtgggcagtgtttccatgaggcagagtctttcagaaggttcacttgtgagtcactcatgggcagcttttcttacatttcctcttccttaaatctatgttagatacgttcactagtcttatggattacttattatcactatgaagaaagtttgaaacttcacttcggaaggtttgaaactgttggaagagcaaacaaagctatttatgttttattgaacattgtcgaatttttattattgaaacatttttcctatagaaggctcagtttatggggtatgcatgatactacttttaaacttgacataagttatgtttgacatttaaggtttttattgtttataatattttctgagacttacgtttttttccttgtctgtatttcaggataagatggttaggaaacccatcgatccagaagaggagctccggtggatgtcccaagaagtacggggttacgttgaagctgttcttaacagccttgcagccaatgttccaaaggtgaactatccttatgcaaaagctcgaaagctctaaattttcttgtccatctcttttctcttacagagattcctcggtcatgctactaagcgatgtgaattgaccatgaacaggctgttgttctttgtcaagtagagaaagcaaaggaagacatgctgaatcaactctacagttctataaggttcaatatcttttcgttccctgtgccttgtttcgtttcagttgtggtgtgcttacttgtgctctcctgtatttgatctttagtgcaataggcaatgaaaggattgagtcattgatacaagaggatcagaatgtcaaaagacgaagagagcgttaccagaaacaatcctctcttctttctaaactcacgaggcagcttagcattcacgacaaccgagcagcagctgcttcaagttattcggacaacagtggcactggtaaattcatccgccttattatattcgaaacatgataacagttcttctgcttgcttggtttggattgatacggtttcttaaataccatctgaaagatcttcaatgaaacttaggtttataaatcttttaatcttggtatcacttgtcctacagagagtagcccaagagcaagtggaggttcttcaggggacgactggatgaatgccttcaactccgctgctaatggaccctcagactcattgtcaaagtacggttccggtggtcacagccgccgttacagtgaccctgcgcagaacggagatgcagcatcaccagggtctggtagcaaccgccgcaccacccccaatcggttgccaccagcaccaccgcctacaggttcagcttataggtattagaacctgaagaaaaaaccctggaagcgcattgtgtcccgttttctgggactacgttactcttattttttctagtttaagacagtgattggatgattgtactactgttttttggtctttgtagatagatattatcacacacatgtgttggcagctaaaaaagagtttggtctcatgagtcaaatgtctgtttgaatttttgttttatttcttattcaacttttcttggcatccattttttgagcacgctatgctgtagtagttatagaatgaattttgtatctgatattcttatgaatctgaactgtttgggtaaattactaaatttataaaatcgaagtttcatagactacttccattgtttaagccttgagagaatactttcagggctagttgatgaaatcactaaattttggggtttattggtaaagttgtcgtatgcggtagtacgtagttgcaaatgcaccgcaagtattttctttattcagaaagcctaaaattagccaaacggcatcggattatccctcgaaccaaattagtaacatacaatttcttataagtaattttaactttgttaaacaccagggtttaaatgagattttcctgaacatatggtgtttttgttaaattttaatagatgttcttgcaatagttttgaaatttgagggttatttttcattttcgcgaaacttgggaaaggaacccttctagccctaattaacgtgtctgctttaaattagggcagacaaattaacgttctctgtctctgtctgttataggctactccaccgtctcgatctcattcaccttttagtaaggtgagctatctcttgtcttcattgacgaaggtttgtgtggatctcgaagttagattgataaacctaacttgttcttgttatatagttatgcacggcagctagaatttgtcgagctataatagcattgttataagattagcaatcgaaattgatttagttaacgttttaagattaggaatccaagttttagaatctgtttggaccaaatgaccatcgtctctacttgttgtccttttggtctctctaatgtcactaagtgtatcaatttcgtgcagattaaagaagcaaaaacaatggtgaaatataatttcaagaagataacagttgtgccaaacggaaaacagtttgttgatatcgttctttcccgcactcagcggcagacaccaactgttgtccacaagggtgacaggatttgcaaactccgtagcttctacatgcggaaagtgaagttcacagaatcaaactttaacgagaagctctctgccattatcgacgagtttcctcgcctcaaggaaattcaacccttctatgaagatcttcttcatgtgctttacaataaagatcactacaagctcgctcttggtcaagtcaatactgcgaagaacaagatcagcaaaatcgccatggattatgtgaagctattgaagcatggtgattctctgtaccgatgcaagtgcttaaaagtggctgctcttgggcgtatgtgtactgttatgaaaggtattggtcctagtttggcttatcttgaacaggttaggcaacacattgcaaggcttccttcgattgatccaaacactcgaactctcttgatctgtggatgtcctaatgtgggaaagagttcttttatgaacaaagttacaagagctgacgtagctgttcagccatatgctttcacaacaaagtcactctttcttggtcatactgattacaagtgtttgaggtatcaggtgattgatacaccggggcttttggatagggaaattgaagaccgtaatatcattgaattgtgtagcatcaccgcgttggctcatatccgagctgctgttttgttctttcttgatatttcgggttcttgtggttacaccattgctcagcaggcttctctttttcacaacataaagtctgtgttcaagaacaaaccgttggtgattgtctgcaacaagactgatttgatgcctatggagaacttatctgaagaagataggaaacttattgaagagatgaaagatgaagctatgaagactgaaatgggagcaagtgaagaagcagtgattttggagatgagtactttgactgaagaaggtgtgatgtcagtgaggaatgctgcttgacagaggctgttagatcagagggtagcggcgaagatgaaatcgaaaaagatcggtgatcacttgaacaggttccatgtggcgatgccgaagagtcgtgatgaccaagaaaggctcccttgtatacctcaggtagctggtgaaaaggagaagcgaaagaccgagaaggatttggaagatgaaaatggtggagctggggtttattctgctagtctaaagaagaactacattttggctaaagaagaatggaaggatgatataatacctgagatctgtgactgtcataatgttgctgattttgttgattcagacatcttgaataggcttgaggaattgacaagtgaagaaagtcttaggaaggcagaggaagaagaagttggttttgagattgaaggcgaagaacttacagagaaggagaagaatgatttggctgctattcgtaagaagaaagctttgcttattgaagagagtagacttaagaagagcaatgcacaaaacagagcagctgttccaagaaagtttgacaaggataagaagtttacaaggaagagaatgggtagagagttatcatctcttggtcttgatccgtcttctgctttgaaccgtgcaagaagcaagtctagaggcagaaagagggaaaggtatgatgatttgagtaacgatgcaatggatgtggatgtgaatgatgatgagcaacataagaagaagaagatgtgtctgagatctaaatcaagatctttgtcaagatcaagatcagtgtcaaggccaccacatgaggttgtacctggtgaaggcttcaaagattcttcacagaagattaaggcaattaagattggacacaaatctcacagaaagagggacaaggctgcacgtcgtggagaagcagacagagttataccatctcttaaaccaaaacacttgttttcagggaaaagaggcaatggaaaaaaccaaaggcgttgaaaccagtgatcaggtaacaagggctcattagtataagccatgcatatctctatatatcaagcttatgtgtccttcacttgtacttttattatatgactcatataaaacattgtggttagcaagctgtagcaaaaagagatgataatatggcgcattgggtttctgcagggggactatgcagatgatgaacggtttgaggattatctatcaagttttggatttggaagctttttacttacttttgttttactatttttggattttctcggcatttgttattcacgttggacgaaatgtagagaagagagttgattgtttggagacagctatgagtgatcaattgtggtttttagatgttttgaatttttttatacttggaaattgcaatagttttttttttttttttaaattgcaatagttataatgttatcgttgatcctgcaataaatacatagtacttgcttatcataattttaaagcacttacaactatcataaccttgatgcaattacaatactgatcgttataacttataggataattttgaaaattgtcatatttttgagtttttgtttgaaaattatactctatcctattttttaaataataatataattttaaatatgttaaatgatttttcggttcagatttaaaacaaaaagattatttttaattaattaaaattaaatacaaatttttgaaaaaaaagaataaacttaatttaaaatcttaattattattttactattttaagataaagaaagtttatatattttaaatattaaaatctaacatgatattatcaaaaacaaatattttaaagttgatcactttgtcacattatatataaaaaatcaatctaactccaaacctataattctttttttcttctttgtcttgtaacaatattttcctttataaatatattcaaaataaaattatatggaaaattgttagttagttacatcaaatattttaaaattcaatttttttttttgtgttgacaaataaataaaactgattgttgttttaaatataaataaaacaaaattattagtaaattttgctaaagatatttttgtaattttatatttttttatattttagaaaataaattttagaatctgggtcggttacgttgcttaatttttcttttgatttctagtctctgcctttatttcactgatcattaataattgctggagttttaatttacatattataaagggaccaattgttatcattgtatgaatcttttttcttgcaaattataaccgtcattattggaaaagaatagaaacgcccacgattgtaattagatgctaggtcttcaaggtttgtgcatcccacttggaaacaaacaataaacacaaattaggagtaattatgaaactaatggcccattttctaatcatttgtagtctgtttcatttggttttacgtttgttatttctaaccttatccataacactctaattgaaaataaatgagtagctttattagttgttagactgtgagagatccgccattgtcacccgctgtaagattcagaatcatcgtcgcagccttcacagccctgttacatttgacatcacataacacaggtttagagtttcaggcaatagattcttaagaagaagaaaaacagaatcggacagatcaaacagagcaggatcatggctcagtattagaatcctcaaaaaaaagatttctagctaattataaaccttacagataagggcaaggttacacatttttttaatgtgtcaataatcagaggaagttaaatgtttcttaccaagcatcaggagcttgatacaaggaagctgagttcccgaagcaggaagtgagtaattctgtgttgatcacgcctggatttaatgcaactactgccattccttcaactacttcctttgccactgctcggcttaaaccctcaatcgcccattttgatgcacagtaaggtgcaacctgcagatacagttttggttttaaaagttaacctctttgggatcaggtttgatattgccaaatcatgagtgcaaaaattccgaatatataaggagcctatcagcactaaggttatctacatattcaagaggtgaataccagaaaagtgctcggccaacatgaagacggttaatagaatgattctaggttttgcagactatggtacagccgcacaaggaccaagtaacttacttagaccttccaggtgaagctatagcattaccatccatgtatgataatttaggagtgtatactctaatatcaggggaaaagagtatctaacatccttactgaattcggacaaagtctagctcaataatatcgcatatctagatatcaatagtgccctatgtttgtttcagttgactttgttacctttctgtaactacaagaacaaaacacacgataacagctcgtggttcaagcaagtgaagattgaaactcaccagggcagcaccagatcttccccatccagaagacatatttacaataattccttgcttgcgtgggagcatcaaagggataaaatggcgcagcacatttgcaactcctttaacgtttgtatccatgacattgtcaaaatcttcagcagagacttcccaaatcttgctgttcttattgatggtaccagcattgttaactgcaacatgcatataccaacatctaagagttcaaaatttacagtaaaacgatgcaaagaagcaatgtgcccagaatgtgcaggagatgttgatcatgtaaccatcaaacctacaatttacagatatcaacctcgagaaaaatgaaatgaattcttagatgacaacaatagaaacaactgaagatggggtagagcgtctatctcagggttcaatctaccaatgaaaatatatacctagagcaaagaaagcacctatattacaacggctaccaaacacttgaggaacaatcaaaacaatccaaaacaactagcaggtgcacaaaaggcagagacttgaaagttgttttcttgagacaaaggttgaagactctcagacgcaaagtgtcaagaaatatgtaaatatacctatgatatctgggacacccttcttctccacaattgtgtgtgccatttcttcgacactgctgtttgatttctgcaaacataagaccataaatcttcctcacttcaaaaaccgaactcaaatgaaaaataaattaggccgttgctgaacaacaaattcaccaggaaagcaacgattcatccaagtccaataaaactatctttatcaaaacttgggcaacttccaattcatttgacatcacacatttttgtggaacaaaaaatattatcaatcatcagcgcccagaaagtttcttaattacagataactagcatcaaatttcacacagaacacggaagaaatcaagcacgggagtcggaagagcggcaattaccacatcagcggtgaggaggagatgattggtcgaagaggaaagctccgattgaagagcggtgagcttctcttgactacgagcgcatcctatcacagtgtgacccctcttggccagctcgagagctagggctcttcccagacctttgctcactcccgttatcagaacggtcctcgccgccacaatagagttcgcagccccactgaaaggcgtcgccatcgtcatcgtggccgattaccttctctttctctcgtctcaaaatgacaaaatgtgccgcgaagaatatgtatacatacagacttttttatttcatttatttaccttagcataactagtattaaaattcttattatgttgccaaggtgtattaccaaattatacttttttaactgttataaaactcaattcgatttttaccaaaaatctcttttaatatataagtagatcaaactaaaatatttacagatgagagaacaagtcacaagaacatctcttgttttgtttcgttctgagatcacactggtctccaacgctcaatctcttcttccacttcctctgattccttaggattctggtcgtctgagttttgtgtccgtcttctttttctatggcgatgacgtctctctttgtgtgtttctctatctgaattctcttcactttgtcgttttcctttcctgctttgatcagactctggatcatcgctcttgtatctctgtctctgtttgcttctgtccctatctttatctgactgatatcctacgggactagtctctacacttctcttcttgtctgattctttgtgctgatgatgtctactctcagttgaatcttcctcgtgtgaatatcttgagctacttctttcatgtcgatgcttcgatctttctctatgcgacttgtcagaaactgtatgaaccctatcatgttcatgaccctcctctttatcagctgatgacccttccctgctgtgttttcttgaactcctgtgggtttttctgtccttttcattgtccatctgttcttgtactcctgaatctgtccctcttctgggttttcgtttgtgacccgtccctctcctaccatagtcatctccatcagcagaatcatcatcagaatacctcccatggattctcttccttcccacccgatgtccaggagagtgttcagaccatctgctatcacgatgcaatgtgtccttagcataccgtcgctctttatacatctccctctctaaactaccatctctgctcggactgtcatcaccatcatgacagttctcggcatgcctgcgaagcttgtcttcacgagtgctgtcctgagtatcaccatgatatttacggctcctataagaaggcgtagatccaacattagcatgatcatggtccctcgatctagatcttcttgaaggttgcctgacatggaaacaaaacacatgagcatgacgctccataaccaaattaagtaggaaatacgctgataagttagttaaagatgaggatcctcaaaagttagaattccaaatataaagcaacctacctgtgtgaatctgttgatagatctgatattgaatcatttaacgaccctgaagattcatgttccatgtgcttttcatctgaataaccaaataaagaggtcattttgtgaatccagaatcttggaggtggtctgtcatggtcagcccattcatagtctccaccaggatttcggaaacaatggataaaattgcaggcagatccacgagaacaagtctgaaaagtagatgaaaatcatgaactagagataagcaagaagttggaatctcaaatgatgaagagtcatactttaagcctggacttcatgtactccccacatatggcaactttccatcttgagatgttgacaaactcgcaattcacctgatgaggatgtgtaattatcatggatataaatgtcagcaagctgaaagtatcagaaatcaagcctcaaagtacacatcagcaaagtaacacaaatcctttgacattctattctacgatacaccaagacctatattcaaccaatagatgttaacaaaaactgccacagatcggaaagatgagacctctgacaaaacgtcctacacaaaggctaagataactgaaacctagatatgggtctccaacattatgccacgaagatacaaatagtgaagacgcaaatatgatgtgtgctaccaaagatctgacaaactagtgccaatattacagaggaaggtccactagacgaaatcgttaatcacatttttcaatgaaaggaagtggtaaacgtctccagagaaacagtgtacctgtttacccgcaaagtatcgaccattaatggactggtaagcaagaatagctgattctagtgatctgtagtggacatatacattgcccttcaaatggaatgagccatttctacacacctgaaatggatatgaaattttgtttttgagaaaagaaagggtgggacaaaaagtcgggagacaacacatatctaccaacaggtttattctcaaagatacagctggtcatttgatagtgaataaaagatgcccggaatcactaattttcaaaatggctagcctctagtgttgcttgcagattcaagaacatacattcggatttggtataaaatgaatctatggctgataatggaaagtaagaaaaaaagaggaggaagaggaaatgaaggaaagggaggagagggagcagaagagaatcgacagaccttgaaattaacaagttctccatactttaggaactctgtatgaacatcttcataaaattcttcataacagagttcagcctcctcatctgtatactgcaaggaaggcgggaaaagagaaagagagtaaattaaagtaagtaactaaaaccaaggaagccaggtaaatataatgcaggtgatgctagttttaacatcaagtataccaggatagctacagccttactaaattataactgcattagtttctgttcagatactacaagcccaaagcagccagcatgcatgaaaagacactgttctgttcttaatttaggaaaatcaagcaattctgcgataaatcatttgtcgctcccacgagcaaattagaagacactcaaagaacaagatataagacaccaacaaacaagtgggaaattgacaaaacattctagaaatctatagctacaaatatacaaacaccaagttaaactaagtttgtctctagtactgctatcaaggcaagagagggcacaaatacaaaggcccatagtttctgtgatcgagatagcaatcacataataactaatctatcaatcaggtaggatacaaagaagtgaaccgcaactccaatcccgcccaggttataatcatgcacctccactgaagggaaaccatcaatgtctgatgtaagttaaagaagatagtaacgagaataaagaaacaaaccgcagaattctgtaaattcaagagcacgcagcaaaacaaaacaaaacagaaaagaggcagaggaactgtagtaagtttgattcagataatgaaagccgagagtaatactgtaatagagaagaactaataattatcaggatactagcatcaggagatgacagcggttacagacctcaagcccctcatcctgttcccaagtaataccaggaccattatacatgttcttcataagtagagtgcacgatttattggggtagaaatgaactctgctgcaacgctggccaaaccgacaagctccagttttcaaatggaaaggacaatgagctttatcctggagaatgagagaacaaacaaagccaaattactaaaaggaacataagaatgatacataaaactaataccatctcaatcaagggatacaacaagcacctgctcagttccaaagttgggtacttcttgtgcaacactctccaatatctgttgcgcagaactaacattctgataattggctgaagcttcacttcccggaggtagaggatttgaagtaggcctgtcagaaatctgcaaaacaaactccgcattggaactctacacaaaaatcaaaacactgaagatggtatgttcacctagatgatggtcaattacctcgtgtccatcgacctgaacaaccgatttctttggaactctcactttgttctttttgagaatgatctcatttccctggaatataatttctggaggtccttcttcgatatattcatattcaccatcctcatcctcaccacactcatcattcccactagcctaccaagagaagcacaaaagtgagctcgatatagcattaacacgatatgaataagaaattgacaacaatcaacaaagcacactacctcaagctttctcaactcttctagatccttccaacgcctctcttcctcttcccgcttcgcttcctcttcctcctctttcttcctcttgatctccatagcttctctccaagctctttcactctcctcaaagtccttcaactccttttctctcctccgcgcatcctcttcctcaatcgccttcaatctctcctgttccgccggatcgtttaacttagccttcgcttcctccctctccttcgccgcaatctccttcctcacttgcttcctcttcaatttcttcatcgcttttcgcttctccttacgactcatctccgccgctttctctttactctcttcaaaactttccttctctcccgccgcttcttcgtgtcgctcttcttcttccttttcgtttgcttgctccatttttttcccggtagcgttaacctctggcttcacggtggtggaaacagaatttaatttaggggtgcaaattcggttagtttgaaccgaaacggtatagtgaagaaatcgaaataaaaatggattaaaccatactaaaccggagacccctagttggttcacctattgacctcggagactccaaattgctcgccggagctctcgaaatcagaaaactttcatcctcttgtagctcaagccgattgacaatttctccactttcagatatttgatttgtaactttctcattgaaattcaaaatcattctccatcttctacaacgaggtctcgtctttttgttttgctttgtagattgcttaatctttgtgcaaattgtatgcgttgtacttccttctcaagtttcagtttgtctcttgaagacgcacttcatcttctccaacgtttcttatactcctcaaaccagattaagcagattcacacagttcttttgaccagcaacgcattggttgcttcgagatggaagacgaaatgcgtctacaacactctcattcgatcctatctcactacaggagaatacaagacttctcttgctctcttcactcatatgcttgcaagccatgtccaaccaaataacctcactttcccttctctgattaaagcagcttgctcatctttctctgtttcttatggcgttgccttacatggccaagctcttaaacggggttttctatgggatccatttgttcagacttcttttgtccggttctatggtgaagttggtgatttggagagctcgaggaagatgtttgatgatattttaaacccttgtgttgtagcttgtaacagtttgcttgacgcttgtggaagaaacggagagatggattatgctttcgagtattttcagagaatgcctgtaactgatgtggtctcttggaccactgttatcaacgggtttagtaagaaagggttacacgccaaagctttaatggtttttggtgagatgatacagaatgagcgtgcggtaataacacctaacgaggctactttcgtaagtgtactttcttcatgtgctaattttgatcaaggaggtattcgactggggaagcagattcatggatatgttatgagtaaagagatcattcttactacaactttgggtactgctttgcttgatatgtatggaaaagccggtgacttggagatggcattgaccatttttgatcaaattcgtgataagaaagtttgcgcttggaatgcgataatatcagctcttgcctccaatggtagacctaagcaagcgctggagatgtttgagatgatgaaatcaagctatgtgcatccgaatgggatcactttacttgcaatactcacggcttgtgctcgatctaaacttgtggatttaggtattcagttgttctcttctatatgtagcgagtacaagatcattccaacatcagaacattacggttgcgttgttgatctcattggcagagctggactattggttgacgcagccaatttcattcaaagtttgcccttcgagcctgatgcttctgttctcggagctcttttgggcgcttgcaagattcatgagaatactgaattaggaaatacagtaggtaaacagcttattggactgcaacctcaacactgtggccagtatgtggcattgtcgacgttcaatgctttggatagcaattggtcagaagcagaaaaaatgaggaaagccatgatagaagctggaattcggaaaatccctgcttacagtgtgctgacttaaagcttgagacgtgagaatagattgtttcagacaagagttactgtctagtgtaatctctgttctgttctgttcatgttatgtccgtaacattgatctaatttagttctgtgaatctcttgctcctttaggttcatgtttagggtttgcagtaatctcatgagccgaacaataggagaaagcaaacgagacatttcactcactgacttgaagaacaaaacaatgtctctttttacaagataacacagttcctaagaaagacttaatccaacactttacacatacacaattacacaggttacagggaaattagaaaaccagtttttcttaataggtgaaatagcctgattttccggagacggctaaatctgaactggttcttgcaaaggaaggtatattatcccctacacgattcatcttcttaaaccaatgaccgatggtctcaactccgagatagaaaaagagtacggtcaacgctccaccagcaacggctacaattgctggaaataaccattgtgttccatgataatgcggtatggtcacccaagacgccgctatataagccgtcgccatgaaacctacagaaacccacatcatcctatgcgtggccaccaataatctctttaagggtttcctcttgtaaggtatgatgctaacaagaagaataacgatgcccaaggacgtgaacagtgcgatgttgttgcatatcgcaaagaccttaaacgccgttgttttccccactaaggatttccctctccatggcccgtcttggtagacgccccccggagggtttatcccaccggcataagcaactgaagcaatcaagactgccactatagcaatcgtatttcttgcattctgtaatgcttctatatgcatctgatattccaagttctgacgacctctttccacttcctgttccttgcttctctttctctctgctatctctgatgtgtttattcctataatccttagcaaccgtattacctcgacctcttgagagccttcgtgttgttctacattgttctcagaatccagctcttgtgaagtctcggtaccaaatctcagccaccttgataacaactcaaagtcttgggcttctcgagggagaagttgaaaagcttcaaaacccatcttgttcttggacgtgatatctactatattcttaccaacaatgtaacgtataagctgcaatttattcagtaaatatgtgagaagaaataccactaaaagaattatgagaagaaacaccactaataaatagaatatgtgccatcttttagtaatgtaatcctaacatagagtacatgggaagtcaaattttgtaactaaaaatttaaaggagagagcgtcacagaaaactactcacaggagcatcaaaagagacggatgcagcaatatgtaagacagtgttgccactttcatcggtttgctgtagaagaatttggctgttaattcccaaactctctgccataaaaacaaaggcatccatatttttgtttcgagcagcgagatgaaagactgtctctttcgacggcgtgattgagctgaaagacaatggaaccttgtccaagaactcctccaggatcacaaccgagcctctgaggaccgcaagatgcagaggtgataaaccattggggttaagtgcttcttctaatccttgatcgagccctaacaatatagttgtcagttcaaagtctcccttatcacacgcatgatgcagtagcgttgattgtgagccgtcttcaaccacccaagcttcttccctagctaggtctgggaatctctccagtatagtccctacgatacctgctcaaggatccaaacacagtagtagtgagctagtgatttttacacaagattacgaaaaatgttgagcgcgcactagaaaaacttactagtggatccacttgatatggcgagaatgagttcaccgaggccaattgattgtgtcttttccgcgatgagtctggcagcctctatggaattgctacggcaagccaagtggagtggtgtgtggttgttgatattgcgtgcagaacacacttccaatccagtctctaacatctgcataactatgtttacatctccaaggatagcagcaagatgcaaaggtgtgtttctgtatgcgttgcgggaagacacgagggaaggtcggagctcaataatcttggagacgagttctcggtgaccaaactttgcagccatgtgcaaaaccgtgttgttcaagtgttcttcctcgtttctctcctccagagacgattcactatcttctaccaactctaaaaaagctggaaggtcatttttaaggatcgcatggaagatcggctgcatcttttctcaagaaatctagagcaaagtatggaagttcttactctgggagggagatttcaagtggttatatctttttatgatgactcaaatagaccatgtatatgtgttttcagtatctttgacattttggcttatggtattttcttcttcttttccaatttgtatttattctatcactcattgtaatcttgaaacttttatattcgttgacttcgtaagcagaagacttagacaccattcatacgcttacaaactaaaacgcaggttcctctctctttctttcacgcgcaattatttagtttttccacaagaaaataattacatttcattagcaaaattgtgtgaactcatcttcatacacttgaagataagaggtgacgtactcgtaaagacatgacaggactaggactaaaaataaaaactctggataattcgaaggcaatggatatatcaactcaagagtcaactggcccataggcaccttttcattatcttttcctgtcacgactgagtcagagcctattgaacaaatgttacggtaacaacatgtaagggcgttaatgttgtgtcagtaaatttcggtcaaatcacttctgttgaatctcttgcttctccgttcgcaatattctcatgagctgaacaaatatgagaaagcaaacgagatatttcactcactaatttgaagaacaaaacaggaatctcaacgtctctcctttacaaggctacacagtttccagaaaagacgtaacccaacagatagacatacttcactgtatatacagggccttgggaaaccagaatacgtaacacaagagcatcgccacaaaaccaactcacaccaagaaaacttctcgcttctatctttgcttttcactactcatacagagtcaaataggccaagttctacctcaaaacgatatgttctgtgtgtggcagccattattagatcccgcatatccagtcttattcgatttgggttttcttgtttttcttataacacaagtttacaaaggaaaaacgtaaatgtatgtacactcaaatgactagcaacttcctgtggaatccgttgttaaagaagatcaatagcttacttgaaaactaaacgtcaactcatcagcttccaccaagaactctcttgaggtcattcttctgttctgacgttagccttgacgggaacaagatttcaaaggtaactctaaggtctcctctcttcaaagggtctttagtaggcattccctcattcgggatcacaatctcctgacccggttttacgatatccagcaccgggatagttaggctcctcccgtctagagtcgttacgctaatggtgagaccggttaaagcatctataagagagactttcttctcgagaatcagatcgttaccgtctctcttgaataccgaatgcggtttctcgtcaaccacgaatataagatccgcaggagtgacaccaggttcttggttgcctttctctggaaaagtgatctttgtgcctttcttccaacctggttttatgtctatcttcaatatctcttggactgtctttggctttctgtaacacagattttatcagaaggtcataatcaaagctcattttgtttcaccagaagctcaatcacagagaaaacaacagttctagagaacctaatagctacaaaatcttattgtgaagatcatatgggcaaatggcataacctaatcattcactataatcaaaggaataaattgaccaatggcattcacgagatcaggatcatgagaaactaacccaaaatcatcaggaacaacgcgagaaattcgcatcttcttctttgcacctttgtagagctcctccaatgtgcaagccaatttactctcaatagccggagccttcctattcgccggcggcgtcgtttttttgttcgtcggcggcgtctttctattagcctggctccctgcttctgcacttttaaatctccgaccgccaccatcaccgccatctccacgtgtccttccgctactccctccgccaaaagcatcaccggattcgccgaaaaactcagcaaagatatcttcagcatcacgcggataataccgaaactcagagttgctagaagagtagctccgctgctgctgatgcgccgccgtctccgccgcagtaggtaaatcggtggatttaagaccttcttctccgtactgatcgtagatctgacgtctctgaggatcgctcaagacgtcgtaagcttcagagatctgcttgaacttagcttcagcttctttcttgctcgtagggtttttgtcagggtgccatttcatagccattcgccggtaagacttcttcagatcatcttcgttagcatttcgattcactttcagaacattgtagtaatccacccccatttgatccaaatctttcaccaaaccaaacaaaaaaaaagtcaaaaccagaaaatcgagagaatcttcagctgtaatcgaaattttgaagagaagcttgagatttcaaagagattgcagaagagaaaaaaggaatcggattcgagatattttgccagtaaaatctgaaattggaagagagaaaaaggaaacgaagagtggagtgcgtgtaaggtagaagaagaacatgacaaaggagaatgagaaaattgttcttaatggagccacgtggcatttattattactttatctttaacttcatctttgtggtgaatggtaaaaaatttgatcactatcattttcatatccccctctttttttattagacaaaaattctcttgattgcttaatcagaagttacatattgggacaaatttggatgtatttttttaattaatgaaacagaaacaaacatttttagtttcgtacttaaagttaaacaagaaagaattattactttatttagccgacaaaaaaaacagatacaataattaaaccgatcgaccaaaccacttatattaatctagagaattagagtattaaattagtaattgtgtatatcaatcttggaaatgcacagactggataccaagttaaagtttggtgagaacatcacctaagtgattttggtaattcacaaaaagaaaggttatggcaaatcacaaagagcatggtttcgataatcaatgtttatatgtttggtacactcatgtaaaatttgatctgaggtaatatggattacaatattttcataactccaagattatgaacgaatatgcaaaagacataaaaaaaatatttggctgtgcttattatataacttacatcctagtaatccagtttatgcttgccgcttaggaaagagcttccttgcgaattcagcgagctttgtaatctcgggcattataggtttcacagcgggatcatcacagaaccgctctgcccatttgactagagagggagttttggtctcatcaagaaatttatgattggcatccaactcgacgactctccaccaacctaagaagctccccaaggcaatgtcgaggtaaccgatatggtcaccgttgaagaacggttttccttggctacaatcgttgaatgctttctccagaagcttggtcctttcttcaacttgagctatggctgctttcttctcttcgtctccttgagctgttaggatacttctcacagagataaaccacttccattcatatcaaatttaagtcagaacatataagatttaagatttacttgattatgtcatatatagtaaggaagataaacaaaatgtctaatttctttcaacataaaagttgactaattacctaactatccgtataaactagaaattaaagttagttgaagctggactatagtcaaaccctatccggtttaaatcggtcatatcgtgttattctagattattaaccggattaaaccaataacaatcataaaagaaccgctaaagttttggggatgtatcaaaattaaagcaatcaaaaccaaatcaatccctcattaattcccggtatactttattacatgcaatcaaagtgaaaagagcaagtgaagaacaatctatgaacctgatcgtctatgtaggcagcccaaaaccgagcaatggcccggtcgtatggatgggacgggagaatggaaggtccagaagagttccaagcctcgtcgatataatgaacgatgatgttggactcgcacaccggtttgtcagcgtgaatcagaaccggcatcttcttgtgaaccgggtttgatttgaggagcaattcgctctttgaaccatacgtctcctgaaggaattcgtagctaatagatttgaggtggagagcgatcctcgccctcatgacgtaaacactcgcccatgagccgatcagcttcacgtcctcggtcgccattttatcccggagattaagaaccgactcgaagagagagggaagcttgcgggttaagaagatcgtatgaaagcttaagagggtaggtttccattagagggtttaggtaacggataatgaagatatacgaattaaatttcgacacgtggtacagccttgtaaacgagtggtgagaaattgaagtgtggccaacaatgaaacgattaaatcctggcaataggaccaattcacgtgattgttgattcttctaggaattagcgagttagatatatacaataattaaaaaaaaatacttctcaatcaacataacctaaataaaatcattcaccaaacctgatacatacgtaacgtttaacgtacgcctgattaaaactcacacacaaagataaagccatctaaaaacaataacactcttaatttattcttgcaagaacccaacccacaaatacaaaacctagtccaccaacaacttaggcctgcggcttaggaaagatcttctttgcgaattcagcaagctttgcagtctcgggcatgacaggttttacagcgggatcattacagaaattctcagcccatttggacaaagaaggtgtcttggcctcatcaagaattttatagctgactgctaactcggtgactctcaaccaagccaagaagcacccgagagcaatgtcgagtaaccgatgttgtcaccgttgaagaacggttttcctttgctgcaatcaatgaacgccttctccagaaacgcattcccttcttctagttgagctatcacagctttcttctcttcttctcctccggcttttaggaaacctcttagagcgacaaaccacttcattcatgttgatcaatgtccaacattgaaaaataaagatcagtttatgtcttaagtcttaacattgtaattaatgaaactaacatattttcctgagttgtttatatttacatttgcgtttccattcacatacttattttagaccacaaaatgctatgttttgcgtatatatattaactagtaaccacaaaagcacttaagacaactatttgctttgcaaaaactctgcactatagataaaaatttatttgttgcgaacaaaccttaattaataaaatcttgatgagcaagtgaaagaagaaaagaagaataccttttcgtcgatgtaagcagcccagaaccgagccatggcccgatcgtaaggatcggaagggagaatggacggtccagatgagctccaagtgtcatcgatatactcaacgatgatgttggactcactcaccggtttatcagcatgaagcagaaccgggatcttcttgtgaaccgggtttgatttaagaagcaactcgctcttagacccaaacgtctcttggaggaactcgtaggggacagacttgaggtttagagcaatcctcggcctcatcacaaagggactcgcccatgcaccgatcagcttcacgtcgctgcttgccattttctcttcaaaatccaaaacagaggattggtgcgtctgaatgtgagagtggaaatgtaatgttttgacacgttgaagcgtttttatgttagatcggtgtattgttacttattatatggaagggaagagggtaggtgaatttgatggcggtgatagatagcgaagaattgccaattataggttgacacgtgtattaaacgggtgggaaaacgttattagtctttattgtggtcgacgagacggcatttctttatatgcgtggcaacaattgaaaccataaaaactccggcagcttcacttagcttgtttaaatttgtatttcatgtttaagaaatttgtatatattattagtactataagttaatatctttgttttaacgagtaacgatgtgatgtttatttgggtttgtttttggcagctaatcaagtgatataaaaccaaagaagtgaaaccactaaatgataattacatatcagggaagacaaacacaaatccacctaaaaaacaaacatgtcatgcatcacaggaccacacgaaatgtgaacattgaattgcagtcacgaaaaaccgcaaaaaaaatattcgtctcagttttgttttgtttgttttcatacgctcattgtttccactcacattttcttaacattaataaaatggtataagtacggctatcatttaaatgtacaaatggattacatgtcggcccctagcgggaaaaaatacaggcccaaaatgatttgaaacttccttgataaagaaaaaacaaacaagatgagaacacttcataagaaagaggtcatacatatcttttagtcattttatcagtatgaaaatgtggtaattagttaagttgttgattctttcaaatcctgagatatactatgattttgaaattatgagttttatgtgacttcagattctggaatattgctgtaaagtttgggtggatgtataatcccttttttatgttcctttcatttctcactagcccattcttataattcaagttttattttcttgatttccaaacacgcaagattgacataattatacaaagttactcttattatatgttatatattccaatgttacattccgaggatggtgtcgctagttattcaagttttacaactttgtttattttggaattagtaatgtgttacaacttacaaaacaaaaatagaatcaattattttgtctcattgcagaatttatttgccggtcgcatctcttttaattattttttctttcttatttttataagagaagcgtcttttcttttgtgtcaacattttaaataaacaccaattatcttatatatacatataaaaagataaattgatcggcttccagaacaatctcatgagaagaataccaattagaataatacctttgcaagatgcattatatattcactagttataattacagatttacattattatacaatgaattaaaaacaaattaaagttgagaattattgaacaactttagcctttaggtttctttactatattctcttgaatctaattcccttatcttgcccgtttccttggttgggtggggacttttagtatgagtgggcacttaacattagtgatgtttttgcaatattattttgtcttctaggccttatttcctggtgagtttgggacacctaaaggcacattttgtctaaataatatactgtgttaaataaacttttatatgcccatacttttcattttgtttataaattttatcattcttatcacttattactcaaagagcctactacaccatcaatttcacaaactttggtcgaataatattctagttaaagaagattgttacaagaacacgcgagtgagaaatattatatccgatccagatcaaaagattactcaaagagccaacataactatctttatccaaatttgcaataacaatatgtagcttaatgggacatttgcattgcccaaactttgaatgccataaactaatataatattaccaattatatgttgtattaattttatataaatcatctccagatatatttttcccaataaaattgttcgtgtatataatcaagcctattattatatgatatatggaattctaatgttatgtgttgtatattattttctatgtttggttttgcacattatctaatgttgtaatccgtcatatgatggtatgtatagataatagacccaaccaaaagaatctaggatttaacaacaacaaaaaaagtaaaaaactatatataaactaatttatattcttatattgacaaaaataaacgcctatgttttgcatataaatgtacattcacatatgcaatttagtatcccgcttagcattgcatctatattaggttacattcactcacacaattcatatatacttcacatcttttctttcacactttccctgaaaggtctagcaaatgagtttgaagcgttcttcttcttctttctttatctttctcttttccttcttcttcctctcttctcatgtctcctcacaagcctgccaaaaaacatgcggccaaatacccatcaagtacccgctcggaaccgggtcaggttgcggtgacccacgtttcacacgttacatcacgtgtgaccctgaccaacagactttgacgctcaccacccacacaggcagttaccctatcacttctgtcgactacgccaaacaagagatctacgtcactgatccgtccatgtctacgtgtgcatgtacccgacccagccatggattcgggttggattgggacgctccgttttctttccatgacgacaccgtttttacgctccttgactgttccgtagacgaatcccctgtattcacaccgttaagtaacggtagcggacgtgtttccctctgtgatcgtcaaagctcctccatttgcaccttcttgtactcaaattgcaggtaacccaaaattcaaattcaaatcgaaataaattaaaccggctactattctatctaaaccgaaataataaccgtatcaatttctcatttgttctggtgatcacattttaatatttccacacaaaaatttgaaatgggtgaaaaatgtaaatatcatctttcggaaagagttataaagttggtgtaacaagaccaatctgaattatatggaaccggtttacttttggatttgtgtcatctaaagctttacttaattaatccggttataatttccggtttggcagggccataagcctcataaacctccaagtatcaacgtgttgcgtctacgtgcctctagacctcggaccatcgttcgaaatggatttgaacaaactcaagtgctcgtcatactccggcttctacaacctcggtccaggccaagaatcccacccggagaattggaactacggaatcgcactcaagtacaagttcaacgtttttgatgagtaccctggcgtctgcggtagctgcgagcgtagtaacggtgcttgtggcttcaacacacagtcaagctcgttcgtttgtaactgtcccggtgggattaacacgacatcggattgcttcttcctttataactctgcttctattcttgttccttggttctcaagtaagcaccactctcacacttctactatatctagtcaaattattaatttatattgaacaccacactgtctcatagataatcttgtctcagctataacttattacttctcaattgaattttcagacaaaaaacttttacattttttattagtatttaacagtatatagatttgtcttacagagagtggttttttttataagcaggagaatgggtaatgtaccctttgtcatggtttgttgtttggatggtgatggttctgcgttaaaggagcatcaaaggatggagtggttcaaagaggaagcttaatagatcgaatctttgcttcttctttttataactttgtgatatcacagtatgagattcttcgatattgcttctctctttgcaatattattcaaatcaccatttatcttatttgcttttcctccactttccagctcataaggaatcaccatactatattaatgctaaacacttgcaaagaatcataatgatgatgatggtattagtcaactcgctgagactatatacttcaatatctatataacatgaaactaaaaattacttacctatggattgcaaatacaataacaaagctttaccgtttttgagatagtgtaaaatttatcaaacagggatcttaacctataatatatttcactcgtcttgttaaaatttggacccaaaaattgcaaaatatattatttactgtaaactatagactatacactatagtattagtattgccatgagctcatggattagaagattttacttaagaggttcagtccggtttacaattgtacaatcatccaaaaaatcaattggtgtcatcttatcacaagaaaaattgattgtcattgcatttttaaaatcactatttattaataatatcaatcaataaaaattactaaaagtaaagaaaaaacctagaaaatcaatttttgtggaacaaacaaaaaacctaaaacaccaatttttttaggaacaaatacaaacggagtaataaataggaattagggtttgtaacaaagggtgagaaatgaacttaccttcgttttgcatacccattgctgtgttctcgttgttgatgccattttgcatccccatgaactaacaactagaactgatttgctttaaaaaagaatccaataataaaagattaccaagtagtgattgttcttaaataaatgtggcccagagaggcccagtaatggcaaggacgtggaagcaatttcccagagtcaaggagtctatatctctctcgctggccttgctgtacccaaatttgccgccttgtccttcgcattttccaacctcctctgttttcatcattcaatttctctattgctttctggatctggaattttttttgaaaatggaagcgagagaaagaggatcaatgtcgtctagcatcggcaattccgctgaactcgaagggaatctgacacttagtgatcgtcttaaggttttcaaaggctcaactttcgatcccgacgcttatgtcacctccaaatgtcaacgtatgaacgaaaaggtcttcttcctcctcctcatctccgcattattatcatgtgtttgtacattgtgtcatcttgttgaatcagctcgatattgttgttggtgtgttttcgtttacaggagacaaggcatttgtcttcttacctcgttgaattgaagaaagcttctgcagaggagatgcgtaagagcgtctacgcaaactacgctgcctttatacggtgtgtgtgtgtgtgttatctttttaattatcgttatttgttgttagttagtttcttcatgcatgttacttgttgttgatgatgtgcatgcagaacatctaaggagatttcagctcttgaaggacaacttctttctatgagaaaccttctctctgctcaagcagctcttgttcacggtttagctgatggtgttcacattagttccttatgcgctgatgacgctgacgacttaagagacgaagacttgtacgatatggataacaaacagctgtcgaatattgagaattgggttgtggagtttttcgatagacttgaagttctcttagctgagaagagagttgaggaatccatggctgcgttagaagaagggcgtcgtgtggccgtagaagcacatgagaaacggactctcagtcccaccactcttctttctctgaacaatgcaatcaaagaaaagagacaagagttggctgatcaattggcagaagctattagccaaccttctacaagaggaggtgagcttagatcagctgttttgtctctcaagaaactcggggacggttctcgcgcacacaccttgcttcttaggtcttacgagcggaggctacaagccaacattcaaagccttagagcttctaacacttcttatggggtagcatttgctgctgctctctctcaacttgttttctcaacgattgctcaagctgcgagcgactctcaagcagttgttggagaggatccggcctatacatcagagcttgtgacatgggcggttaaacaagcagagtcgtttgctcttttgctgaaaagacatactttggcttcatctgctgctgcaggaagcttaagggtaaccgcagagtgtgtccaactctgcgcatcacactgctcttcattggagtctcgcggtttagctctttcccctgttttgttgaaacactttaggccgggcgtggaacaagcactgactggaaatctcaagagaatcgaacaaagcagtgcggctttagctgcttcggatgattggtcactctcttatacaccaacaggatcacgcgcctcatcaactactcccactgcaccacatctcaagctttctataagcgctcaaagattcaattccatggttcaggtaatcaacatttctcacacaatcatatttgctacttgagtttatatttttccttgctataagtttattgtttctgtggaactttaggaatttctagaggatgctggaccgctggatgaagcattacagttagacgggattgcactagacggtgttttgcaagtgtttaactcatacgttgatctcttgatcaacgcattgcccggttcagctgaaaacgaagagaatccagttcatagaatagttaaagtagctgaaactgagtcccaacaaacggctttgttagtcaatgcgcttcttttagcagacgagctaattccacgttctgcttcaaggattttgccacaaggtacgagccaatccactccaagaagaggttcctcagataggcagaaccgaccagagcaaagagaatggaagaagaagcttcaaagatcagtggatcgactaagagatagcttctgcagacaacatgcacttgaactcatcttcactgaagaaggagaagtccgtctcagctctgagatttatatcctcatggacgaaaccactgaagagcctgaatggttcccttcaccaattttccaggaactgtttgcgaaattgacgaggatagccatgattgtgagcgatatgtttgtggggagagagagattcgcgacgatattgctgatgagactgacggagacagtgattctttggatatctgatgatcagagtttctgggaagagatggagacaggagataaaccattaggtccacttggtcttcaacagttttacctggacatggagttcgtgatgatctttgcctcgcaaggaaggtacttgtcgagaaaccttcatcaagtgatcaagaacataatagctcgagccgtcgaagcagtttcagccactggactcgacccttataggtacgtatttattatccgttacaaacataaacatacgtatgtatgatggtttgatgatgatgatgatgatggatgatgaaacagtacgttgccggaggaagagtggtttgcggaagtagctcagatagcgataaagatgttgatgggaaaaggcaacttcggtggccacggagagcgtgacgttactagcccctctgtttcctctgctaaatcttacaccagtaattgactaatctaataattctataattaattaaggacttttgtttgttatcgtagaattatagtttctttacatcgcttaatgtatgattttttattagtattatatatttccaattatattaaaatagagaacataaagcaaccaaagattttctctcttttttaaaaaagaaaacaccatggttttcatctgaaaatgttttacacaatggattagtattaactaataactaaataagatattaacaaaatattttaaagaactctgctatatagagagataggggggaaaacatgagcttttctgtaaaactttaaaattcaaagttggattaagattatcccaaaaaaatccgactttatctccttccttgagctgcctatcaaagacgataagaagccattcaaggttcaagaaatagcccacctcatcataattaatagtaatgtcataagttttctctgtatcccaatcataaagtttcactaccacgcatttgttaacgtcaaacttgtagcaccatctctcgattatttcttcttgcgcctctttcgttggtaatctaattatatacggtgtttcttccactttcaccgtcgttgttatgacccatgattcgtactgagccagtcgcagttccgtagcgattttttttaggcattttcttgtttttttgtaacgagaggggtatatggcttgatgaattgaagctcaaggtctcacatattattttataatgttgggtttgggagatagaggtctgtatttgtgttataaaatcaggattgcatgcatgaacaattcattaatacagcaaaagaagatgaatgtatataaatttaatttaaagaaagacttatgatgttttagcatcttaattatttatagttttataatgcttagattgcatatgtacattaattagaagatctataattctttatagcttaacaggcttagattccatgtaatatattaatattatcacacacatgcaaaagttgatgcttcgatggtattgttgtcacttgaatacaacacaaattcttagctattacgttacggatgttcaataacttgttatgcaagaaacataactaaggcaagtttcacttttttgcttttggcaactgttactctactcgagtgaatatgtaaaagaaaaagaaaaaaaagaagcatcgatcgttcaaatagattaacagataccattaggttccattacacaatacacaccgtgataccgaacccccaaaaaaggagacaattataaggaagcaagagaaaaactatgagaaaaaaggtatagaaagaaacacacaacaaaggagtagagcactatttgctactgcacaattccaacattcactacacaaaacagatgagttccaagagagtaaccctgagatgcctaaactccatcttcttcatcttcgtcgcccagcttatacgaactaaaatgctcgacccgaaacttccattcgcctttcactggatcaaatgacacaaactcagctccttgtgcctcagctttcttcttaagcatcatcttatacttctccactctctctccttcagtaaactgtttccctgtcttcttgtcaatacattttatgttcagcaacgttacttccgccggtttattcaaaccttgcccaacagccggtttcttgctctcgtccatgtatacaatcacttcccgtgtattgaactgaaccagtgattccaagtctagcctacgcacatctgtctctcccatgaactttatgctaccataaccgtgtcgtcccactacaaagtctcttacccgcctgcagtaacccggatccgctctttccttagctgctagttcttggatacgtggctctgtgaaataatcagattgtcgtagcttcggcataagagcctcgatatctgcaccgtgctcataaacaattgcggcttctcctgctctgtgtccacttagagttttgtagggacgctctttctcgctagcctgatctgagcgtgttgtgccattcggtttctgatttgcattgactgatgtatgaattctttccccagtagcaccaagttctccgttaccatttcctgtgaatattgtctctcaagtcagtccgagaatttccacacatagaaaaacgtaaccaaacttttctaatattttatttactcactgtcatggtttgctgcatcagtggccatgtcgggactcttccctgaaattttacgattaatattgtcaaaaagagacaggaatggtttacccaagtacctagcacctcattagcgtaatcatttcgcatagtccttctcacacgcagagtaatcaagtttcaaaataaaaaccacgcatgaacaagaaaaggtgctctgatgagagtaaaaaagggtaggtattgaaaattccaacttaaaagtgctagtctaagatttgaatgctgccatctctatggaaataaattgtaggagagagactcaaaaagctttatctatattgaaaacttaaagaaccactgcaagccatgcaataagcaaagaatagaaaaaaggaagcttaccattgtcatgtaatggagcagtcgggcgttgttcctttggaagtattgatttatcccttgaagaccactgttgaactgggcgtataactagagctctagggttctcccttggaatgaaaagagcatccgcctttggtgtacttgagctctcttcgtcatcagtgaaaaatggaacctacaaagaacattttaagatttaaacatatagaacgaacctcagcaccaagagtttagattgagtaaaataaatgtgattatatattcacaagaacgaagcattgcctttggaccattctcgccaggacggtactttcttgccggcagcctgacccgcctgtgtaataggtgtcgagaagtcaggagagatgatattctaacaggagcaggtttgtcaacaacctgacaggaaaaagaaaatgatttagaaccaattaataatcaagtaatcaactacttctatttattatgaatagtaacaagcttcaagatgcatgtgggagaactgaatgtctaacatagggtattattagagggaacagctatacggagactatatctaaatctggataaaaagaacaatgcaccgtatgggagttgcagaaggaagagcaggcttacaggcatgctggagattccatattgaatggaaggtgaatttccaccttgatttattgaaatctgaggcatagcaggaagtgttccaaatgggtttgtcacagcaactggttgcaaaacaacagagttcagcggagcaggcctgtcaaaaaaataaaacgatgaagctaaaataacacaacttccataaaatgaaacccataaaataaactatcaaaaaagagcggaaataaaagtcttggaagcagaaacgccatacgattgcccgaagttgccttgaccaaaaatccccagtccaccagcatttccagtagtattagctttagaccatgaatatagaagagttagcatctagaaataagatgataatgtcagtgacttggtcgagcgacgtacctgcttgattttgaccgaagttgttgaaaccaaaaccatttgatgcttgacctggctgagctgattgaaagggtgtcacaccagcaggctacagaaataatgcgagatttgaaggccaaaattagaaaagaaggaaactaggtgccggtgtcatttaagagatgcaaaagaactgcaaactatgaagagaacaggcatcaccaaaagaaatgaaaaaaaaaaaaaaaacgaagtgcttaggcttaatagcgaatgtgaaaatcaccattgtttgtccaaagggagagctgctagacgtggttaatgttgaagaactggaaaacatgtttccaaatccagtggaaggtttattaaaaatgctattttggccaaatgcaggagcactactctgtccgaactgtccaaaagcagaaccagtctgtccaaacgcagaaccagtctgcccggtcgaaggggttgaattgaacagagtagatggctgactgttgccaaatgctggagttgccccctgaccaggagctgaaccaaagattgatgaagaagagccaaatccaggagtgcttgatgaaccaaataacggtgatggtgtcgttgttccaaaagcggaggatgatccaaaaacggatgtggtagttgatgaacctgaaccaaaaagattggaagaagatgttacaccaaagggcgaggaaccaaaatttgaggtagccgttccaaaactcgaactagcaattgttggggtttgaggggcaaaagggttggtagatgttgagctcgaaaaagggtttgttggatttgctgatgtctgaccaaacgccggtgatggagaaaatggatttggttgagaaggtgatataccaaatccggcattgccaggagactggccagcaggaagtggtccacctgagaattgaagagtacgagaatcaagatttagttaaataaggcacaggaatgtagccttaagcagatgtagtacaagatttgtttgatcaggtgtacctttatctcctcgctggtaatcttcccacctcagctcctcatagtttttctctttgtatgctggcatggcagaaatagattccaactttccagcaggctgagtgccggtccctgtgtctgcctcaacagttggtgcataaggcacagctcgactgcccccttgttgaccaccgaaagttgattgaccaaaaccagaacccccaaatgtaggggttgaagcctgcgcacctgcaaaacaaatcatgcaaacatatttcgtcacccctttattcaaatgagcaacacaccaattagcagttataatattgtacagaatgggaaatgctaaaggaagaaccttgacctccaaagggagatggtgtagagccaaaggcgctgctaccaaaggctgatgtagactggccaaaagctggagacgagccaaaactaaaggatgaggtatttgacgcaccaaaagaaggagtactagatcccccaaaggcaggagtactggatgccccaaaggcaggagtactggatgccccaaaggcaggagtacttgatgcaccgaaggcaggagtgcctgatgcaccaaaagccggagtgcctgatgcaccaaaagcaggggtgtttgaagctccaaaagcacctccagaaccaaagccagtgttaccaaacgtggtgccagtgctaccaaaagctggagtcggtgacgcgccaaatgcaggtgtgtttgtggcgccaaaggagggagagtttgaggcaccgaaggcaggcgtgtttgtggcaccaaaggcaggcgtgcttgatgcaccaaacgagggtgtgcttgtggcgccaaaagaaggcgtgcttggagcgccaaaggcaggcgtgttagtggcaccaaaaggtgtagacgaaccaaaagaggtgtttccaaatgcaggttgggattgctgcgtggagtttccaaaaggatttgactgaggcgttgaaaatcccaaaggtttctgcccaaaaccagaagatcctaaaaaggaaacaaataaaattagcttaatcaccaaatgcaaatgtaaaactgttaaacagggcttattcttaaacccttgtcctaccaaagacataaaatatattcatacccaggagaagcaataaatcaatgaggcaactaacaaaccatgcaatgaaatccataaaaggtacttaccaccaaaaggtgaagatgctggagatgctccaaaggccggagtagaattcccaaatgctggtgatgaagaagctccaaaagttggggtggaggcaaagggagaggatgtttgaggtgcaccaaaaacaccggttgaagtgcttccgaatattgaacttcccgactgtgcagcaaaaggagcagacgtgccaaacggtgtagctggagcaaagggattattactacttgtattgctggtctgaccaaacaaagattgagacccaaatgggctggtaccagatgactgtccaaaagctataagaacaatgtttcagaaggtcaattttctttagaagtatatacaaaagaaataaatagcataaaactataaaacaataacgaaatatttggcttcggaaaccaacaagtaagaataagataggattacttacgattagatgagccaaacatcttcctctgtagtttgacaacggatggccaagccaaaagaaattatattatcctgtagctggaaaaaagaacaatgattaggagaagataacaacagaaccaaatgcacataagcagcaccataccggtaaaagctggttttaaaaattcaaacacaataaacatccgtaaattatactatgaattcaacatcaacttaagaagttggttcctgcgctacagagagtagtagacaaaggacctagaaagtgtattgtaagcaggtatgactgagagaaagagagatgaggaacctaacgaacctctaaaaccattgaactaagcaacatcacaactagaaatcatcgggaactcagaaattgaatatgcaaaatgaatataaaacttgagcaaatccagcaataaaatcaaagctggaactaatcgaaatgaaactcgaagaaatacctatgaatccgatgtcaaaaagagaagaacaaggacacacgttcttcgaccaatcagatatgatatcaaaggactctcaagagaccaagagcggaagctccgatcgtcgaaattatctgcgtggaggaaattagggttcaggagtgaaatcgccgagaaacgaataggcggcgtggaatcaaatgtggagcaagaagatgtaggagaaatggaacctgaaaacgacgagctcgatctgaaaagcgactagaagatggagcaatttcgccggaatcgaaagcgcgacggttgcaacttgcaaagagcgaacgattggccctttttgttggtatgatatgatgacttctctcttcctgcttgcgtgtttaattgctgaatttagggcatcttcacggtaaaagtgatagaaagtatctcaaaaaaaaaaaaattaatccaatcaatatattttccgaatggtgcagttcaaataataacgaaaatacatagatacatatgtatatgtaaagattttgatactgttacagcactgttgcggtgcgattttggatgcggttttagtcatcatttacagcttcagttcgaagaaaataaatcactggttaaatgacaactgtcaataaatgctgagaatcgtttctcctgtgaaaaacgttcatccacttttttctctttctctctaatttattttcttttttattattatttaattgataagtatctcattcacatactccgatggaaatggtctcacttttaggaaatacagtaaattttgcttatttactttcaaccattgtaatagagagtttaaaatgctttgtttccaacgttaattttgtctcaatactacaacaatgctttggtttgtaatagacccatattttgggcctgtattaggcccatatatattaataagtgcactttttgaacctgacgacatatcacaaaactccaagctcgaaacatggattcgaatccaagctcaaattagtttaacattatacaagtttcgaaatacaggctcaaatatatgtttctgatagcaactttgaaatatatcctgctatattatttgggaagtacattttaaatgtaactttaatttttgtaattaattacatgataatgtcattagaaaaatttaaccaaaaacaaaattttttattgacgtcattaaggttaccagaatcatttaaagacaatattcatctcttacctatatggcttattggatctaaagacgggtcatcaaagatttcctaaactaaagcaaaatatactgaatattcaaatatctctctgttaccaaattataaacaaataagttcgtaaaacaatttaatattttatatacgaaatcaattaaatcttaatcacataaaaattagcacaaaaaagtatttaacaattaaaaaattatataatctctgtgttatataagttttgatattatattcgaataaagtgtaatataccttttcaatttgtattctttaaataatttaagctaactaatatatttgctaatcttatactatcaaaaccgactattgtttcttatctctataatatttttacaagacttttttggtagatttaggtaaaagtgcattcaggtcatatggtacattcccctattaaataaatatggtgcactcctatgttattagctaaaatgtttatattataattcagagtcatatcataaataaaattaatattaataaaataaatggctgtttggcaagacggatttggagggacgggtttttgaatcaacattaataaaaaagtaaaatataattaatccaccgtttcaatacggaataaatctttaatttattattttttagaccactaatattaaatatatcaaatcatcctaatttagaaaagattatataaaaccaaaaatgttatgtggtatgtataatgttactatatataaaattaaactataaaatataaatgtattagagaatgatacaatttgcaaaacttttatatataataaataattcttcaattttaaaaactactactttaaaaaaaatcacgggacgggtaaaaaaattacagaacaggttttattttggaattgggttatatggtagatgtatttgaataaatatttataaaattttaaaatattattaatatgctgttttaataggggttaaaacttcagttttttaacaattgtctcatggatttatggtatagcgttactttataacaattttaaattgtaaaatataaatattaataataaaatttgcaaattttaatatatattactttaaaaaataaatcgtcccgcgatataccgcgggttaaaatctagtattaatatataggtgttaacatacatcatcatgttccattgttacaaaactcgttgataaggttgtctaaattcttcctagacgaaccaataccttcctccaaagccttcttcgccatcttaccatatgcctcgacattcctcctcagctctttccctttctctccctccatcaactccttcactttctctgcaatctcttctcttctcacaaccccttcactcgccgccaccactctctccgccactctcagctcttccaccaccaaaatcgcattcagaggttgctccgctgctaaaggaaacgccaagattggaacctccgagcaaatgctctccgtcagagaattccacccacaatggctcaagaaccctctaacactctcgtgctctaatatcttcctctgatcaacccattcatctctcaccatcattcctctttctcccactctctcttcaaacccttttcctatttcatttcctttgaccacccacaagaagttcaccttcgattcttccaaccctaacgcaatctcctctagttgttctctcgagatctcggcttgtgacccgaaagccacatacagaacattgcatcccttgtctcgcttttcatctagccatttcatccaactaggtttgaccttctcttctacttcatcatccaagctgtcagaagcaaagagatacgtatatattcttagtgactagctcataaacttatttatagaaagaatcataattgctgaacttacaagttatttacgtaacaaagcggtccaactgcccaaagcttgagtttgcgtttacgcttgtagaaatcaataaacacgggttcaaggtcgtcaaatgtattgaatatgataccttggctttgattcatagacgtgacttgatctaggataagcttgaatccaggatctgtggtggtttttggatcaaacatatctttaacgaaatcacatttcctaaccttaatccacggaaactccggtacagaaactggctccgtctcggacttaacattagatagaagctggttttgaaaaacactgtcacatataacggtggaagcgcaattcataccaaagaaaacaagccgaggaaaccctagctttcgagctgactcttgcgtccaccacaagaaaccgtctgagaccatgaaactgacacgtggcagtgacatgagctctcgctcaaagtctgcctgcattgacttggtggctcttgtgaaaggaacgaagagggaggacgacaaagcagggagtttgtcagtgcactcgacgccgggtgggatctccgggacgttatcagggaaaggtacgtcgacgatggtcgctttggtgccggagagtgagtcaacgatgaaaggacggttcaaaggagtggtgaagacggtgacggagatgtctccggcgaaggagtgggataagaggagacgagctaattggagcataggaatcatgtgccctttggacaagtatgggaacaaaaccacgtgaactttttctaactccattgcgaatttaattgagagatctgtgactgtgcataggcctctctctgtttcttatattgtatctctctatgtataaacaaagacttcatccactgagatctcagatctgtgcataggtctcctctctgttttcttatgctatctctctatgtataatgagatctgtgcctagttattaacatatagcaacttgcaattactagtgacaatattatataagattttattctaccaatgaattcagtgatctaacatctatgacttccattgctatggatcctcaaaggtagagagacaagtataaaataaagaccaacatttaaagtataagataatactgtggattaaagattcgaaattttcatatattcacttgtaaatcatcaccctttgttttgtgttcttggggttctaacgggatgctcttttggattttgtgtttcttttcacaaggaaaaacagaggagaaaacaatgttgttagtcataggagttcttgagttaattgatgatagttcatgaaatcaatcccatttagcctgacgcaacacagaatctgctccggtagctcctctggtttgttcccctgttcacacatacaatcgtcaacataagcgataaaatcccatatgattttcctagccaagaatgattgtaactaaatctacctgaattgtgaggccaacatcaagaacacagatcttgagtctgtctatgaatgtttcaaaccctttccgcgatatataaccgaatctatgcatatcgatatcaatctcaaagtaattgtcaccctacaaagagtaacatttcgaagttcattagttagtagtctaagcatattcctaatcaaagagggaatgttatagagtttgggtcttaccaagtagaattcgtgctgcggacgtgaaagtacaggtttctcgttataagcctgcatcagttttttctccggaccactcaaatggagatcatccacgtttgcaacacgtcccaatatcttaagccgctctctaaaaggtgccgttgtatccaaagggaagcctttaactttctcaacctcatcatctattaatctctgcgccaaaataaacacggattcaatacaaagagcctttaacagggccataaagatgagactaacagaatccagctttcagtttacccgaatgctttcttgaaaatggagcggaagttcctttgaataattatccgagagtttgaagtataatacaatattcattccttctccatcagattcaccttgaaagattgcagttggatataacggaatctgttccaaccgtaaaccaagagaaacagtcacggagaatttcagaaagaaggcaaaaacactgactatcagcagaactagatcatacctgaacatttacaacaaggatagatgggagttttgtggatgtggtagtaacaggaagtttgacatattgtgcaacatggtgtattttgtgttccgataggaaaacatcgacaccaaaaggattgtacgcagcatggctaggtgcaaactctttcttcttctcccttaaccaaaaacaaaatatagtttcttgttaagatggttaaactactgtagtaatcataagtaaaatttgtatattctttccaatggcttacctgagatatgttttgccacgaacccgaaaactatttggatcaatggttgaccaacaatcgagcattttcttatcaattggacagaaaggaacctgagaacccgctatcggtctcttcagctgcattttcgacaaaactaagacaagtttcgagataatatgtgagtttacgatttcagataaagctggtaatccaatgaaccaagagcaatataaacacttacacaaggctcctgaagcatgaccttctctccatttataagaaagtctaagagatgattttttcctggaactgggagggctagagctaagagaccttctcttgtcaatagaaggaacagttgttgtattcagacaaggcaaacaattactcggtaagatcctgcagttttccaagagaccttcatctgcagatgaatcaatcaaatcaggctggtttgtgtcgtttaagtcaccgtctgatttcgattgagacatcacttcatttgaatcagtgtctcgtgttgatgatgtggttgtcgtactcgagagtgatacacgctcagatccgtttaaagacaatgcatctgaaaacgaaacacaaatggtcgagaacatgaagttccacaaaaaaaaacatccatatttctctcctagctaacaaacataggagtgtattaccttcatgaacactgtggaaatcatcatcacagtctgtttcaaatgcgacattggactcaaaccatgcgtcttcgccagttgctgttgatgaaaaacggatcagatttgaactaaaacttgggtgaatagtgaacacatcatataaactctctccaacatcactcaactattcatatatataaaaccacaggagatacatgaatcagaatcacaagagataagctaccaaatataaaaaagttccttaaagagataaaagatcaaagctttaacacacagtgtgattaataaacaaagatttaataatcggaaaacaaaatcagaatctaatccgaaagattcagattgattaaaaaacaaaaacaaatcaagatcaaatttttcaatcgaatgcagaggaaacagagaggcgaagaaaagagagacctcgagaactgggattagagaagttgcgatgatgatgatcgagattgtcgaaagatccgtcagagagacgagaagagacggcggctctcttcctttgaatttttcgtcgtctacgactcttccttcgtttacttgacctcagttttgctccaacacagctcttcggcgtcgacacgcaacctcccatctctctctctctatagattagaaattagctacaaccttccataagacgacgatcattcaccggaacaaattaattatataaaaaaaaaaacagaaaagaaatcaagagagagcaacgtttttctctttgatcaatttctggtaatagaatctgtcatcatcaaaacaacactataaatgaataaagcccacaaatttatcgttgaaaggcacttcgagagagagctgagatttgcgaaagagacaaattatttggtgaagaaaagatttttcctttgcggagaaaaaaaaaactattgtttattttttgggttagatttttggagattcggaaagtcaataaaatgagagaaaaatatcaacgaagaagaagaggaagaagaagaagtagttaaagagttattttatctcttcgttcttttgtttgttttgtttttctctcttttaatttgaaccattgaattaaaccgagttcttaaaccggatctgattaagtacgtcggtaggagtatgactccctctgaccttaactttgtcgctcgctaatcatcaattcatatgatatatatggagtttcactaataaaaaattattttctataattcatatatttatatcctgaatgagaaaaaaatatattatttctttattaaataaaaaaagtagaaatttcattttggcatttaaaaataaattgaaatcctaccaactaatttgtttcataatgtttgtatcaggaaaaaatggttataagttaggtttttgatgtgacaatcttaacttaggaaaaaattaaaaaaaggttaagccatgcaagagaagtgggtcatgtgactcgtgtctgagcttctttcgtggcaattattcaatggtggagctgctaagcgacttggtcgacgccgatggcatggcgcattgcgctgtttctagacgaccatactcatctatattattaattaagagattcacatagaatatcacacttcctcaatataaattttgctctttttacatgaatttcatatgtttttttctttctaacattatgcattgtaaaaaaaaaaaaaagtttcattactatatatataaatctaaggttgtgtaattgtgtatggattgaattc

SEQ ID NO: 29 - DNA, 89934 bp, Arabidopsis thaliana
aagctttaacacacagtgtgattaataaacaaagatttaataatcggaaaacaaaatcagaatctaatccgaaagattcagattgattaaaaaacaaaaacaaatcaagatcaaatttttcaatcgaatgcagaggaaacagagaggcgaagaaaagagagacctcgagaactgggattagagaagttgcgatgatgatgatcgagattgtcgaaagatccgtcagagagacgagaagagacggcggctctcttcctttgaatttttcgtcgtctacgactcttccttcgtttacttgacctcagttttgctccaacacagctcttcggcgtcgacacgcaacctcccatctctctctctctatagattagaaattagctacaaccttccataagacgacgatcattcaccggaacaaattaattatataaaaaaaaaaacagaaaagaaatcaagagagagcaacgtttttctctttgatcaatttctggtaatagaatctgtcatcatcaaaacaacactataaatgaataaagcccacaaatttatcgttgaaaggcacttcgagagagagctgagatttgcgaaagagacaaattatttggtgaagaaaagatttttcctttgcggagaaaaaaaaaactattgtttattttttgggttagatttttggagattcggaaagtcaataaaatgagagaaaaatatcaacgaagaagaagaggaagaagaagaagtagttaaagagttattttatctcttcgttcttttgtttgttttgtttttctctcttttaatttgaaccattgaattaaaccgagttcttaaaccggatctgattaagtacgtcggtaggagtatgactccctctgaccttaactttgtcgctcgctaatcatcaattcatatgatatatatggagtttcactaataaaaaattattttctataattcatatatttatatcctgaatgagaaaaaaatatattatttctttattaaataaaaaaagtagaaatttcattttggcatttaaaaataaattgaaatcctaccaactaatttgtttcataatgtttgtatcaggaaaaaatggttataagttaggtttttgatgtgacaatcttaacttaggaaaaaattaaaaaaaggttaagccatgcaagagaagtgggtcatgtgactcgtgtctgagcttctttcgtggcaattattcaatggtggagctgctaagcgacttggtcgacgccgatggcatggcgcattgcgctgtttctagacgaccatactcatctatattattaattaagagattcacatagaatatcacacttcctcaatataaattttgctctttttacatgaatttcatatgtttttttctttctaacattatgcattgtaaaaaaaaaaaaaagtttcattactatatatataaatctaaggttgtgtaattgtgtatggattgaattcttctccactctttcatatgtttttggcagtgttgacaaataaattaaaaaatatacagaaaacattgaatatggaagtttgaatttatgggtaatttggcaggaaaattacaaaagaaaaaaagagggttggtccaacttatttcatttgactctgacaatcttacaagttacaatctcatcttcatggaccctcactccatctacatctcatttttctccatgtttttccaatgtgtgttatatacaataacaactagcaaatcaaattattataaatctaattttgtaaaattttgcagattttttccaccgtatatttgttcatttttataacaaccatgcaaatggtaagcaatctacaaaacacggtatgtcaatttttgataatgaaagaaacatattcgtttttcttggtcgacataaacatattcttttacctttttatcaaatatctttgcttttttttcccaacaataattcgctactctaattggattatcgtgctgtgataataaaaacaaaagagtggtaatgaacatatgatgaacaaacaacacacgtgcggttgtttgtttgttggcaggatctcgttgtcattgaagtgtttcgatttgtacagaactgacgctttcatgttccacacactcctcgtagatttcccacagtccttttagattatttttacatagaaacaacaaaaatatgcatgcaatactctatcacaaattataattactttttttttttttctattctcgtgattagtttgagtacgttagaaatatttttttgaaatggcaaagatacaagtgtttgatcattggcgttacacatttgatcttaaacatgaaatcccagtctatactaaaagacatatgggctatgtaaaagaaaggtcacgagaaaataatgatgcgaaccgacaacgtgtcagtctcaagcattatagaggacaaggggccattgtgaaaagctttctcttgcttagggattgtcaaatgtcacaagtatatacatgagataattggcccaccacacatatatacgcattaataagttacattcatcatattccacccaaggtatctatgtactagtccaaccataaatctctatattactaaaatgctagcttcctctattccaaaaatacaaaaaaaatcaaccctaaattgtatacctttttcaaataattggattttcaactacttctaagtgctatggtatcttccacacagtactgcttccacacagtatattaaggaatcccataatgagctttgagtggtacttgttttgcatgcaagacgattggcaccaaggtatagatgtgtagcaagtgatcgacaattcggtaaaaaaatgtcttcaacaaagttaaaagtaaaagacatcgtcgtgaattgtttggtagtggctaatggctataaactttaaaaccttatattcacatcaaaaacactatacagcttcgtccttcttacagcagtcagtgcggttttatcgcaagatgagtgaatggctccaaatttccgaacgtatgagtttggtactttggtatgatcgcagtaattgtaagactaatttttagttgtacataaataaagcagttgaagtagataaataaaggaaatgcgtttagtaatttggaagaaaaatatataaagcattaaataaaaggagtggaaacttaacaactttcccaacaaaaccaccaacctcacactcatgggatacttacttttttacttaatgaaatatcataaaatatcatttgcctaattggcttaatgattatttcgaagtccctattgctttcttgggatttataacttattatgatgccaattgcgtagtgcctactaatccggggatatcaagaatgacatttttctaaaacaaacaaaaattatcatatatgttatctatttcacactaaatgtcatattccataatcacaagactcagtttaattatgtaaggattctaatacaaaacacagggagttatgtgtctaataaaatcagtctttaaaaaaacaaaatcaatcatagttagtgtagaagtgggaaaagctgtaaccactaactaagtgacctcttaaaggttctcggctgataatctttatcgattaatcatggaaagtttccatgaaagatcttaaatctagtgattaagttctcaaacctgtcttgattaacatttgatgggtcagaatcatatatattcatatcatagaaacatttacaaaaaggtgtaaatgaagacacgtttcctttttagttatttaatgggttgatggcctctttaagcaactccctaatacgtccttaccagtttttctctctttctctcttactctttttgttttctgtcagcatttgatttgtttacatgcacatacatgaaatgataaatgttagatagttggatccaactaagaaatcgaatggtggaccatctgtgccatctttgatactcccaataacctttgttgtttttgttgctaatgcccccaaaatacctaactttatttcaaacaaaccctacaatcaatagaccaaccaaaaaaagtagattaaaaatagatgaaaataattcacaccaaaaaagatgaaacgtaattcaagactttcaagtggcttgctcctctgttgtacttgtcgtattgatcaccaaagtaatcaaaatttgttcccttcatattaaggccaattaactacagacgagttaaattaccaagataaattgtactagctgttgcaaatttcacaccaaacaattgaattaaaatttgttcataaacaatccataattcacatatccctagtttcacatgaattaactaacaaaggaaaaagaagcgatttcattgtttttcctttttttttgttggcttatctgaaaggaccaaaatttaattttatcaatgtagagaatgagatcaagctcaagtaataagactggtggcatttgataaattacctttagatactaaacgtagtttcgtagattagtagcagactaaagcttatttataagattcatcacaatctagagccacaatcacagttaaaaaaaaaaatgattaatcaaatattcatctttttcacttttgtttattcattctctttattaatttttattgtttttagttcatttccacttggaaaatagtcatttttagcagtaatttctcgtcatttttttttccttttctttttgtcatcaacactcatacaaagctatactacctcatgtgaacttggattttgatacaagcaatactgataaaagttactattttcgagatattaatctattttcaatctctatgaaaatgtaaagaaaaattccttttgtccacgtctaatttcattgcgtgcaaatgtagaaaactcatgttctcgtcgtttatatgaccatgtccccaccaaacgaactttcttcaagcttaataattgatattcctattattacatcacatatgtggtcgataatttccacggctaatagagaaaggagagctgtatagtccactgatctaatctctttataaatatcttggccaaaaatttgacgtgtaataaacatatacgattcattgtcaaattacttaattacagtcgttgtctatcttttttttctttttttctttacaagttttaagtgtacttttgctaattgtataagcataaacgataaaagcaaacaggaggaatccattgctataatttttgtttgcactttgcaaaataataacatactataaaaacactgaaaatgttaaatttttgctaagaaaaaatgttaatttttaaaaaaggttttaacacataaattgggttcgaaccaaccaagaactaaatattttctatctttgagtttctttgaaaatatccgacactatattaatggaaacgtgaattggtcattagaacgatccagttatattttagctaagcctctacatatctcttccataaggctatcttcttttcataacctaagagttgagacaaacacaattatgaccataaacaacaaacttaaaagctcaaaggcattaccggtgatatttactgaaccaatgtcgtcggtttttcaatacctgcaaatactgtagtttatgaggtcaaaagaacaacataagagtttaagtgataacaatcacaaatcatgatgagacacttaactcttaaactcgattcgttgagcactctgaatcaggctggttcatcaactctttgtacttgtcctgcaaaagactgaagattttattcacttatgggtttaaagttcggaattaaatcgtctctcaaccaatgaataatctatgatacgagagtttttataggagggatctaagtcaaaaggtacttcaaaaggttgagattgttttgcggaaaatgcatagtacagtagctgataataagtcaattatctttgttcactactttacttctatcagcaattgtaagcaagaaacaaagagaaaatcaatttcacttgcctcaagctcaaagtggttgtggttattagtactctgccaatggccactgacagtgttatgctgcaggtactcagccgaatccagttgatgatcatcatcttgtatcgatctgcagtctgttttttggtgctgacaccttggagacgctgatggaataacttttactgcaaaaagaagtaactgagaatccggtttgcgtgaagttgtaactgatcaacgtttctcacttttacatagcaggtcagttaaaaaccttcacttgggattctcttagaagaaaatccttgtttccattaaatacatagatttatacactgaagatgttatggttttatgttgtttctggtgatatttagttcttctacgcgaaggaaataacaacacagcaaaagaaaacagcagacctgagttttcttgagaatgcataacaggagctacatatagaagttcctccattttgtcaactgtgtcattgtgcctagttagccaatcaaagagggataagcattgatttgggaatattgttactcaaattgagacagaaaaccgatctagttcattccaaagtacaaccttaaagagtatatcatattaagacaattgggatgcaatctatttccccttcaatcagtacagagacataaacaatttaaaaagtgatttaatagacctggatcttttgtttctctcatcggaaccttgttcgaatgtcagtattgatgtaaacacctttctatcctgttatatcaagatgaatgaaagacgatttgaaataattatttgatcatctgaatttaaagttcaccactaaactattatccaaggttggaatgttagaatgatagaaaacttcgattatctgttacctcttcagtcataagggatacagactcctgaatccgctgtaaaatcatctccaaacccttcatttcagaatacaatgcctaaacatttgagacactagttatagagactgttgaggaagaaaaaacgatcaaattcagtagataaataattacctctttttcagaaattaagttctctacagctaaatctttgacctgcaaagttttctgaaggtaaggctggtcaagtaaacatatacgtgagaaatgatctcccactagtttctttgaaaatgcagtaagacatgcaagttctgataaggatatctcttcgacttgatgttgatgttcatttttactcttttctgattccagctgagcggagagctctgatattatattatccttgctctgcagttctgtttcatggcatttaagtttctcttctaacgctctgatgttctctgcataagtgaagaagataaaaatcattttcttcataaccgtgaacatacagaacaaagaaaaagaccacaagagtaaatgaacaatgaacgtaggaaaaacaattaagtagtaacctatcaacaatcattttagcatcaccgctgattccatgaaaagaaactcacctataaacactttttcataagtagagacatggtccattttctctttcaagccagtcactggatacaagaaacaacagaaacataatcattctctcagggggaagccgtgtgaaagcattagtacatatattcaagcagaattagtcagagatcagagatctacatgcctacatcttcttttttatccacaaggccctgaacttcatgtatgacctttttaattactgatgcctctttttcaattgaatcaaacaacgtaagatgagaggttatcttctcatgtagcatgagaatcttcctatccctggcttcaattgaacacttcatttcacaaaacgactcctgcaaacacaccagcatttcactaactgaagttacacagttccatatcatggagatgattctctaagctatttttatcccttagatatagtataagattttgacaggattgagattttatgagaaaagcacctggtaagcatttaagaaactttctcgcgattgaagcaaattttggatagttgtcttcaattcactctgcttgttttccagcaaactatagtcgttctgaagataactcacctgcaaaatcaattagaaactttcactaactccatgtgaaatagattcgcagaagagaagaatcttccaaacctttctctcgagtgcctcctgtgtttctctagaagaagctaaatcagcttgaagctcctgcactttcctgatgcagtcctcctccgtttgcttctgtttctgtagcgaaagcaccaaacaaaatgatcaccatctacgaatcagaaacgaaacaaaaacgagagctatgaacagtaacattgatcgaagaacctgattcgcaagagtaatgtgatctgtgactgatcgctccctttcctgcaaaaacgccggtagtaaagtggaagaagacgaagaagaagaagagagaaactggtggagcgaagaagatacacaatccatagatgtatagaaacctctttctccttacacgcagatctcgcacttctccgatcattgactgaagctgcaatttgaattttgacaacttgagcatctccatttttggttggtttcttcctccgattttgaatttcgaccgccagaaaatctcttctttgtggaaaaaaaatcaatgtcaacgagaggaaaattaggtcgtcggaattgtcaaactaatagtttagttaacgacaaaaaaaaagaaaaatagcccaggcccaggttagtttaatttattctatatgggcccagtaaataaacatatactattcattagccaatggagaacataaatccaacttatcgtaactatcataattcattaccagtggcagatttaaaatatattttattaaaatatatttttataaaaagagagaaacactatttccaaatatctatctaaacttcataatatagctgactatatttttattttcagctattacattattaaaatagtataaacggtaatcttatatatacagtagactttttggccaaaaatctctatactatttcatccctacacagtttacctttcatatggttcttccagagtcacacagatgcaactcattaaaaaaacataaggtacttggagatcaactgaagataacaaatgagctcacaccagatagttcaagagattcacatgcataaggcggatagtagcaatgcagatcaactggagataacgaatgagctcacaccagaagaagcgagaagctatgcgatatcccaattgcctcgggaaatctcaaagcacattcgttttgccttcgactcacctggttatgaaccgttctttgcttctcaactgggtatatacgcaccacagaaagcgtgggatgtggctagaagagccagcatgaggtcacgagccaaagcatcaaagaagaattgaaaggagaagcagaaaatagatatgagttgtgttgtacatttaggctgtcacaccatactggaagttttgttaggccagtattggaaatatgtagaaatcttcggtttggcgtctttgtttgtaatgcatttagttttcaaagtctttattctggggtatttaggcacaaatgagaagacaaacgctcaattttatagatatagaagcctctcctacaaacttttttatagcaatcacctcaacaacagaaaaaaatgatgtgtttctttttttctaggggaaattcgaactccacttagaaaaaagaagagaaaagggcacatctacaatgatacataggcaataaaactggaacttcaaaaaattatatatggtcgggaccacaaaaaaaaacagagaaatcacaaaaaataatcaggggtcttccgagtagtatcaggttcaacttgtcgaggagctggatcgaactggaggaagttttgctccatgttctctcctatctctagaatggcagccatgtttccacaccggtagcaatagtttggtgcactaaacacagtcaccacattcttatcctgttaccatacaaaggagagatcaacgattcaatctgagagagagactaatcatgccgtaagaatgttcatacctgacaccagttaaaaccttccatgacaagttgatgcgctcttgatatgagacttagtccattgttgtgattaaattgagctgcgatatcctgtccaaatgtataaccagcacctcgtggagatattccccatccacatcgatcatcaggatcagaccataataaatcacacataggtccttcgtgtggaacctacagatcacacatcatacatagttcaaagagctgaacaataagatgtcataaaaaattccaaacgtttgtgctctttgtaattgtatcttaagtagagacaagacactgagacccaggaaggactcataactcttccaactaagtccacactaaggcctttagcagagaacaagaaggttacctcctgtatccgatccaagcttcggatattatcaagagtatccagagaaggtgaaagccctccatgcaaacagaaaacctacaaaatttgatgaagtcaaaaagctgtacttagaaaaagatgtatcaaacaccaactgagaaagaacagctctaacctgactctctatgagggcggtaagaggaagataatcgaaaaggtctgtaaaatacttccagacgttagcatttccgtacttcctcaagcattcgtcataaaaaccatagctgaaacagagaagcaaaacatgcatcaaaacaggatagtactttgctgatcagccagaaaccaatgaagaaaagtacgattcgctcaaatataagcttatttcaaaacaaaagcttacacttgagtaatctgccgactctcgtgattccctcgtaagattgtaagtctatccctgtatcgcacttttagtgccaccaatagagaaactgtctctactgaatagtagccacgatctgcaaagaacaaagcaagacaatgagaaaccaacaacactccttttaaactaaatctagctgtcaccatcttatggtacaccaacgaatggttaaagttccaaggatctaaagactagaattcaagggaagtgcaataatgaaagtgagcatcaacaagtctctatattgggaagtttcagtacctaccattccaaaaaaaaacagaacccacaagtaactcactctagataaataaaaaggtggatacttttccaagaattcaccattttggaatgatccaaaaacacagatctaaaatgagaaaaaaaagtaaaaaccccaaaaataaaatcgaaagaagaagaaagacagacctacatagtctcccatgaagaggtagttagtatcaggagcgttgccaccgatacgaaagagctcaataaggtcataaaactggccgtgaatatcgccgcaaacggtaacaggacacttcaccggctgaacattatattcctcgacaaggatcgctctcgcttgatcgcaaagcgtcctcacatccgcctccgataacggtttacactccatcagctgctcgatctgacggtccagatctccgttcgacggcatcttgaaaagccaccaccgatcctatatacgaaaattacggcggataaagaagatgaatcgccggagaatctatcggccagagctaagatatccgaatcggagagatcaaatcctcctagcttctctggtcttcgatagttcgatgtctctctctctcacctggctgagaaaaaatggatattcgttttttttttttaaagactaaaagtgggtcgtgtccaaatagacaaagtataaatgttttatgacccggttaaggttcggttttgtgttaattttattagtctcgccaattgttataaaacttatgattgttttttttctttggttcaaaataaaattttgagttttagttgttttttcttctgttaaattcgttggtgttttcaacttaattctagttgttttcggtcaaattatcaaaaaaaaaaatgaaaaaaaaaagagagaattgagaccaaaccggatcggatttgaattgtgaaccgttacacgtgggtagttggagcagagctattgtcatttgaacttgtctaaacgataagtatatatggacaaatcatctcctcctctcatccggtaattataattagtcaactaatgttttcatattatgttttagatttgacaaatttgcttttaagtttttaatgttgacatgatcgtcgactatgaggcaagttcctcgtcgaacaaatgggcctggagaatctggtagagcggcccatggtaacaaaaataaaagaaggggcgttccgagaattgaactcgggacctctcgcaccctaagcgagaatcataccactagaccaaacgcccattgatgatagctctgacaatacatatttatatttagaaaacattttgaaccattaattttgctattaaattgatgcaaatcaaacctaattaaagtttatcatctaacacagtatgaaaattcatagaccaaacatttttcccttgcatattcttcccacttgtaagaaaatgtgaccgagctttttaggtaaaattaggatattatactttacttactacaaacgaatattaataaaccagatttagtttgaatagactggaatattatgtttcgtttttataaccttaaatcaaatcctcacttacgcataggtaatgaaagttgaaagaaaaaaaaccctaactctgctttttacttggtttttgatttacataatattaaaccggtaagtttgatttggaattgaaaaataaaccaatttcgtacgtaaccttccatttagctccgaaggttctgattacatacagacatgaagatttctttgggtatataagcaaaacaagctcctctctttttcttcttcttcctcgttccgttgccttaccctcttccctcctccgcttccaaaatcagcgagagagggagacacatagagagacagagagattgctcctaatcagaagcaatctcaccattgaatcatctattttctaccaaaaggaagcttcttttgcttttcattttgccaagtttccgtctaaatctctctactttaaaactccggcggccaacgtttccaccgatcctccgacttctttccgagtttcatcttctaacaaaggaacgaagaagctctcttcaccgtttgagtaacgtgatccggtctacaaaggttttaaatcaaaatctcttgctcagaatttttcctcgttttttgtgatttctcttaagattttccgatgagagatctattacttgggacaacgattccgagctatttctcttggcttggactatttccacggttcttagtttggtttggcttcttaaaagcctcttttttttgttcttccagaaatcagtctgcgggagaaagtggaagaagactgaagatgaagagagctagagaagatgttcacactgacactcaaaagcgaaagcctgaagtttcgtctcgaggagaaacgtaactctcttactcgataaacccaattttttattgtttgttcttttcaattttacatttgttcggtagtccacaagttatattcttcaatgtagtttgatgcaattgaaatgtgtaagagtatttgaaagttacatgtgtttgtgctatgcagaaacaagctacctcgaaccatcgatgccctaacgtatctcaaagctgtgaaggatatttttcacgacaataaagagaaatatgagtcattcctggagctcatgaaggagttcaaagctcagacgtatttttacttcgcttctcttcttgtttagtttcattttgcctttcttatgtgttgtattgtggatgtcacattgtgaactgcgtatactcatggtgtcttatcttggttgcagaatcgacactaatggtgtcatagaaaggattaaagtgttgttcaagggttacagggacctacttttgggttttaatactttcttgcccaaagggtataaaataacccttctgccagaggaagagaagcctaagatccgggtggatttcaaagacgctatcggtttcgtcaccaagattaaggtatggatgtaatatggtactaaatggcatactaaggtaatgatgatttatatcagttaaggtttactggggtttctacttttgcagacgaggtttggagatgatgaacatgcgtataaacggtttctagacatcttgaacttgtatagaaaggagaaaaagtccatctctgaggtctacgaagaggtatgtttttttattactgcacagagtgttaattcttctgattttctgcttcacattttatttgttagagtcacagtttttagtgtatttctctgatatcatctgttggtgtaggttactatgttattcaagggtcatgaagatctgcttatggagttcgttaatttcttacctaattgtccagaatcagctccctcgacaaagaatgcagtaccgcgtcacaagggcactgcaactactgccatgcattctgataaggttactcttattcatctttattaaaggatataatttttgcagttagtaaggttttaatagatgttcatggtaacaaaactccattatggccatacatcctttcctccactgttttaagagtcttataaattaaaatcaaaattagccattatgatacagaatttatatagggagtttttgagtgaaatgttgatatagactcttatctgccacagaaaagaaaacaacgatgtaagcttgaggattattctggacactctgatcaacgagaagatggtgatgagaatcttgtcacttgctccgctggtaattctcttgaatgtaaatatttggatggcctgttacatttcttctatagttcagctttatgattgtgaaaatgtctttcagtacctagtgaatttaatataagcaagcaagtgatatatgtctcaaacgtgccctcatcttgagtactatgaccatgatcagttttttctttgcttatgacttaaacagtcagtggtttgtatccggttctgaggtccatgttaatttttgcagactcccctgtcggggaaggtcagccaggatactttcgagattatgaaaatagagaagatactgaaacagatacagcagatagaactgaaaaaagtgcagcatctggcagtcaagatatcggaaatcacaaatcgactaccaagtatgtgggaacacctataaatgagcttgatctttctgaatgcactcagtgtaccccaagttatcgactcctgccaaaggatgtgggtattttccttaataatattgttctactacactgtaattactgtatcatttcgttctcttataaacatatggtggtctttttcccatgcagtatgcagttgagatcccaagctacagaaatacacttggtaaaaagacactcaatgaccacttggtatctgtcacttcagggagtgaagattactcattcagtcatatgcgcaaaaaccagtatgaagaaagcttgtttcggtgtgaggatgacaggtatgatctggtagtttgatgacaaattttgttatcaacttggtatatacagtacagtaggttattgtatcctctttctatatccatatagactttgactataactttagcatgcttaagtttatcttctatatggttgggacttctctcctttcatttagacttttgtctggaacctataaatgaagaaatggtgattttttgttattggtagaatcccccagtttaacatttctgtaatttgtgttcaggtatgaaatggacatgttactaggatctgtaagttcagccattaaacaggtggaaatccttctcgaaaagatgaacaacaacactatctcagtagactctactatatgtatcgaaaaacacttatcaggtaagtttttagtttggaacaaatctagtgtggctattgtccttccttcatttatttgtgctaataactttctatgtgattgtatctaatagctatgaacttaagatgcattgagcggttatacggtgataatgggcttgatgtcatggatcttttgaagaagaatatgcatagcgctttaccggtgatactaacgcgcttgaagcagaagcaagaagaatgggcaaggtgccattctgatttccagaaagtttgggcagaagtatatgctaagaatcaccataagtcactagatcatcgtagtttctatttcaagcagcaggactccaagaacttgagcacaaaatgtaagcttctttatcaaatttttacttaataagttcattatgacaaaatctaaacttactttaggtttgataaaaccacttgacctggccacatacttaaatttcgtgattttgaagagaggaggatgattaagccagagtgaagtgaacacaaatttttatttatttcggagttccagttttgcattaatgcaattgtttccttgtgtccttaaatgcaggtttagtggcagaagtgaaagatatcagtgagaaaaagcatcaagaagatctgcttcaagctattgctgttagagttatgcccttatttactcctgatttggagttcaattattgtgatacacaaattcacgaggatctatatctgctaatcaagtattactgtgaagaaatatgtgccactgaacaatcagataaggtaatgaagctgtggataacctttttggagcccatctttggcattctttcgaggtctcaagataaccttgctctggaagatgtgtcaaagttgaaaaacaaccgagaattgcaagatgcatgtttggcagtgaaggagacagcttctgggtcaaaccgtaaacatccaatatccccgaaacgactgagcaaagataatacaaaaatgcaaggaagttcttctcgggaagatgtctcagccaatataaaagtgaaaactgcccagcccgataagcttcaggatgatgcagctatgactaatgaggtaactccttgtgtggagctttttataacttagttcgtatgcacttcagttgtgatgaaatgaaatgaaaggttacctttcttagttaccaaattgaaaacttgatgagtaatcattagagaccagtcatgattgtatctatttataagactttacatagattaccctaattttggtttatggtccacaggttatccagtcttccaaatttgtgtcacccaaaaatgaccagataatggaggatgaagggaatcatatggttaacgcagcatcggtggaaaagcatgagctagaagagggtgaattatctcccaccgccagtcgtgagcaaagcaactttgaggttaatggacagaatgccttcaagcctttacaaaaggtgacggacaatgtaagaagcaataaagacaagcaaagttgtgataaaaagggagcaaagaacaaaactcgcgctgaagatgacaaacaagaaaattgtcacaagttatcagagaataataagactgcctctgaaatgcttgtttcaggaaccaaggttagttgtcatgaagagaacaacagagttatgaactgtaatgggcgtggtagtgtggctggagagatggctaatggaaatcaaggtgaagatggatccttcgcattttcagaacggtttctgcaaactgtaaaacctgttgccaagcatctgtcttggccattgcaagctagtgaaacttgctcccagaatgattctcaagttttttacgggaatgattcctattatgtgctatttaggcttcatcaagtaaggactgtttgaagcaagcttcttgagtatttaatatgatggtttccctatcccgtgctaattgctatgtacttatgttgatttccagatgttgtacgagagaatacaaacagcaaagaaacattcagaaaagaaatggaaggctgcagataacacgactcctgattcttatcccaggtgatttctcttccaagttaatagctttacttgaaaaaacaattccttactgatattcaaagcataacacgtttaggttcatggatgcactctataatttacttgacggttctattgacaatacaaagtttgaagatgagtgccgagctatttttggagcacagtcatatgttcttttcacattggacaagctagttcagaagtttgttaagcatgtaagcaaaactagtgtcttgtcttcttgactctctacttccattctctcttttatttctctctttcctctgatcatttgggatggtttgtggatacgcttcagctccattcggttgcatctgatgaaacagacaccaagcttctgcaactacatgcgtatgagaactacagaaaacctggaaaattctttgatctagtgtatcatgagaatgcatgtgccctcctccatgaggcaaacatataccggatcagatatgtaggtttctcttaactacgcatatatgtccattcaaattccgtaatttattaatactactttggaactgattgcagtcatcagaaggaacacgtctctcgattcagcttatgaacagtgggaacaatcagcttgaagtaatgggtgtagcgatggagccggcatttgcagattatctacaaaataaatgtctgaaatccgtcaatgatgaagagaatcacggactgtttctgaacaggtgactgaagcatgataagagcgtattggtatatatattcttttggttgtgaagtaacgtataactaaactctctgcaggaacaaaaagaaattcaccagcttagatgaatctagggggatgcctgttgcgatggaaagattgaatattatcaacgagatggaatgtaggatggcttgcagttcttcaaaggtacaacatataatgaaattctctttgcaagacttgcagtctgaaatgtatatatgtggatgactgaaacttacttttcccaatgattcaactgctgtaggtgaagtacgtagcaaatacatcagatcttttgtacagaagcaaacaggggaaaccgaattcaagagttagtgaaatcttgaaacagagaagaatatcgcggtttcacataatgctgaattgcagactttgtgccttgcctctataaactggtacctgctccaattccattaaattcgatctcttacatttacacaaaggctgtgagatcttcctcgatataactgttctgtttcaggtgttagtgtggaggtccttaatggtaaagactctttggctcttaaagattatgcaaacttttggtggtagaaaagaagttaacttgtttttaaagtgacatggactgggatcatatggctcatgattcactacgcggctactccacattttttgtttgtttttcttttttctttttgcgtttggagccgtcagttttggtgtatagttgtattagaatatgtgatacgaaagttgccaaaatcgaaagactctcattttgttcattcaacgtctacctcctttaaaaaaattgtcatcacaaagataaaatgttgtaactaccacaatcatgcctaaaaaactaaaaaattaattaaaccataatcaccatatccaagttattaataatatacgacacgcgtagaccaatacctagtaagcgtatatatatgtagagccaaacctttttccaaactcaaaacactacaaactagtttttaaaaaatggcacaaaataagaatctcaatctggaattgagtctaagccaatatgtagaagatgatccttgggttttaaagaagaagctaagtgactctgatctttactatagcgctcaactctatttaccgaaacaagagatggaacactttgtacttccggagatggatcatgaccttgtccgaaaattgggagctggcgttgaggtcaaagtcagagatgttgacagtgttgacgatttttacacagtaagacttaaagtacgcaacggccagtattatctcggaaaaggatggggcctcatcaaaaatgccaaggttttaaacacaggagatcatattggactcttttgggataagttgacaagagaagtcaagttcaagcatttcaaatctcaatcaataacaatgcatcgcgaagcgggtactacttcgacacagaaaaacgtattacagaagaaatgaatacacacaagtaacacaaccatttaaaatgtaaaagaaatgtgtatagatataatcttaaagtagatattggggaaatggtcgtgttatcctcgtaaaacagcacaatgacagaaaaaaattatgcctctctttatgagttaatctatgagtagaaactagaaaccgagcaaatgaacgaacgtaataagtaaaaagaaacatgtacatgtggaaaaagtttttttaaatgtataatcagaatctagagcatgccataagaagttattttaataaatttggaggagaacgatgctatttaccagactaatttaatgctctttacatagttctatggatcataaatcgttcacattccaaaaacattcatagttaacaagatagctaaagaattgcagaaaaactcaattcggaattgagtgtatagccttttttagtgacattttattgtttatacgtttttttttgttgttgtcataatatagttttgagttagtcatatacatttgtatatagttattggttggccatgtagttatatatagttttaggcttttagcatttttagccttcaagacttttgcggatcctagcaacatcctggccgttgatatcataagcactcttcaaaacctctaccagaaacggaggctttgaaatgaaagacgacaaagatacaatctgagtcccaggattctgactactcagcccagagactgccaaagctgagctcaccgtatcaatgttatatagaaaatggatcaaacctttgggaaacacgaatgtctcacccggatgaagctcctgcgtaaagacccgacccgacgtatccacgaacccgacgagaaggacaccgtcgaggcagactgtcacttcggaggcgcgtgggtgcacgtgcggtgggacaacaccagagcctccgaagtctagcctggccattgtaaggcccactgtgtttagacctgggaggttggcggttgtggtcacagtgacgttgatcataaacggtttggtcttagtgtttccgggtctggataatgcggatgttgaaaagtcagagacgctggcttgtgtcggatctttgcaaagtttgccgttgaggaagatttgttggtgagatgaaggaggaggagaaacgcagtagtcttggagcgggtccgggtcggatttaacccgacccataagaagtgtgagcgttagtagtatgtttagaatcatagagagcgagaagcaaagctgagttagagcttgtaaataatgaaattttagagtaaaagatgtcttagtaagatgcacttaatttattggaccttatgtttgttttcaactttctatatatatatttgatattggtttattgtttaaattcaaaatttgggatacttttttgtttgtgttacagaagaagcaacacaatgtttaattttaatcatgtaaaccaaaaaaacaagttttcattgtggtggtgccagaattttagtttaagcaaaagtcattatatatagtaagatatattttgttagccgttaagcaaagcaaaacaaaactatccttcatgcaatgacttttattgtgctatgcttatctctactatatattcaaaaccatgagttatcatatcgacaacaagaaaaagaaaaaagaaaaactaattttacttgatgtttcctctaaatacgaagaagataatggacataagattcaaatttttcaaattactatctaaaaagaaagaagaataaattaaacagcaaactagccgtagacaaaagtaatctacatgttaagagtaaagcaaaaaacgtggaaacacacatgcaacagcgatcggacactacagtaccccaaagatgacaaaagaaaaagatgtggtagagagatttattcccccacatgaagggacaaaacgcaaaccaaggacaatttttgttaatttattgcaaaattttaaatacgccaaacgtgaggagtatcgtttggggatgattttgttgtcgacaataattaatgattttgttggttatatacattgcatctacaaattttaaaattgatttcgtctttccaatgtggttggctctgtcattagattattatactaatccaactctttatattgtatcttttattattttttttataaataatacgagtaaaattcgtgtgtgaatatagaatttcgttcaatggttgatttaggttgaattaggttgatttagagaaaaagaacacctgacgtctaaatttggattacaagctaaaataaagtgagatataatatgttttattagataatcgaaagaacatctgatttgttcatcagaaaatgaatgcgaatagcaattgggtcatgtccttagattgttgcagcggtcttctcgatgataaataagtttacgaccaaccgcctataacaacctctagtaccaatcaaacatagatccgaaacacacacgttaagcaacatatatacaaaagttaaagctatcccaagcttaattatattggtcgtggtttctaatgtgaagatcttacttggatccaaatggtaaaaacacatgaccataaaaaaagaaacaccaaaatgggtgccagagacaagggatctatagagactatttatggagaaatatgccccaaaggaagggaacaagagttgcccatttccagctttgcatttattctttcttcctcttccttctttcttctttttattttcttgcttactctctacacatctacacatgcataatgatgcatccactacttcgtcgtatattataagcatttttttcttgggttaaatatgtatattcaaagttgcattagagcatcggcttgtgcatctcttttgggaaggatagaattgaacgtcatcgtttcatctattcccttagcttcattgcaaggttgaaaaatggacccaaaatttggttttaattaaccgccttttatgcatttatatttttattcttttttactataaattcatatgtataagtttcaaattttatgtttgtaacctaaattgttttcattatctatgaaatatttataatttagccaaaaaaattagagcatcggcttatagtcattaataggagtattttgggtcataaaactgatatatatttatggaactgtttaatgactatagtggattcaaatgttactagttgatttgtatctggaaaaaaaaaccttagctctctgattcttgaattgtcagatctagctaactttctgattataaaaccccatatgtctatgatattgacttatttaggacccaatacataagaaaaaaacgcatattcaagtctcgttatcataataaatggtgaatgtcgaaggttcgattgcaattttccctttgtttaaagactaaaaaagttaaaaacgtaactttgtgcagaaattaaaataattaaaagatattcgaaaagctttaaggaaaaggaaaaaaggcccacgtggaggcgcgagagattaaagggacatctataaaatttgacggcgtcaagtcaacgtgcaattaaaaacaccgtcagaggtaaaaacgaagttaacggagatagataatattacacggcatcccagaatagttccactaatctaatccgggactcctcatcttctgccgtcgaatcggcgattcctccgacgacgacgtcaacacgtcatcatcttcatcgtctatcggagatgaaagtggcgaggtggaaaagatctccaccggagataacggcggagacgaatccgacgattcagtcgaaacagtcaacggcggcgacgattcaggcgagatagtcaacggaggtgacggtggaggaagcgaagagttaacggaactagaatcttccggaagcttccgtttgtttccgttggaaagtttaacgtctttagttaaatgacttctcagacgtttcacgtcggcgagtttcaccggtttcaataagaaatcttgagcaccttcctcaaggcatctgttcaaaaatcattttttttttttacaaaattttatcaaatcaatcaacagtttctaaaaactccaaaatctgtgaagaaatcaacaagaatcacacctgtcgattctggtcaatacattctccgacgacatgattacaaccggaacttctctgaaattggacgattcctgtttcagatgaccggaaaattcaacattgttactaaaacaaccgtaatctgaaacaggaaaatggcgggaaaatgcagaccttaatcttcttgagaagctcataaccagtcattccaggcatacagtaatcagtgatgatcaaatcaactttcaatctctgaaaatatccatttaaactaaatcaaactcacgaatcgtaatcttcaaaaaaaacaaaaagctgtatcagatttcaataacttacatcgaattcagcagaagctttctcattatctaaccctagaaattccagagcacgccatccactatctaccgccgtaactgacaaacgataccaccggagatgtaaatattccggcgaggaataaaaaaaagtgaaagatgtttttttttttgaaaaaatacgaacctttgcaggaagtaatacgaagcaatctctcgatgacaatacgatcaacgagactgtcatcaacggctaagacatgaacttcatctaaatccaacggcgcagattcaattcctccgataccaccgacgctcatcatctccgaccttcgtaaacaagaaacaccaccgtctctggccatagacgagcttatagtaactgtgaggagaggatgagaataaaatagagagaagaagacgaagaagaagagctcacatctgttttcttttgttcctttctcttccttaagacagttttttatatttctgatttttttgttctctaaaataaatcttttatgagtgtgtctttttggttttttcaatttttattttgaaaaatctccagcgaggaaaatccaacaaaatctttggttcctattaatgtgaaaattatatatttttatgtgccgtgcttttagggttgaaaaaattgaacttttatctttgaaaacaatagtattaataaatagagattttatggaaaatccggtggagggcctatgcgaatatcatagagaaaataatattcctaaaatcgaataaataatagaggagaagaaatccgtacaaaggaatccaaaaaataaaaatataccatcgtgagatatatacaacttcttagtcaaaatctcgtcattactcattagtgtgattggaaaaaaaaaactgaaaatggaatcactcactgttaagaataataaaccagaagattaaagaagctaattttggtcatacaccattacaattcatagtagcgtgtttaaacttaaccggctcggttcttcggattggtcttatttgtattaagtactaaccactaagacaattttatattgttccatgtgattggtcagtttctaatttaaaatttatggttcaaatgcaattcatagaataatattaagatcgggttttgtgggttgacgagaaaattagtatacgcctaactagtagtatatccatccatatgactctagaaattttatgttatccaaacacttttatttatatcgttttcaaatggcaaaaaaaaaaaaaagaagaagaggaaagtggacaaataataataaaaaaaaaggatttgacgtccacattaaaatttggatccgcgggacccagggaaatctaaaagagggacccataaatattttgttgggaacaatttgtattaatgaaagggggaattggactttacctctcttcttcttttttttctttaatcttccaaacataatttgctgtttcactcttttagacaccacaccgtatcaaatcttggagatcgcttttgctttctctttcccacccatttattatatttttttatataaaatatcattattatttctttttgttgaaagggtaaatgttttgattttctattttatttttaaaaattttatgaaaatgttatgacaatataggtgtttttaaaaatctcttgataataaagagctactattaagaaaaaataggtatataaacatgagaacaataaatatatataatgattctttggctctttattttttctagagaaacaaatttattccagattgaatgtaaactaaagacgaccaaatccaatactatgacattttcctacttaaagttaaagctcaaaagatcaggtttcaaggttgcttagaagttatcgatcacagtcgtggatgatcaaagtagagttttatcaaaagacttttgtttcttctaattgatagtgtctctaatttaatcgtttttctacattaaccaaaaacatctaacaaagtagaaagaaaaatgacgcgtgaaatagacaaatcttacaatggatatattgcccatttttataaaataattacgcgaaatttaagattgatttgagaattgatttttcaaacgatatgggccaacgaatgatggatcaaatcttcatgatgtcaactcaaaatcgagggttgaacaaaaaaatccataaaagtagtcatcaacgtgtcgcacataaaatcgtaatctatcttttttctaggaactttggacatcaattacaaaattaaagacattgacattttccctttaattaattttatgttggtactcgattgaggtttggagcatctttatattctaatcattattgtaaatattttctacatagtataatatatttgtagaaataaaagtaattgattagttgacctaattatacaatactcaaaatcatgtacacttgaatattttcattttgacgtctagattttgttacaggatcaatggatcatatagaaactcaattttagtctatacgtacatggaaatatagttgaatctcaaatccgaaaatccagattaatgtcaacataagctcatatctaatctacaaagcatttgttggataacatagattggtctttctccttccttggtatcactcttatgttgtctgagttatatctcctatcctattgattcttagacttttttgtgagctagtaattattctcttccaaattgtgctctctagctttatgtatcaaaaatttcaccatcaatatgaggccatgttgatctcgatgaaaacgaagttactcgtttgtcttaatttaagaaaattgtgggctctaacaccatattgcaaagtttttttttattcttagtcgttaattattatttgcgaagtttatacttctatttcgatgtgttatgcttattatcacacacactcatgcaagaaatgtttcaaaaacgtcaagaacaaggagcacataaaatttcataagttaagatttttgacataacaatcaactaacagatatatctcaacaatatatgaacatgcatgcgctagctctaaaagggggttggcaatcggagtagtgaagctttctatattttatgcccgaaactgaagattttagtgaaggcccaattgtgtctgtgtttgatccatattaatattcactagggtcggacagttaaacccaaccaaagccctgaacacttttcaatcaaaatggatatcgtaattgtcacttttgaaaatatagactaaacaaaaatgaatataatttaaccaaacgaaatgtaatttcatatacctaaagaaaccaggctttttagtccacactattctctgcgattcaagcctatttttttatagaaaaaatctctgcaatttgtctaaatatagaattatcaaagtcatagatattttggctgactttggagatctgcatcgttcaagaacaatagtttacgtacataaactaggattctatcctactttatctgcgtcgtaatcttttgatcttttctcgtcgatattacatgtgtcttttttttataatggatattacaagttatatatactctatagttgttagcttattatgcatgctcgctggaatagtttaagtaacaacaacctttggaatagtttttaagtaacaaccatttatttaagtttagtggactttttttttaatccctggtcttggcattcttggtgggcttcttttctttttacatataaactatcagagtgctcttggagtcgtctagaagagaagcaaaggttttattaatagggaaggtggggtccctctttggatacacttaattatcttcaacataattaaaatggttagtaaattcaacctgttttacataaaataaaataataaaatctagtcctacttaaatttctcaattcatctctaatacaatctacatgcatgtgcaagtttttgtttttcacttgcacatgtatacccgtgtttggaactctcaataaatctttttacaagaagaaatctatatatacgtaaataactaaatatgttgtatacaatgtctctgttatgagaaaaatagaattggttaattagtattctttctatgtctcaatgcatgtattattatatgtgatacgtacttcggtacctggcacagcccatgatcatatgatataactttcctttaaaagagacaaatacgacagctaaccctttttggtcaagactatagttaaaacttaaacatggtcaagttgcataagttttacggacaccgtatactactaactaacgtttcagaatggtttttgaattagtgtaaagttgtttgatacttcgatggcaatataatatatacaaatatatatgtaacaattaatatagaaggtgaggttgatatatataattggtgtatatatatatatataagttcagtatatcaaatattatagaaaccaacccacccacccacctagtagccaccataaagaaactttcagaaaatcataattagctaaaattattccacatgctattggataaataaaagattatcgttgacagcatacttatttggaattcttctttccctcgattgatataatattacaatttcttacttcaaaattttaaataaaggacctgagcgagaggaaagaggctttgattgcatgagacacctattggtggcaagaaagtctaccaatcagagatcttaggttgtacgagtgaatataattataacacctaataaggattaattattgttatttcacttaattgtcttgatctatcttttaagttacagagcagtggggtccttaattggaacaactgtccaaaccaaatgccatttcattagacttatttgtattaaaataagattatcccatgacttgattcacctgaaaatagaataatctatacctttctttaatatcagttttctttctgtataaaatattgtcttctcatgctttatgaagatttgcccaagatcttgttttgaagattagacttatgaatataatttttatttgttaaatagtatagatgcttgcatcattgcccacttcttgtattccttcatttggcaactaactattctccctgtttaatgtaataagtaattaacattcattaaacatggtcaagataggctttttctttctttttcacagtaattagacaaataagatttggtttaggtggaagacattgagataaattacaagaaagcttcaattcatgctccatcatcaattctctctgcgagcaactttaattgatgggaaatttcaaaaatctacaatgataattacataaaaacacatcaataaaaagaatatccagtagactattaactttgttagagaacaagggacgacgattcgtttgatttcgttcttgttgcaatatgctcttgagtgaacgttttgatacaaaatgtcatctgctcgcttaaatttatgatggatatatgcgttattcaaatacatagtgaaatttaatatcattatgggatcaaaatattatacttaaccttccatgttgattatattttttggcctaagttggttagccttatttcttcatatctttctttgacttttgatattagatcaataatatgatattaacatcttaatgttctctttaagcttagaatataacttttgtattaattgtcacaagtggtgtgatcgctgcatgccttttcaaatatatttatttattcatcatatctcaacttaatctaactattttattcacgcactaaacagaaagtatttttccacaatatttaaaataaattaaatttgatcaattttaagtaaatgtagatataatagtataatacataagataaaagataaaacaagttgacaagttaagtctttatatatagtatttaaaagatttctctaacccgttttatcattttgccctttttctttcccatatatgcatatgcgcgtggtatccacatatatctctataaaacctattacatgttagtgtaatatttattgtacctatcaaggtttattttccaagatcatttctcgtcacaccttagattcaaacaactaattttattataaaccctaaaatactataacttgatgctgttcatgactaatataaaaaacccttcatacaatataaaatttctttagacatacaatatattatactattacagatgcaatgcatcattagttacaaactattaaactaaatatcccccgtctctctcttgctatataaagaagatcatttacacatctccttaagcaaattaaacccatcgataaacacatacgttcacacatatatgtctataaatccgacaatgtctcgtactggcgaaagttcttcaggttcgtcctccgacaagacgataaagctattcggcttcgaactcatcagcggcagtcgtacgccggaaatcacgacggcggaaagcgtgagctcgtccacaaacacgacgtcgttaacagtgatgaaaagacacgagtgccaatactgcggtaaagagtttgcaaattctcaagccttaggaggtcaccaaaacgctcacaagaaggagaggttgaagaagaagaggcttcagcttcaagctcggcgagccagcatcggctattatctcaccaaccaccaacaacccataacgacgtcatttcagagacaatacaaaacgccgtcgtattgtgcattctcctccatgcacgtgaataatgatcagatgggtgtgtacaacgaagattggtcgtcgaggtcgtcgcagattaacttcggtaataatgacacgtgccaagatcttaatgaacaaagcggtgagatgggtaagctgtacggtgttcgaccgaacatgattcagttccagagagatctgagttctcgttctgatcagatgagaagtattaactcgctggatcttcatctaggttttgccggagatgcggcataacaaattaaagagagatatatgattaagattatatgtactatagtggcgtatttcattgggatcatgaaggggaaaaaacgagacatatagtattcttgatgcaatttgagttttgtaatttatttaggtttatgtatgttttcgaagaaaaaaataattccaagtgatgttgtggaattattcaaaaaaagaaaaaaaactttattagatggctttactagaaaattctcgatcatcatcgtcatccgatacaaaataaagtcaggtagaggatcgagcatttataaattatggaataacaataaatcgtactatggaagcaaatcattttcttgttccttagtttgctgaccgtacatatactagttgacaaggttaatccataaatctctttgtatcattgtgtgctgtgtttttttttttttttttttaatactgtgtgccgtgttggtgcatttgcgtaattgatggaggcaacattttgaacataatcactttcttgttgcttaattagtgtatatggccatgggtacgttcttcctattggtacatatgcatgtatttatattacaaggtgagtattcgttacaagttgtgtacatatgttcttacacgtgcaattcgtacacgcctcaatttgatttatagtcaaatttcaaaaaatttgttagaaatttcatctcaaaagttataatatgatctaacgtgagactaaaaaacatatgtgaatttgaatgatataaacttgatgtttttttttaataacctatatacttattgtaggtacaatccaacgattttatgaatgttgtattttttttgtatacactgtaaagacgattttatgtcatggctattaatataagaatatacattttaaaaataagattttaaactgatgtctcttaccaatctcaagacgagtacttgtgattcttcggagacaatgagaagagtttgtaaattctgaatactccttaaacgaacagaataagtgaatttagtggtggatataactagcttgactttagatcttattctttcaaatagatttggtgtaagattgattcgacatttcccattaaatctccaaacaaatatgtgcatcaattcgtaactgtacagctttaaaaatacatataataaatggagtcggcaggtttgtatattaaattaatttgcgtgattggaatgataagcttaagatccatcatccagtgttggaggtccctttaatttttgtctacacatgtcacttccgacaccaacggaactccatttgcttatgtgtgtattggatgcttatcccatttaattaaaaaaaaaaatgtttttaaaaggtattattcctttattgtccaattcgtatgtttcctaattttggtaaatatgtttttgttaagtttgaaacatcgttccttgcattacgtatgagtaaatcatacacgagcgtatgaccgagttggaatttacgtaatgacagataaatttgtacatttacgacatataaaaatatgaaatcaacctacatatctcttttttcctttactattctgaaaattctaggtttttgacggaagaagtgaaggctataatcacagaatggaggactctgtcacgcattgtgttctagtatgccatatttaacacttgtcaatatggcttcgaaaaccgataattttccctaactaaaaataaaataaatctaagtggccacctaaatgtgtttagttattatcatacatgcatgcaacattttatcatggcatgtgaaatgtaatcataatggaggatagactgcttactacttaaaacaataaaccactaattatcagttttgaaatgatttatttttgtttaaagaagagataatgttatataatgttgtgggagacaaagatagatccaagccaggtaaggttagcttgttgatctaaattgattaaagcatttgttgaacaagacttcgccatctgtaccacccattcttctttcaattatggattataatttagtaaatatcatatatatgcctccattataacttttattattgacattattgctttcttaaaagcaagtttatttatcaaaaactattgattggtcattgtgaaacgttatatttgaccgtcaataaaactatacataacgcaatacatacattattatatcaggtaaagactaagttatattagtatcttataaaatgacaataacatgttctacgtaaaaaaaaaggacaaggattatcggttactttaatagtttgaatgattcttgatctaataattaaaacattggcgttagatgtaagtttttgaaatttaaattgattttaaatgaatcagttgatctagacaattaatttggtagaacaccgatcagagacccttcttccagaaactgtgattataaaacgtgtactaagagacaagtaaaaatcttcgtttttcttaatttaatgcatagttggctatttgcgtgcatcattatttgcacaatagtaaatattcgattcacgtcgtgtgcaggaacccattcttttatcacttccagtaacttatgacgttttaggatatgaaacatatttcaccgttgatcttgttttcttgttgttgtttaatatcattcaccgttgatcttgttattgagtttttctttgcttttcaattcggttttatgtaaccgctaaaaattaatggagaagaaacccgtcttatacctacaaaccgggaaatgtgaagaagaaacaaaccggtcggttattgaattttagggttttaaggttttgaccgatggttgacttagggcgcgcttctctgctttggtacacacacacacacatcaagctgcttcttttacctctcttctcgcttcactcaccatcctcaggttcgttctctgtcacaaacattacttccgacgaaagaattaattttacagttaggaattgtaatcagtgcgagtaagtacaggaatcgaagccggttttgtgtttcttttgcttgatttttctccgtttattctcaactttgagacttttgcttcattggttaccctataaagcttgaaactttattcgaattgagatgttccattagatattttcaaacaagttcctgcctttttactctacattaagctaaaacctgtgtttgattgaatttttgatttcggcttaattaaggttaggcaaaaccaataactggtgtgagaatgaggaagaaggtagacgaacgtataaggactctgattgaaaacggtgttaaacttagacaccgttccatgtttgtcattattggtgataaggctcgtgaccaggtaaaattcttcttgttatagataatttctactttgcattttcctcggatttcaagtctaatacttttctgattctgttatgtaacagatagttaatcttcatcacattttgtcaaaatcggtggtcaagtctaacccaagtgtgctatggtgctacaagaatagactcgacattagcaggtttgatttatcaaccgattcaaatattagatatttgcaaaagttgaagcgttgaaattttgttattaaaaacttaattgaagcctagttaataattaggtgtgagtttcttttgaattttccatgccaagagaatgatggaacctggttttgtgagctatgttacgcatatttgtggagttctatttgttgataacttggtcctgaaaaagagtgggtgtaattggttttgtgtgcagtcacaataaaaaacgtgctaagcagttgaagaagatgaaggagagaggacaattagatcctgaaaaactcgacgctttctctctttttcttgatgtggtggatgttactcattgcttgtacaaagattctgaaagaattcttgggaatacttttggcatctgcatcttacaggtactcttgattaatggctgaagaaacatttacttttgctgcagcttactcatatttgcatcctattcttactatgttcaggattttgaagctctaactccaaatctactagcaagaacaatagagacagtcgaagggggtgggctagttgtattattattacaatcgcttgcttcacttactagtctctgcaccatggttatggtatgaagactgattttgctagttatgttgtttgctaactacttatttggagttacatgattggttctgttcatatcaggatgtgcatgatagatttcgaaccgagtcacactctgaagcttccggacgtttcaatgaacgatttctgttgtcactagcatcttgcaaagcatgcgttgtcatggatgatgagttgaatttattgccactttcatctcatatcaaatctatcacaaaagttccaacaaaggaggtaatttctatagcaaattcacacttcttttcatgggttgtttagagagattgtcttccatcataccagttagcatctttaacttttcaattttatgtgtttgtaataaaaggattcggaagcgctttctgaggcagaacgagacctgaagagtttgaaagatgcactaaacgatgattttcctgttggtcctttaattaataagtgttgtacattggatcaggtatgtggtttagtcagctgtgcacattggattaagaagtgttgcacattggatcagtattgaattttctcttttgtagggtaaagctgttgtcacatttttcgatgcaatattggataagaccctccgtagcatagttgctctgattgctagtcgtgggcgtggaaaatctgctgcacttggtctagctgttgctggggctgttgctgctgggtaggcttgagttattttgagcttttattcatgtttgttaatagtatttattgtcttattaattctatatcgtattttctgttaggtactctaatatttacgtaacagcaccgagcccagataacttgaaaacagtcttcgagtttgtttgcaaaggtttcgatgcacttgaatataaggtaatatgagcttcttctgcatcacacatatgaagcaattttctagaaactgctggacttcttccattttgttggggttgtcatagatttgaaatctgcactatctcctggaagaagaaaaatgttactttgttttgcatgttaattcaggattaccatataattttctgaactctatcttcaactatatatttgaaggaacatcttgaatatgatgtcgtgagaagtgtgaatcctgaatttaataaagccatcgtacggatcaatatcttcaagcagcacaggcaaactatccaggtctgtccaaccctgaatttttgtaagaagccgtagtttgtgtcgatcgataaattgctttattcttcttcttttttcatgcagtatatacaaccgcatgaacatgaaaagctctcacaagtggagctgttggttattgatgaagcggcagctattcctttgccagttgtgaagtctctacttggcccttacctagttttcttatcatctactgtcagtgggtatgtgaaacaggagtaaaatgcttatattcccatgatattgaaagatatatgcatggcttgattatatatagggtcagtcaggctgctgatttttgtttgttttaccttctttgccaaagctatgaaggtactggtagatctttgtccctgaaactcctccaacagttagaagagcaaagccgagcccctgtcactggtgttgaaggctctctttctggtatttactactacatcttgctttcacttttggcatgtggcaacctggatattttttttttgtagagatcccaatattattattaagaatatagaagttcatcttttttaaaatatcgctccaatgcctttgcgtcggggcttatcagctagcattttcataagaaagaaatttatgtttttgaagtaaaccattgctccaattcctaagtttgaggaatatatgtgaatgattttttccaagaacgtaggttttgttgttaagtttggccttaagggcctccgaaggttgattgaaacttcatgcagagtagtcctctgtctgatgggtgttcatattcattagaactaatgttctctcacgcagggcctactactttcatatcttagtatgtagtattagatatcctctttttcctacactatctagttgatgtgattcgttatcttggggaactccgtgactgtctgaattttctttggattcaggttgccttttcaagaaaatagaacttagtgagtctataagatacgcttctggagatccaattgaatcctggcttaatggattactatgccttgatgttgctaattgtcttccaaatcctgcttggtatggtatttcacttcatataaatagaatgttgccatcctttcttgccaactagtgatctagaaaatgatttctatttttcttgcatttgtagccatcctctgccaagtcagtgtgatctttattatgtcaaccgagacaccttattttcttatcacaaggacagtgagttgtttttacaggtaataatagttgattttacaacctacgtactttttgctacctatattttgttaataaggcattaagtggtattctacagcgaatgatggcactttgtgtctcttctcactacaagaattctcctaatgatcttcaacttttgtcggatgctcctgctcatcatttgtttgtgttgctcggtatgcaattgttcctccttttcatagctagagataatcatcagatttagagtattgccttattttctttttggcacaggtcctgttgatgagtccaaaaaccagcttcctgacatactgtgtgttattcaggtatcgatttcttactttctgctctgctctttgaaattgtttgtttggagaaaaacagttagttggactaaacaaagaataaaagcagctatcagtctgcttgaattgtttgtttgcagcaattttgttttgtaaaatcatgaatctcatatcttgtcgttcgtatgtgattgattctggatgtaactggtcttaagtatccttgaaattgatatttatgcaggtctgtctcgaaggacagatatctcggaaatcagctgaaaaaagtttaagagaaggtcattcaccacatggagatcaaataccatggaagttctgtgaacagttccgggacgtggtctttccaaagctttctggtgctcgtatagtacgcatagcagtccaccccaacgctatgaaggtaaagtttcttagtcgcctcatttttttagtcttgtaggtttcttgtgagatttaacaaattcttgattacattctatgtagatgggatatgggtctgctgcggttgaactcttgaccaggtaaatgcaatgattacgacttagatgattaatacatgcaaatattttaattgattgatacgtgcagatactttgagggtcagctagcttcaatatcagaaggtgatgatgaactggaagtggagccttcaccagtcagagttaccgaggctgctgcaaaggttcttgattattttaatctacccttgtagggttttgcatcatgcattctagttcttacttgaattttttcccttaggtttctttgcttgaggaacagataaagcctcgtgccaatcttccacctttgctggttcctcttcgtgatcgacgacctgagagactccactacatcggtgtctcttttgggcttactttggacctcttccgtttctggagaaaacataaatttgctccattctacatcagtcaaataccagttgagaatccctctttccctcttctcctgaattactaattctagtgttgtctagcagttcataacacaatttctaaaatatggttggatcagagtgctgtgactggtgagcacacatgtatgcttctgaaaccattaaccttaagcaacgatgaattcgaagttgatgagtcggatgaactgggcttctttgctcccttctataaaggtttgtaaattcttaacaggaatcaaatgtttctgtagcttttaaggatgacaggttttgttttaatgttttggcaaattcttctactctgttcagatttcaggataaggttctctaaactgttgagtgataaattcaagaagatggattataaacttgcaatgaggttagcactaatcatattctctccccatgcaaatttagactttttctgcaatactattttaagatgattagacttttcttggtgcggtattattgtgttgataatatactcgtttcacaattttgttagtgttttgaaccctaagatcaacttcccagaggttgatttgactggaaattcaccagatggatttttgaagaaactcgacggagttctttcaccttatgatatggagagattcagagcatacactgccaatctcgttgacttcaatctggttagattcactctctgagagtcacttattttagggaaatatgtactatagtcagatatgtaatctgcttaaataactacacaatcataagattctggtacagactcagacaaataatactaaccgcatgttcaagcttgatactctgtcttttcgtttggtttggtaactatttttactttgttatcttttcaaaggtttatgacatctgcaaaactctagctcatcattattttcaagagaagctcccagtctcgctgtcgtatgttcaagcttctgtactcctgtgtttgggcttgcaggagtcagatttctcgagcatcgaggtataacatatctactctttaaaataaatcgatgatctggaccagctgaattatgtttcaccacacatgtggagataaatttcttgacacatctggttgttctaaattggatcatgacgttgacttacagagacaaatgcagttggagaggggccaaatatactctcttctattgaaggttggaaagaagttatacaaatatttgaatggaatcgcaacaaaagagctcgaatccaccttacctcggttgaaagatgtaagttcagatgggaaaacttacataacatttccatgttcttttgctcagtcataatattccctcatttttgaaaattaacaaccctaagccctaaatacatacacgaatatcgagctgactgaaatgattcatggttgcttttggttgcagagagtgcttgaacctcacaaagtatcagtagacgaagatctcagggagggagcaaaagaagttgaggtaatcgcttctgtttccgtgcatgcgtatattttgttttggtttccatgtaaaatcgaaacaccactcacactctcaatgcttgggtttaaaggaacaaatgagggcaaggatagaagaattgttggaccctgagctacttgaccaatttgctattggggacaaagaagctgaggctttgcaaaagtcgaagatctcttcaagtggtcttatcagtatagagtccaccaaaactgataacaagaaagagaagccaagtggttttgataaatcagccaaaaagagaggcaatgataagcattcctccacatccaacaaaaagagaagagcctgagatggaggttgatgtcaacaattgtttttttgtaacagtgaccagaaaattttgatctttggtctttttacgaatttttgtaaccaggttgaataatttattaaaattatggtttgatcatacaatttttttaaaaaaacttacagattctgtttgagcattctacaaccataatacaaagttttctattaactataactatattgtttatctactgcaatgtgtgaaactggttcacatctcggcagcaaaagacttcccacatccacaggtttgtgtagcgttagggttcgagaaagagaagcctccaccaatcaaagcatcgctgtaatcaagctgcattccaaaaagaaagagcatgctctttggatcacaaactgcaaaagaagtgagtacaaattaaaaacctgagccttcaattcacagatgtaaaaatactttactgcagaagacaacaagagactgcaaaagacaacaagagactagaagtctcagttcaagaatcggcagctaagtagtatataattcaagctgcacatcaaaaagaatcaactgaccatctacttgacaataaaactttagcctatttgatcgaacaatctcagccttttttttatttggatgcatacttgaacacagaaactgacattcatattgtaagtatggcaagtctacatcatcaagaaactagctgatcttactctcagaccttattatctcagattagaagagttgatcctacatagtgatggaatagtttttacctatagtgaatccctggtattcgatagtggaatcatctggtcttgcatttgctctgttttcaaagtccatcgtgtaggacatacccgagcatcctccttgtttgactccaattctcaagcacaaatcttccccacgttctgatctcatcttactcagatgcttaagtgcattttctgacagagatatcgccggcttcagtccctccattgcaggtgcagctgagatattcaagagcacaagtcactacactttttgaattcaagagcagaacctcactacacatatctaagtaacagctattaccatctttttaagaattctcagacatcaccaacgaaagttatcaatttcaatagaaagtttctaattttaaaaccagaatggcaataacaacaaaaacaacccagaaaaaataaaaaggactctcataggaaaataaagcagagcaattttgtgaatcaattcgaacctggaaccgaagcggatcgaacagaaaggcggtttctccgattgaggttgagattcacatatgacaaagaaggaaacgaaatcgaattacatgaaaccacagaacgtagacttgtgttggagatctttagaccaagaaaagttggatttgaagacgtcgtgattccagtagcgaaagccataatcttctgagaattgaatcgccgagctgaggaattaatctctctgctgattcaaatgcgtgtagtagaagaagaccaatgaaaaaaacaaatctttttgcataacaattttttaagtccacatgttatttgttttcaggtaggtgattgattatttttgttatgaaccctaataaagtcgttctctttcgaatctatcgggtcataaatttaaacccgatttcgacccggtggatagtcgggtcacacccgtacctaaaggaatacacacacacatagcgcgaaggaaacaaacttcatcttcatcatcgtctcttctcttctactccaattcgtctcttttagtctcttacactttcctaattcttcagtggttggttttcacacagcgagagtttcaagcgtctatgcgtaattaagcagctccttaatggcttcttcttccaccagctccctcaatctccactctctccccaaggtaattctactgttcatcctttgtttttttttcccaattcttgtagcttctaaattcggtttctttctctgtgaattttgaaggcttcttctgggttgggccaatggaagagtgggttccggtacgaattgttgggtagctccgtttctaggaaccgattgtttgtttctcctgtggtgattcatcaccgaagtccgagacttccggcgatcaaagcggcgtataactcagatggaggctcgaagcgtagtagggtttataaggagtcacaagcggctagtggttttcctaatgctaaagtgcagcagattgcgtcttccgtcttgcccttgggatcatttgctgtcgtcactttcggtacgagcattgctaggagagctagttttgtttatccgtcacttctcaaaacttggactagtattactgtgttttcttctttcatgtggaagtaatagagcggaaattagtttgcttgtcatgtaattcggtgattgctatctatacgagaatagtaatgataaaagtttcgtcttttctctcaaatcttctatactaatttgtgttttcagctgacagttttgtggaaagtggttgggaagttcatgtcgcctaagtctccaaagacttctgctggagaaaacaactcttctacacagggagtgaaatggtcgatcggggccggtactaatttgttacaaggatttgctgctaaggttgatagagaggccaagcagaggcttaatgaatttgcaaaagaacttaggtccttcagaagtgttgacatgtcaggtgcattgaatgattttaactgttatgacattacttattactgatttacattagaattaaatgtgatctgtagtgccatcttccttttgtcttaatatacgcaaatatagctcacctgtatattttatcttgcaggatgcaactttggagatgaaggattattctttcttgctgaaagccttgggtataatcaggttatagttctctccttctttcacatctgctatctaccaactcattagagtcctgatattcttatgttgattgactaaccatacccatgtttgtgtttcagactgtagaggaagtcagtttttctgcaaatggaattacagctgcaggagttaaagcctttgatggtgttcttcaatcaaatattatgttaaaaattcttaatctttctggaaaccctatcggtgatgaaggagctaaggttagtggaaatatgatatactagttttaaatttaacttccgggtgtccaatggtagaaattcctcagttccatcaagagaagagatcatatcgatttctgcttatatctttagctctaaaatcacatggaacttattctctatgtatacgtttctggctgagaatggtttcgcttcattttttctggttatggcagactttatgcgctacactgatggaaaattctagcattgagatacttcagctgaacagtactgatataggagatgaggtttgtttgagcagatgctttgatttacatgcttttcaagctcctaagttagtcacaatccttcaaattgttttcatacgttaagtagttccaatgttcttgcgcagggtgcaaaggaaatcgcagaattgttgaagagaaattcgaccttgaggattattgagctgaataataacatgattgactattctgtaagttttttctgttcatgtgttgtacagttatatttcagattgacataccaagtttatgaattaaatctgttgcgtcttcttcccttctttttttgaaatggaggtagggattcacaagtcttgctggagctcttcttgagaataatacaatacgcaatttacatctcaagtgagtttaggactatagatggatatatcttttgggcgtgctttttttattttgtctgtatagttcatatccctgacataccgatttatggataatctgtttcagtggaaattacggtggtgctttgggtgccaatgctttagctaaagggcttgagggtaacaagtctttacgggtacaaactttcctcatgtctctttcgatgtatatcgtgtgccatttctatattaaaagagacatttcatagttagatctgttatcttatatgatgcattaaaggtgatttctgatgtcatcagagacaaccaatgaataaaggtcatcaacagttgatttattcccttggcctttccacctgcaggaacttcatttgcatggaaactctattggagacgaagggactcgtgctttgatggctggtctatcttcccacaaaggttttccaatagaacacttgtcatacgtctatattaactcttccgtacctctactgtagaattcagtagttataccgagatgcattttcgtgtgcagggaaagtggctttgctagatctcggcaacaactccatttccgcaaagggtgccttctatgtagctgaatacatcaagagaagcaagagcttggtttggctgaacctgtacatgaatgatataggtgatgaggtacatatatatccaatttataacaataatctggattgtgtctgtgcttctctaatatcggaaaaccttgtctctttttgctctgttgtctatcttaaagattttcaatggtttcagggagctgaaaagattgcagattctctgaagcaaaaccgttcaattgcaaccattgacctggtgagaagtgaccatcttctccagcctccctaagttttccttgcgtccatatcgagctatttgttctgctaacacgtttttggtaaaatagggtggaaataacatccacgcggagggagttaatgctatagctcaagctctgaaagataatgcaattattacgacggtcagtgccaaaaacccttctcatctttgattccttgtttacgtataactagtatgataatgacactaccactctcaatatttcctcagttagaggttggttataatcccataggaccagacggagctaaagcattatctgaaattctcaagttccatggaaatgtaaagacgctcaaacttggttggtgtcaggtaaagcctgtccataactctttatctaggaacaaaagtatttcttcacagttacttatttcgttttgtcatggttcctttcatttcttattcctgcagatagctgccaagggtgctgaacatgttgcagacatgttgagatataacaatacaatctcggttttggacttgcgggcaaatggacttagagatgaggttcctgcagacagattttatgagtatcagatttgtacttctaatatagctacgaactatatgttttcataatgtatgtggtacgttatttgcagggagcttcctgcttagctcgaagcttgaaagtagttaatgaagctctgacatctgtggatctaggattcaatgaaatacgggtaaaaaaaaagcgctacttcgtttatcaatactgtgtcttcttttaagacttgtaagcaggtcaatcttattattttgcctcatttgtaggatgatggagcattcgccattgctcaagcattgaaggccaatgaagatgtcacagttacatcgataaaccttgggaacaacttcatcaccaagtttggacaggtaagaaacatatggtgcaatggagataatcaaatctttcgctcgacattgctgagaaatttcccttttgtgttatccagagtgcgctcacggatgctagagatcatgttcttgagatgactgaaaaggaagtagaaattttcttctaggagagacattgaagtgaagaagactttgtcactctgtaattttgcaccattagttgttgtttcattatttatgacgttgaaatgattcaagcgagagataaaacatttgttgttccttacggtgagatttaattttaattcaaggaagttttcatgaaaaatggtgttgactaacaaaagagaggcattttaagtcaaagttggtcgttgaatgaggaaaaaattcattcggtttagaacaggttatttcggtttggttccgattcggttcgttgaaacgagcgtaattgcctaattggggtattcctgctttgaaagacatatactagtttggtggacaaaactcgagtgagttacgagtaaagcgagaaaaatggcggcaaagcgagggagaaaccggtcgccgtctccggacccggaagggatgttcgccggaatggtagttttcatggttgaaatcggagtccagcgtcgtcgattgcaggttttactctgaaaattttgttcagtgttattttacttgcatcatcttcgacaaatttccttaacatcttctttttaattgttgcatgctatgtctgtaattttctctctatttgaatgaagatctggaagcagaagctggttcaaatgggtgcagtgatcgaagaagatcgggtaacgaagaaagtcactcatgttcttgccatgaatctcgaagctcttctccacaaatttgggaaagaacgtctctcgcattttacagcagtaagttggtttttcgttcttttcagtttttactaaaaaatggatttcgtcatatagaaaaaacaatcttttataactatctgttgtgttgttcatgagttttctctacgattagattaattgggtacaagttttatctacgaatagagattatccagtgttacaagtttatatacattggttgttccttgcagcgccttatgctttaccagtggttagaagatagcctaacttcaggagagaaggctaatgaagatttgtatgttctcaaaattgactcagaagaagttgataagccgaaaaagtctttgcctgcaataagtggtagcgaggatcaatcttcacctcaaaaaagaaccagatattctcctgatgctggtgacttcaaaggcgttgaaagtcatagcaatacacaaggatcaccggattcaccaacaagttgcagtgttccctctactagcgccagtcctggagaaggcatcgcagagactcccactagtccacaatcagaggtaagcctgagtgactcctttgctgatgcatccttttggttcttagaagttaactaaacaaaaacctgttttctatatctgcattttcagaaagaaataatgttgttgatattggaagttctcattgatcttcttttgatttgtagtccacatcggtgtacaaaccacccgatttgaacagaaatatcactgagatatttggaaagttaattaacatatatagaggtacaatctctggtgtttgtattctagactactcgcttatagtaagtaagtaacaatactctttcttttttttcaaaagctttgggtgaagatagacggtcctttagctattacaaagctatccccgtcattgaaaagttccccactaggattgaaagcgttgatcagctcaaacacctccctggaatcggaaaggcaatgagagatcatgtaagttgagaaatgcttcaaatgttttgtctaggttctgtgtgtgggtgtcaaaactgcaaacacttacccttttcctagtgcatacctataacctttgttttgatgtatttctgtgagaacaaagtcttattcttctacctgaatttggcagattcaagagattgtgacaacagggaagttgtccaagcttgaacattttgaaacagatgagaaggtaattttgaagtccttggttatagttattttgctatctcccattttcaattagatacaagctcacatgtagaggccatttgcttttctcttgttcctttttctctttaaagaaaaatactgtcaatgaccgaactggagctagagatgtctgatatgttttgtttaccactataaatgtttcattactatggttgaaggttcgtacaatcagtttgttcggggaagtttggggtgtcggtcctgcaactgcactcaagctatatgagaaaggacatcgcacactagaagacttgaagaatgaggattcactaacgcatgcacagaagttggggttgaaatattttgatgatatcaaaacacgaattccacgtcaggaggtgcgattcttaaacttcaacgtgaattttgtttgtctttattatccttcttgtaattttctcctcatatttcttcactttctgtattgtaggtgcaagagatggaacaacttttacagagagtcggcgaggaaactttgcctggcgtatgaactattcagtttatcggtctgctccatatttgggtgataaaagtttagtgaaatcctaaccaacatctttactgcaggtgaatattgtatgtggaggatcatatagacgtgggaaagctacttgtggagatctggatatcgttgtcacccatcctgatggacaaaggtacctacaatcttctttcctcatcttcctgcgttagtttcctgtaacaaagtttacttaaactgttttttcttattgtcctgaccagtcacaagggatttttgacaaagtttgtaaagcgtttaaaagaaatgaactttttaagggaggatctcatcttcagcacccacagtgaagaggtaagatgatctgataaaattatttaagagaggatctcatcttcattgaaaacacattacttcagttgtttcagtatcttataaaatgatctcttttagcattagataaagctttgttctctcagagttgcatgtgtaacaaaaattcttgttcaatcacagctcctcaatgatttcccttattgtgcagggtactgattcaggcgttgacacgtattttggtttgtgcacttatcctggtcaggagctacggcgccgtatcgattttaaggtaacacctgaaaactcctaatgtcacacaatgcagaaaagaactaagtgggttagtcaaagataaaaaggacaataccatgattgattcagctatgtctaggttgatctcttcccggaagatcattcaataaatagtcttttttcataggtctatccaagggatatctattcgtttggactcatagcctggacagggaacgacgtgttgaacagaaggtatggatatgatttcatttgtatacatgtctcactaaacacatttgttggtagataaagaacacagcatatgtatatatatatgcgatgataactgcaggctgagattgctagcagaatcgaaaggatatcgacttgacgacactggactattcccagctactcacagttctagtggtaaccgggtaagtaagggagaaaagtgaattaacttgatgtgaattcttgggttttaaagtgaaagaatgattatgttgaagctgtgataatgtttgtctctcagggtgctagaggaactgcaagtctgaaactctcaacggagaaacaagtttttgatttcttaggatttccttggctcgagccacacgagaggaatctctaaggcatcacaggcacacagcctttggtactaaattttttttttttctttttgaataggttctgtatgtaagtaatcggttcctttttgtaattgcatatccatggacaactgatttagatgttacatataatgcaatgcaatgtacttgtattagaaaccattgcatatctttaaggtaaactaagaaaacctatggtactgaggaaacttgggatctcaatttttttttaaaatacaattcctttactaaataattaattacacgtgtcataagatagttggattaagtgtggaaataagagtgtcaaatgtcccacatcgaaaagccagcagaaaaccaatttgtatatataaggacacaaaagatagatggtcacgaccttacttgaacaggatctgttctataggctcgtacctctgtttccttgatttctaaggagacaggccctaaaccctggttgatgaaccatgaccgtgcggtcagagcgtgattgatggctacgatcgtcttcggacgcatccggtgctgtagaggatcgttactcggcttggtcttccttgccggggtggtcgcacggcggtctgacaggttctttttattttaccctcggtttttttttttttttttttttttttttttcaccctcaaaactttcaatttcttacattttcaccctttaattgaaacctcgctaaaaccctcagctgttttattgcagaaaacaagagataaggttgaagagtgaagcaaagcttagtaatggcttcaatgcacgaagctctgttctcttctcggcttcttcaagtcaattcttctttttccttccgttgcgctcttccaattatctcttcaccagctgcagtatcttgcgcaatcaaatcgacccagttttttaaacagcgttgtagaaccaaagtgagggacttttctctatcttcactgtcccggagagggttcgtttgcagagctgctgagtacaagtttccggatcccatacctgaattcgccgaagctgtgagctcatttcctcttcttcttcaactcatttttgatggatgatcgaaacctaattgatgtgtgatataaccaggagactgagaaatttagggaccatatgttaaacaaactatcaaaaagagatctttttgaagactctgttgatgaaattgttggagtctgcactgaggtaatctcaaatcttctcaccttcactcatgtatatctgttcgtgtctatgtgagatgtcttgaattgtggtgtttttagtaattgtgttccatttcaaagaactcaaaagtggtgtaatttttagtctcagtttctgatattttcttaacatgcctcaaatctcttattcttgtgatgaatgagaatcctgatctgaaattgtttaggtaatgtaatcatcttttactgtcaatatgctagttttggaattgcaatggtgatgtttgatcgaagttttcctagtttgtatgattgtgattatgcaagcattttccttaaatcttgaggagtgattttgtggtcttggacttagtcgagcttaaggcctagaatggagagggtcatgtgattcggtttagaatgtgaaggagtggttttcaatttgaacccatcttgaaagctcagtgaaaaaaagtttgtattgtttgaaaatgagatgctgtggtcttagtaatgatgccttggtgaggatattaatctacgtatggtttacaatgagtcgactgtaagtttttgtttcatgagtgatactttaaaccccattctctaagtctgttatatgtcttggcatgagactcagggagttttaacagttttttgttctgcaccattgtgattattgacagatcttcgagacgttcttgcgcagtgagtatggaggacctggtacactcttggtgatacctttcattgacatggcagatactctcaacgaaagggaattgcctggaggtccacaagccgcccgagcagctattaaatgggctcaggatcatgtagacaaggactggaaggaatggaccggcactgattagtcccctgggagcattaagtataatccgtgagttatttagtttagtagtggggtagcagatgtgtcattgtaaaactctgattactatgtcgtgaagcacttaatctttgatcaaaaactgtttggtgtaaacttgtccaaacgactggaaacaagaaaaagaaaagatggcaaaagctttttattgttcttattcagaagctttgtgtcctctgaatcaatctcacacatcaacaaaaaccacacttcttacaaacttccatcgatttccccatctgcaaaaatatatacatcgacgatagagggaaaaaaaaggaagaagaagttctgttttgttgactctcttgagctttctctgtacttatctcttcacatcttcatctagactccatccgtttatcctctgtaatatccaggaaaaaaaaaaacagaaccaaaaaattattcagtagagtttcggatcaggctctccactctagatccagatactgtttcgaacaaaaaccaaaaacattcagctagtagcttcggagatgctctgaagagacggcctccatgttttagactttaagagggaagttgaattccttataacacgaaattgcttcccttgtttcttctcctatcaaataaaacacaaacctcattaacttgattcgtctatcgatcatttagacgaaagaggtcacagttttttacgtcacaattcaaaaacagagtaaagatagatcttttagcaaaatcccatgtctttaccggaactttcttgtccgagaacttcttcgccgtggttgtcttctcaatctgatgttttttcgtcttggcgctcttcttttcccgtaacaccttcatcacttctgtaaaattacaataaccatctaaaaccataaactccaatcacacacacgaggagaaaaaaaaagaaagaaagcaaaaggcgaaaccttgtgaagtaatgagccggtaagcgtgaccgagcacaagattctccgttggccggagaagctggacacgtgtaaacctcacagccttcctctgcttcttatcatctcccttctccgtcgctggaatattcttctcttcctcctctgacaaaggaatgatgagagagacgtagtgaccaggatacatagccatgacctcggtgacggatacagagctatagtaccggtcgataatcccgccgggatgttgtagaaccagcactgccgcattcaccgcctgacaattccccatatatgcagtgggagaaaaaaacacactatcttttgatgttacctaagaaacgaaagaaagaagaaaaaatgaaaacagagtagaactctgtgaaaaaaggagaaagcggaagagaggaaaaagtttgccggcgagggtaggtccacacactctgctactctcactttagctttacttataaacatgcgaaaatcccaattttatattatgattttatttgttatcactagtgtagagttatttatgatttttattattgtttatgtagatttgactgtgatcagtgccatcgggaattgaataggaataagatggtcagaatttaaaagtcggttagattggacaggtggcgacgccgagactatggaagaaatgattaagatgtgattgtttaaaatggaataggtttggtatacagcatgaggaaaacaagcactatcacataccaaacattttgaaattgctatcagtgatttactttgttttatattttactatttggtaagtttgagttactttagatattctaatcttttttgaattaattgaaattaagctgaatgatttttatggttcagaatgatttgtaagattttgtaattcttagttttttgtttacaagagattatttttgtcaacgggcaaaacagaacgttatacttcaacattaaacgtaaataacgtaatgaagacttttgttttctcttttgcaagatccaatgcatttccactaaggattgtttgttttatatatcatctacctaaattgatgtataatccacttcatccctaaaaagaaaacagaatatatttacatcaaatgtttactttcctttcagtttctcttgtatattttcgcatatctatgacttgattaatgaatattataacccccacttcatccataattcagtttctattgaaatctttgtatgacatcaaatgtttacttccctttcaaggaattaggaatatttcatagcagcactttaatcattatcatcagcgcgtgcatggagttaaatgcgaatgtctttaggcgtgacagaagtgaagctcaacgaattattatgtagtagatgtagttagattaaccaagtgtaatttagttttgctggttaatgttatatatcttccaaagaggttatattacataacttacataattagttaattactacattccatgaatcacgatttaaactttgttttaaaaggattttggtctagaaatcaaaataatagagagaaacttcaaattgtttatttggtttactcgcagcgactagtttcacttttcaggttgatgtaaatggataattttattatttcgttgatatcttattcattattaaaatttcgtgttttattagttattacttgtgcatagcctattttaagtactataatgttgggttaatactatagagagtagagaccgaaacagtttatgcggcaaccaacacgtaagaaatcaagattttaagattgtaaattatgcatgtcctttcgttttctgttagagccaaatatatagatcgtcagttttttgataatgataaacaacatcgtaagtttaaatagtaccttttcgttaaacacaaacaaaacataagtagtacagtaactaaccattaatatttcatcaatgaatatatctaacaatttcgaatcccaattattatttactactgaactgtgatcacatgcatgaacatgaatcccaatttcgagtctgagtgtactttgatgcaaattttcatgagaaaagatttcactgaaaaattgaattattaatatataatttttttgttactttttttgttactggatttcaaaaattagagaacacaactaggcccaaatccaacaaaagcccaataattaattaaaatggaagtcgcaggtcccacatcgacttgagaagaaaagatgacatgacaacagatgaagactatttgacaggcagagacaatcttcttcttttcactgtggaatcttattcgaacgtttctaaaagaagcaaacgagatgtttgagatgtatatatacacaatgaacgatagatgttacgctagagagatggctaagttgttagatcctaaaggaaagtatttcagcgatcgaattatttctcgtgatgatcgtacggtgagacataagaagaatcttgatgtttttgatgggaaacgaagaagcagaagctgttcttattgtcgatgactcgaagaatgtttggttagagattgagagaaatcacttctttgcttcaagctgcaaacagtttaaggaagattccaaatcgctgtcggagttaaagatggacgagagcgaattcgatgtatcacttagtactgttattaacgttttgaagctaactaatcacatattttttgaagacacaagtagagatgtgagatcagtactgaaacaagtgcgggaaacaggacactgaatcgatcaaactctgtttcttgaagtttacaatgccatttcatcagtgagaaggaaagtacttgctgagattgagaggcaaagagtagaactcttcgcttctgttatcagattggaacgatttaaatcgcttccaccaaactagtcctcgatctttctttgtcgtcttgtcctttggaggcaatgtcgtgtctagaaagaaggccaaaatcccggaaacaaatgctttagatgagaaaggaacgtttataatgttgttgaactgcaaaaagaaacagaacaatttgagcattagtttaatttgacgatatcaaaagacgtggttttagtgttttacccatgttgcggatgtccgaacgggtccataggtttccaaagttgtgtactggtaaaagtattgaggtatggataagcccatgaagatggagaatccaagaatgaacttagttctgaaactgttcagattgcagaactggattagacttagaccaccagcacctgcaatgttttcagttttttgagcaaagagatgtgttccttgcggttccaaaaacaaaaaacagaacaactctgtttcagtagtttcaagaattgtaccaacgtatgagaagaacaaacagtaaagagctgcgacgataggagctggaatcgaagcaaagatagccccaaatttacctggaaatgattgcaaatcaattgtgtttatctatgtaacagcttcagagttgtatgttcagtaatagctgagagaaataccaagaatggagaagaagatcatgaatccagctgctacttgaattacacgtctactaccaacgcgtgttacagccaacaagccggcattctctctacaaaggatcatcaagaaacggtttcaacatctgacaaagattgttgttcatttcgaataagagaatcttttctgcttttgttggagattagagatgaaactgtctttacacagacacggatgttgcatttcctgctccaaataatccacagagaagaattccaaatcccttaaaaacagagaacctcattagcaatgacagtttggatgatgccatagagaaatatttgagtcttttttgtgtgtttacctgccaaccgattccacgactaagcacagaaggtgggattggtgttgcacttgcatatctcgatacagcaatgtatgtccctgtagactgttccattgatcacacaagaagaatcaatcacatgcacatctgtctcaagttgtactaaaaaaggcgaggagaaatttagagttagacctcgacaagagaaacgaaagaagcagccatcatagcaaaaatatcccctgcattgaaagttggagctcctccccattgaatagggtgaggcactctaatcctgcatgcgtagcatttaaaaacatgtctagataaactaaaggatacgagttttatgatctattaccatggagaagcgctaatgatgccagcacggtcggttctgcaactgatttgagtattgatttctgtgttactataagccccaccaatggttagaatgtatgcataaagccacacaatcaccactgagaatatcacagcaaatcggtggaagaagttagaacatgtttctccttgcatcagatgaggaatgtactgcacacatcaacaaaatggtttggttatacaacacagaaatgagctttgtttttagattatgggaagatacttacctgtgagaatatgacaagaagtatgatctcaggcagtccaatctcaatgcattttgctagctgtaatatgcggaacacaaactcaggagctgaaagtaaaaactatccgagaatgatatgtatgcataccatagggaatccttgttcatagagtccaaagccagaaaaggctacaagaggaactgcagataagggactcaaaaacctaaacaagagaaagaaaaactacaatttagacctgaaaacaccatcatcaagaaacagaggaaactcactacatgtatgtatttctaacctagtaacattgcgccaaaggccactgaaaccaacaaggatatgaagaaatgaggcaataataagagcaccttggattccacgcatgatctgttcaaatctctgcattttctcatcaaggaaaaaaagcacacacactcaattagtaaccagacttgcacaaaacacagagaaaatgtgattcttgatttccttcaccgaccttttgaggatccataatgtcattgtaacgagcagctaagacgattgacattgtagttggcacataagagtaagaagctccaatgacagcaggaagacgagtcccaaagaagctttgaaataacgtgttgattccagacacaaagagcaacgtctgaatcaactttaccttatcttcctgcatttgagacaaaagacaagaatttttataagaccagagagtcttatgttcttgtaacaaatttcagcaaaagacttacgtttcttgcatcaatctttgaaactaacattgttggaatgagaacagttgttccaagcatcactaagtagtgttgaaaccccagaagtattgtctccgctgatccgaacaagaggttagtttagaaaaaatctttagtcgttttcacaaattttgataatgattagggaaaaatgtgagaagaacttacgccaaggaggaggacttgtgaggcagtaagtgataccgtaaagttgatccttcaccggatgaggctgaagatcttcctgtttctgcggtggctttgcattttctacgccatcacctgccattttttcttatccttcttcttccagtgaaacccaaaaaatcaagaaaatagcttaaaaatggaagctcagaaaaaaaaatggtggaagcttttttgtgtggatcttcaacaaaaccacaaaagagaggtgaaaatcaaaatagtaggaaaaaagtttagaaaatttggaaactggaaagcttcagaaaactgaaagtgatagtagaagatgacaatgatagaggaaaaaaccaaaaaagaaaaagaaaaaagagtgttggcagagaataaatgtaaggaacgttttatggaaaaagaaagagttttgtaagtttacgttacgactttgagaagaaagaatcctacttgaggaaacaaaaaagaggccaatgacaaaaccaaattaaagctttgcattgaatttgtggaagagcgtgagactagtagtttaagttatttaatggtgtaatcaagtaaaataactaccagtcaactaaatgattctatgaaaacaaaaaaagaaaaagattattgactgcaaaagtagaaatgtagtaaataagtgcaaaaagttttcgtaaataagtttctcaactttcgtatcatttatgaataagttcaaaaggtaaaaccaagttagataagtcttcacactatttctcttacttcacgtttctgtcaaaaatgcttaaaataacaatgagtcaagtagattctgccgagtgattgggcacctatatcgaattagcggtaacattatttatttatttctggaattagcccatttcatgggatgattttttaaaacattagatttctttctttttccctggtgtttttcttcgatactgattgggcaccttattatcgaattagcggtacattagcaatataagcatttttcttgtggatacaaataaaatggttaagagtaaaatatatgagatcccatggtctgatctgatcccaattctcatttggttatttcatatttgggtattattctattgggcttttattaataaatatgatatgtattgtcgtattgggtctttcccagaaaaagctgcccgggctgggcctgtactttttattttcgtaaatttaattgcaagcccttttaacaataataattgaaaaattcaatgttgttaccctaacttatatccaaacttggacaagtgttttaatcattttgtaagaaaaacttttttttttttttgaatgaaaaactttactttatcaatgctctctttcatatgatttatatgattttcacgactcatttatcacgaaaatctgatggacagtcaactttattatatataacataggtgtaagaaaatattagaacaactgtagagcaaaatactgtaagaagaagaaaaattgaaaatttgaaacattacttctttttttttttggcgaagtttgaaacatactttaaacctctaatatcctacgtaaaattatatcataaaacaatagaaagtaacaatgtgtgttttaacaaaaaaaaaaatcagttgcactcagcaggcatgactttgtatcttggcttatcactgcaataagaatagaacatcagctttctcctagcccaatccatggcattgatctgattcttcgacaacgtggcaaaatcctgaccatcaacagggtccagactcgaaatcgacccgcccgacttggtacatggcccggacccggtagaggagccgttgttaacggaacagccacttaactccacgtcagcaacggaaaccacgaaaggggcgtacttgtagttgacggggtacttaccacctttagtggcccactctgaaccgtcccaaacggtgacgtatagagacatcggtttagacgggtacgcgcttgtgaaggctccccggtttggaaactgcctaaccggaatgttgtctaccaaaaatctgtaaatccaataattgaaaaagcattttaaaatcctgaataacgatcacagttagtatttaaaagaaatattgagtttctttatgtccaattgtttaactaaaatatttattaagtactgaaagtctaaaaccaatccctaaatatattgtattaatctaagaatatcaacttgtatctttgtttttgtttgtcaacatgcattaggtggactttattagtttgtaactttagtagatgacaaatgctcattatgatgattaatctattgttatatttcaaattcaaaaaattatacagaaaaagtcattctagttatctatatgaagcattgcctttaggattcatgaacttatatctaatgtttttgtttgttttgacttttcttggcccataacttttccttttccttaaattgaatggataataaatgatactaattcgtaagaaaaataagaagaagatgataatagtcaagagtgtgacttacacagtatggtgggagttccaaatgagggtatagtcgtgaaaggcttgcgttggatcgaaccaaaaataaaacttctcttctcttcccgttctagtacttccatttgcatatacattcgtctggatcgtccaatcatctctcctacttctacccaacaattctatgtctatctcgtcgtggcttttcggataagtctctgcgtttgataactgcatatcgaaattattatgcattagtatatcttcaaaataactcctatattcattactaagctatatgtctagagaatattgaggtttggattcaggagattatgaaacatattatacgtacatagaaagcaaccacaacaccagaggcaaatccagcgggaagcttgagtcttgcactgaagaaaccatagtgatacttgttctttgacaccaacccagctcctgcaaatatgtcgatattatatataaatattcacatacatatatataagttttgtggataatatacagaaagaaactctggcttgatcattaaaaaaatgaacaaccgaggaaacaatatgttcaaaacagaacagtgtagatttttattaccggaggatttgtcgagagtgagcttagcgagggagccattgacctgaatattgtgagctccgaaacgtctggagaagccattttcaatggcgatcttactgaattgatctgtgaggcgtgtcacgtttggtgttgtgaatttcctgctgtgtgaagaaaccaaagacaacgaacagagacaaaacacaactgctgtttcccacataatcttcatgttgtgttttatacttctgattactgattagtgtgtgtatattaaatatgtgtcagtggtgtatatatagaggtagaggttgggtgggacaggttgggaggggtaaattaggtactttacaaaatgagttgtagacaagctggctctttacctctgctctgattgatcttcgttagaaaagagtccaccatcatggatttattttgtcttgtttactaaagaatgttcgtaaataaatgtcttaatctatttaaaatgttaaaaaaggaattcatgtgactgacgttggctccgttcaagaattcccaagtgattagtttgtttctaaattttcgaattatcataatcaccattggcgttcagaatcaaatcaaatttcagaaaaattcttattataggatcataatgacaaaaagaaaacattaaattaatgttgcagcagcacatgtaagactaacacacattttctttcaggtttaagacatttcgagacatttgcatgtgggcaattctgtttcccctttcattggattagaatgcagtagttatgcttgatttgatataattaaattaagtatttgcttgattacttaaatttataagattaaaccttactactatatacccacacacacacagacgcacacattaacgtgtacaaatgacttgaagatgaagtgggcgtggtaatgctataccatgctttgacttctctttcatcttttgccatttttgggtttatctctttttctaataataatagtttttgatatttttgatacactttttttttgtctttcttattaattgcatcagaacatcttcccacaccgaatatatttttggaattatttgttgataaagagtattcaaaactttatggaatttgaaaactagtacattattttatttccagttttgacatatgtaattttcttatgaaaactctatatttgaaataactgaatgtttaagttaaatgtaacagtaaagctttttgttgacaaaatgtttaaaatacttattattttgtatagtaaactaataaagaaaaggaaaaaggacaaaaagagtttatgatgtaaacatgaacaagttgacatgcaattcagtatacagcaacactcaggctggcaatttacagattgttcatatcaaaccttaaccaaccaatcaaatcggcatttttcagctttcatatatataattgatagttatgtcttattattttctgttttattcttgattttattcttatcatcattgttatttaagtataatttaaattcggcgcaacatcacgtatcctctcaccttgatcatgtcaccctaacaaacttcaaaacacacaaccgtacgtttatatatacgtttataaagattacgagatctatagtattatttggaatcgattacttagattttcttaacttaatagggccgggatgtgttggcgaatagtaatcttactgttacttatatctgatgtccttaaaaatttatcaatatgcaaacatagtgtaggagttcaataggtaactaatatgacgctgcacatatctttgtaatacgtctgaacttcttaattgtcacacaaacaaacaaaaaaaagtaggtgtaggtaatgttgtttttaatgtgtaaacgatcagagttttaactttggttttgttggacggtttgtgctttggttcatgatggtagatgcgagacctagggtcctggtaaaggacgaccaatcgaaaattttgtgtttagatgaaatcgtttttaaatcgacaaagttggtttgcctccatgagaaaacgattctctgggcttatgggctaatgaggatgggccaagcgtatgtgatgggcggagagaatgataagctcagacaaagagagtgttgtctaaacattttactgtatgctttctttcagaagtctaaatagtaaataactataacatggagacgagctcgggttgcacgtgcatgctcacggtcacaagcacgggattgttggtgtgttcggaattccaaagttcagcttcaccggtgaccggactcgagttgttgctcagataagtaattttaacaaacctttattttttcttttccgatacaaacctttttcacaaaagaaaaagggttttcaatggaatagggtaaaagctcagattggatcaattaccatcatttcatttctttctgatcattctctccaagtttcggttttgtatttaccaaaaacaagctgcatcttgagtgttgccgtgttggtgtattgaatctgatactttaccattcttctccagaaagtacaacaccgtttctagtactggcgcgctagctataactggtccatttcatcatcttcttcaggcaggagaaactagcacgaaactatgatattcccatgcatgattccaagtaaatgctcaaatgtgaaaaaaaaatatgaaagcgagcttatatcaaaccgttgactttgcctctgaataattggttcttgcaattgttaaaatatggtccattaataacgcaaccggccattgttcccgaatattataacaacttcttctcacgattgactatcctaaattgatgagttaaagagtacctggaaatatccttctttaaagcatatcaggtaacaaacctaataagattccaaaaaaatatattatattttcgcaatactccaccaaaaatgaaggtgaagaggcttccagtgaccaccacatatcggcatggcttcgagtttgaccagaggttttggataatgccaaaaataatgattaatggttatctttgcacaaggactacgaacaaagattgtcttctagtcttctacaattcaaacaagggcagaaaaatcgtttctcatgtgttttattatataaatctccatggtgaatgacccacccattcagcatcaacgccaaggtctagctattgtatgtgcccattctaaacagatttctaaaattatcacgtaaaatcctacaattgtgtgaaatgatgattaattataagcacacaaaaaaatatatattcaaaggacataataattcgattgaataacataagcgaaaaagtaatcatgtatttttttcgtagattatttgtggaagccggaaggctatatatatgactaaaacaaccatattcatctaaagtgtaaaccctttccatttccaaaaatttaaaagctatacaattagataacatagtttcggtttctgtaaatcatgaaattaatcacttctaccgttctaccgaaaaacataaaagaatctatgaaacaatcgaataaataaaaaaatttgaaggaggaaatatcctatccaaagtcctcacacatgggtcgtaccaaatgtcggcagactccatgcacgtaacttcatgaccacgtggatcctcgcacactccactacgatctacgaagcaacctcttttcctcgttttcgacggatctcacgtggcactctgtcagtggtcagggtttccaagtaacattgtccaatgatacaccaccacgcgctctaattaaagttgaaacctttgtcaactctttatatatttcccaccttccatgtcgccgtcttactcgaaacaaacaccaatatatcgtagaaaacaaactttaatctacaaagtcatagcagcatgatccatacgaaaaccgggtctggtcgtcggatcttgacatttccgactgtggaaccatccgaatcaatctccatagtcaccctattggactcactgattcaactcgccggcgacattctcacattcaagtcgaaacacttctctaccaataaacaaagcttcagagaaactctcaggcggatccaaaacctacttgttgtcttcgaagagattcggatccggatcagaaattcgagacgctacttccatgactctgccgccgcgtcgagcctcaaggagatccacgtcggcttccaaaagctcaagttccttctagaagactgcacgagagacggagctagactatgcatgatgatgaactcggatcaagtctcggatcatctccgggtcctgactcgatccatttccaccagtcttagtgcgtttcctgtcgcctccgttgacttaacgaccgaagtcaacgagctaattgatttagtggtgcggcaagctcgtaagtacggagtccaacctgaaacaaatgataaacgggccgtgagctccattaataggatccttgctctgtttgtgaacagagtcgtcccggatccggatgaaattaacaggatcttggatcacgtagggatcagaaaatggggagattgcgttaaagagataaactttctcggagaagagatagatgcagaacggttagatgagaagaagaagaagagtagcgatcaagtcgagcttctcagtagtttaatgggattcatatgttattgcagatgcattatacttggacggatcgagagagatgatcatcataatcatcatgaagatggtataaagaaagatcatgacttgatccgaggattgaaagttgaggatctcctttgtccaatttcactagagattatgacggatcctgtggttatagaaacaggccacacttatgatcggagctccatcactaaatggttcggatccgggaacatcacgtgccctataaccggaaagattctgactagtaccgagttggttgataacgtatccgtgaggcaagtgattcgaaagcactgcaaaacaaacggcatcgttttggcggggattagtcggagaagaaagagtcacgatgacgtggtcccggagagtttggctgcaaagggagctgggaaactcatcgcaaagtttctcacttcagagttaatcaatggcggtgaagagatgatttacagagccgtgagagagattcgtgttcagaccaagacaagcagttttaataggtcttgtctggttaaagctggtgctgtgactccacttttaaagcttcttagctccgtagatatcaggattcaagaaaacgcaatggctgggatcttgaatctttccaagcacgttaccggaaaatctaagattgcgggagaagggttaaagatacttgtagagattctcaacgaaggagctaaaacagagacgagactatactctgcttctgctctgttttatctctcttccgttgaagattacagcagattgatcggagaaaatccagatgcgattccgggattgatgaatatcgttaaaggagatgattacggcgattccgccaaacgtagcgcgttgcttgcggttatgggtttgttaatgcaatccgataaccattggcgtgttctcgccgccggagctgttccgattcttcttgatctgttgagatcgggggagattagcggcggactcacggcggattgtttagcgacgttggcgaagctggcggagtatcctgatgggacgattggggtgattcgtcgtggcggtttgaaactcgcggtgaagattttgtcttcgtcggaggattctccggtggcggtgaagcagcattgtgttggtctgattttgaacttgtgtcttaacggaggacgtgacgtcgttggggttctggtgaagaattcgttggtcatggggtcgctttacacggtgttaagtaacggcgaatatggaggaagcaagaaggctagtgcgctgatcagaatgatccatgagttccaggagaggaaaaccggttcggttgaaccgaatcttcaaagaggacggttcgttcacgcctggtgattttggtacacagtaactcttgagtattttaaagagttatttaccataaagaaaactaaataattttggttaagggtgaaattcttttattaatttttatgtaaagggtttagtgtttgtatatttagctcgggttttattttcataaaccaaagagctactgggatggcaataagcttcagtttttttaagaagctgtgtccatattccataatgtaattataactgaatcaataaaaactattacaattaaaaaaaaatacctaacttttttgttttgcatgtttcctaaaactaacattacaaatttcttggtccaaactaaagacaagaaaagtacctagctttctttgaggtaagtcctattcactcacatgatgcactaggttggaaacgcaaaatggtgtttgaagcagtggaactcgtttgtttgcaataacagggataaggttgtttaatctagttgaagtcgcaaaatgttgtttgagatctttagaattagcatctagaaatctcatatttcgtgtgacttacataaaaacttattttatgtatataagtttaatcaaaactacgtcgttttaatctttttaagacaataaacaatgttacaaaatttgtttgttaacatttcaaaattttaatataaaatgccaattgagtttatgctataaaattaattcgatcgtttttatgttcgattgattttgaattggaagcatgctattagtctacatataaacttttcaaatgtagttgttaattaatttgaatttgaaagcccacaattcaattcgaatttagttagttttgagttggaagcccactatatcgcaattatattacaatttaatgtaaaaaaagcgatgaaaaaccagaaagatttcagaccgaaacctaaataatattgagtaagtttattcgaagaagagatgaagagacaaagagcaatcgagttagatcgagtgaagaagacaatgttgaacatagattgggacgatgctttgggcgatgaggaagttcccgagctcgagatcatcgctactgacaaaattccgccgcgtgaacctactctttccggctatgaacccgccgtctctgtgcgatccctcagggataacgaactcgacgatcatctgaagcgtcagagatcacttcttactcgtctcggtgataagttggcagacaagggcgagaaaatccgaaacagaatcggagagctcgagtacgagaagcagcgaaggatgttccaacaacggaccaaaatggttttgtcttttttttttttacttactctgcaattgcatcattctgttactcaaatgaaagtttttgtgatctctgtatttgtagctgaagctaattgttcagtggaatttagagtttgatgatgtgtggaagataatgtagtatgtgtttaggaggatcagtggttgagtgtctcgattggttcaagattctgctaaagcttctccattgttttacattttcacttgtttagtatagttctgattttgtttggtatctttttttccttatggatgtataatactctgtctctgtttagacaaaatgatatgaattgatctgatacagtgccatgtgactttaccttgttttagcaggatgcagacaacggatgtcagattctcgagaaaccaaaaagctcaggtatcttgttgcaagtttgtcctagttaattttggtgttgagtgcaaaattttgtgtctaacatgtaaagtgtttgcagatgtgtttatgcgagcgagtacagcctcaaaagacacctctggacaagggacttcgggatcgaaagacgtgtctcggtcaacatttgctgctcattttagtgacaatctcaaagtatggtgttttttacattctctatttttgtaacccttttaggtggctgcttcttaatagtccttgtttaacagatgggacctcaaccagtgaaactagttaatgacaaactacaagatttgggacgtggaagctggataagcaaagctaatagagactcaataatagagaaaaataatgtgtggcggtcgctgccaagattaagcaagtgtaaggtcagtttaaagaacttttattctgagtctaaggatcctaaaggggatcgaagacccaatgaagcttatggtaagggaaagccaaatgaatcttccccttatttacttgtcgacgatgatgatggcgatgacgacaaagtcattggttatgaaactcccaggtccatatcttttctccctgatactgcttcataggagaatttagtgtattgacatatgattagtgtattgacatatggttcataagagaatttagtgtattgacatatgatttgctctttctctcacaggcattggagtttaaaagcatcgccactacagagttcaagctgcaggaaggtatgtcttcttatgccatacaattgtacttaattaacatagaaggacctcagcaccctttctgacacttttgttatagaaatcagatgataaagtgattaatttggatgaagatgaacctctgtctccaatggtagtagaggaagcatgtgaacttcctgaagggtaaaaacagagttattattgtttatcttcattaagtgtctgaatcacttttgtgttggagataacttaattttgatgacatctgcaggttaccagaagatatttactacccatcaaggtaggtagaaaaactatcatgttgtttacttattgtaatcgtcaataagatatatgacctttttttcactttatctagtgatcaaagtgatgggcgagaccttgttcaagtatctcttaaagatctgaaatgcctttcacctggggaatatcttacatcgccagttataaatttctacatcaggtgacttctaagtaccgactgggatacttgcattatatgtctcgtgttatagctttgtaataatttctgcttctgtttgactaggtacgtgcaacatcacgtgttttcagctgataagactgctgctaattgtcatttcttcaatacgtttttctacaagaagctcacagaagctgtttcatacaaggtgattgctttccctggtttctataaagataattattagttctcagagctcattatattttgtttgcatttaaaaaaaattcaagtcctcaagatgctttatgtttcattgttctattatagaaggttgagtaaatatttcatttgcaactgtaacaagaattgagaaaaaaaatgataatactacctcttttatgaatcttgtgatttaacattatttttcttctggcgactcatgtgttgttcggtctctttgtcttgtcctttcactatgattagggtaatgacagggatgcatattttgtgaagttcaggcggtggtggaagggttttgatctattctgtaaatcatatatatttataccaatacatgaagagtaagtaatttactgactgtttattattgaatcccatgaatgcatttttttggcatgaagagtaatttttgtcatctaagcttagaggattatgcaaaaagatggtatcttagatcagagttatcacatctcagtctgctctttctaatggagaaatgttctcagcatcaattgttagattggttaatgttttctttccctcttgaatgtttcagtcttcactggagcttagtcataatttgcatcccagacaaggaggacgaatcgggattgactataattcacttggattcattgggacttcacccaagaaatttgattttcaataatgtcaaaaggtgagacccaaggaatccgtatcattgatgctgattgcataaagtttctcagtgtcaagagtctaagaccatcttaactatattctatttgtggttttaattacaagttattgttgcagatttctgagagaggaatggaactatctaaatcaagatgctccattggatttaccaatttcagcaaaagtatggagagaccttcccaatatgatcaacgaagctgaagtgcaggctagtctttataccttaagttgcaaatcataatgtttgaagacaaattatagtattcttctaaataatttcatcaccttttcaggttccacaacagaagaacgatttcgactgtggtctgtttctgctcttcttcataagacgtttcatcgaagaggctcctcaaaggctgacattgcaggatttgaaaatggtgcgtttttcttccatctttgtttctatgatctattctaaacaatttgctgttaacagaacttgttgtattgtcttcatctccagattcacaagaagtggtttaaaccggaagaagcttccgctttgaggatcaaaatctggaacatactcgttgatctattccgcaagggtaaccaaacagattaaagctgtatagaacagtgtcaagtttggtcactctaattaaggaatgaaatgaaagatacgtttttgttaacaatcattttgttcaagtcctgtaataaactaaggagcatgacataatcagaacaaatcaacaaggtaataataacgtatccgaataaaaagccaacattgctgcaatggtgcaaagtaacacagctttagcaaaatttcaagtcttacaagctatctttataacgattcagtcaacagtttctctcaagcatttgaaatagttttggtcgtccctctacataatccattaaaccgagattgatacaacactaaagaatctaaaacagcggaaagcaaaactcaaaggggctttgtatcccaaagatgcagcattccgtatagcccaggctaggccgtgatttctgtgccttctactctctctttctccgaaatgcctctgcttgtcttagtccctgcaaatgtgcaacaaaacatcacaatcaaacattagccatgagattacgacatggttacatggactggtaattttcaaagattttacaattgcgcaacttctttatgaataaaaaccattagaatcaaagtcaaactttctttccaaatcactccacagatgtgaactcaaagtattactcatacactaggaatatacgatatctgattccaaaagaattaagacacatgttacatgcaaggatactcagatgacaactttagctttgctacaattatatataccaataataactattatgcagctgttacgtaaaggcacacaccacacatcatgacaagagaaacaaataaacaaaatagtctggaagaaggttacataccagtacttaatcaagccgtcccaaccacaagttgcgactttactctgttccagaggatgccactcggctccaatgcatactccattgtgacatttaagagtcctaaacactttgcagctcttccagtcccaaaaccagcacttaccctcaccatctcctgacattacaaaccgtccatctggcgagaagttaacttggcatgcataaccggcaacaatgtgccctgcaaacctcttctttttattcagctgaaacctttctcgggtactgtagatcagaatctggttatccaaactctgtgcagcaagccagtttccattcgggtgaacagaaatggaaggcatagaatgcatatgaggctcactgatatacttgataaccaccgggatcccaaattcccaaacacggagagacttatcatcgctcgacgtgacaaatcttctgttattgtccacaaatgtgatagtattaactgcccccaagtgctgatcatactcttgcgtaacctcccccgtattaatatcccactgcacaatcttcttatcactcataccagccaacaaaatgttctgcttgtcatcatccggattcagcttaaccacatacggaatcttcccagtggagaaagtcgatataacttggccagtttccgtgtcccaatacttaatgttcttatcatacccagcagtcaagaatttagacccatcattggagaagcaaatatccctcacagctttggcgtgacccatgtaagtcctcatacatttaccagagttatacacatcccaaatcttaaccttacaatccatacctgcagagagaagcaaatgtccttgctttgggaagaacctaatagcggaaacacctttcgtgtgcccactccatgtatgaaccaaacgttttggaatgtagcaatgatcattgttcgccttagcatctttaggagcctcaatccaagaccttccttgataatctttctcctctttgccatggaaggtactcttatccgcataatgctctcctttggtttcaccttgttgtcccttctcctccttcttcttggcatgatcctccgcatacttcttctgctcctccgtcaactctccctgaaccacctccttcttcctcgaccacggactcttcctattcttcctaagccaagcttccgtctccggattctcagcttccggctcaatctcttcctttttctcttccccttccctctcctctttgctcctctcaatcttcctccgcttctgctcactctgaggaatattaaaaaccgaaagaccatcgttcttcttaaacgcctcaacatcgccgacgtagttcatcccagacggatccgccgcgtaaccgcacttatgaaacgtatggtactgctcttcaaacccaaacgatccaatcgaagcatcttccacagaacctagcttatgattccgcatcccttgagcgatcccgtctttcgcatacggatgcgcggggccgaacatcggagcccacagctgatcatgggtagggttataaaagacgacgtgttgagtcgggtcaatcggcttcgatttcgattgattcacgttagccaccgtgagagctagtgccgtatcgtctacctccggcgccgatgatttcgcctttaacatacgaggcggtgaagattccggcgaggaagcaacggcttcgtcttcttcttcgtaggattgaatcagatccatctctcacgattttgctctcttaccacaagtgtttgagaaactttatactgagattttgcctcttttctcttcgacaagggtttcaaaattcctaaatctaaaataagggttgcaatttgtgcgatatttagattttcaaatatagcctcttactatttttttcttttcacatttaccccaatagtgtattttattgacatttacatcccactgtcttactcggtggttaaaattatgcaaatctggaccaatctaaaatcacgccaagccaaactgaattaaaccgggatgaataaaaacgaaacgacaacgttttaaggtttcttatgttgacggtcaacatatttatcataatcgaactcaaaagcaattactcatctcatatttaaagaactaacacatgtgtgaaaaaacacactagcgttagcgtagacttatcatttgggatttcatgcttcaaaatatatatatccatagatgattttccgtactctctcttctatccttgatggatcaatgccaatccgactaatgatagcctgcaaatatatgtaataaaaatttatacgaaagacatgacacatgcatatacgtgtgtattatacaaacatatgcgtgtggatgtggtacctgggctatgattgtgtaagtggtcctatcattcaagttctgaagattagcactcattacttgagctccttcttcttcaaaaatactcacaagctcgtgtaacattactcttttcatgtttagatccatgatcagattcatttctatggtcgaatcccgcgaacgaatactgagtttgggtagaagaaacgacccttcgtagagattcccgagttctccttgtaacaatgtccttttcttctctttcaaataatttacattctctttcaattggatcatgtatgatgtcgcttgatctataaggtgaggcactggtaactgtttagatcccaaaaaaaaccccaagataattactttcattaatcttttacatgaatgtggttatattcaatatatataaataaaccgtaaaaaccctagctacgtgaatcatttatttgtcaattagacaccgtacttaaaagagagctaatatggacggtcatagagggacaactgcctattcaattaatcaaaatattatctctttagaataaaacgtacatcttacagtaattatgtagataatgtttgtattgttgtatatacgcataaaacacatctacaatttaatataagatatatatagagagagaaagagagagagggagagttagagagaaaaaacggaccttgcgagtgggagaaacatgagaagaaagtatagagaagagatgtttcatgcgcatccttcgatccttctctctgaggtttcgttgttcccttaacgacgatgagtttccttctcctatttctcttgctctccccattctttttgttttcttttaagcttttatgtacaagtttctcttttcaaatccatctctctttatatacagttaaagagatagagagggccgggagatacagagtcacaaatctcaactttgagagaaagagctacgtgatttagatgaaagggatgttttggaagaaagtcatggcttttgtgattgcgtccgtgagcttacacactaaattaataagatgcatgcatctttcctaccaagtaaattttactatttacttcggaatttccacgttcttaaagatacaaaagtttcaaaacaattagatatgttgtttatcattaaaaaaaaaattagatttgttggtgggttgacacattactaggacgcatcataatttcgatgtaagatttctaacgttcaaagacatagtttagatagcatcatgcttaccgtgtgagatgagattcctaacgttcagagatatgattcttcttctttcagattactaaccatgagtttaagtcctgtgatttacagtaggtttggagaaaattattatcaaaaatcatttcaatggcgtaaaatagtcaacagccacggtagacaaaaatgaattccttacaacagtactatatatgtttctatcaacaaatagaaaaggaaaattgttttgtatactgatagaatcgggaccactaaatcaaatagtatcatcatgttcaattaatttggtgcacgtattcattatccgaggaaagtatcataaggcgccataacctaagattattcaacaagctatcattatcatagaagaaaaggacacaacacattcggcattccttacataaattattaaaggccctcaactctctttggccgtatggccgacatcgttcaccggataggggatctacatggaccgatcgtctaaacgttcaccggaggtgaatacaaagacagaaaattaaacatgcctagttttgttgagtcttggagtactccaggtagatgttggtcataactttgccactgagcaaactgacataaaaagtaaaaggagccgcaatatgatactaacactgtgtatatatcgtctcgctgcttgaccacttgcttagaaactgagtaagggacaattatatccttattgcattttccacatgttattctttttttccttcttcaaatatttgaattcgtacaagaagagaatagtcatttggtaactatcataattcatagccattgaaaatccgtgactagaaatacagattagcccaattttaaaatgttaagcctataattacttgtaactaattctgtggctagaaaaggatgattacttatagttagaaaatttgtagcgaaatttttgttatcgatctatatatactgtccaatttatataagacatttagaaaaaaagatttgtttactagttatgtcgtgtatatatacatgttttttaagttttagttaactatattcacatacaaaatctaaccatgtgtgattttaggagaaaacaaagatgaatgtccttgctatcgcaatatgaaaaactccaaaagtggatccaaatgcctatgcccttgaacatgttttgaagatagtcatcagatgcataacatctatctattctatgtatgcaaatatcaattacgactattttagacggcgcctgtaataaaatatttgagcttaaaatgctcaatgaaagaaaatttgagagttcttgacaataaaagtagataatatattttatatttaaacatgagattctataaacgtaatagagattaggcatagaaagaaaagagaaaataaagagattttgaagatgatgtgagaggctttttcgttcatatacttgaggaaatggtattcagacatttgatcattccctttaacttaaacaacaatagggctattacaccaattcactcttaaaaatactcataatctcatgtttaaagaactaacacatttaatttgttaagaaaagacttgtgatttgggattcaataatgcttcaaaaaattaatcatgagattatatcccttaatctctcttctatccttgatggatcaatcccgatccgacatatgatagcctgcaaatattcatttaggtgattattaatttatcatatatatatagtccttcaaaaaaagttcaaactatattttaatgatatggaacaaagagatgctgctaaaaaaaaaaaaaaaaacatgacacatgcatgtacctgggctatgattgtataaaaggtcctatcattcaagttctgaagattagcactcatcacttgagctccttcttcttcaaaaacactcacaagcttgtgtaacattactcctttcatgtttagatccataaccagattcatttctatgatcgaatccagtgaacgaatactgagttttggcagaagagacgacccttcagagcgatttttgacttctcctcctaacattctccttttcatctcattcaaatagtttaccttctctttcagttggatcatgtatgataccgcttgatctataagttgaggcactggcaactgttggtgccaataaaaacacacaacctagttacttccatgtcttttgtatgaatttggttataatcgttatatgtattaactaaaatgtaatatactagattttaacccgcggtacaccgcgggaacaattgtttttttaaattagtatatataaaagttcgtaaattatatctatctataaaatatatttattttacagtttacaactgttattaagtaatgtcctttcaaacccgtcccgccaaacccgtcccgtaaaaaaaaactacagtacatcgttgatttaaatatataattaaaataaatattttacgggattacaattgtactttagtttgtcaaacaatttttgttttaaatagttgccgaaatctagtttaaattttggagaaataagatttagtgaattgataaaaaaatgtatttaagtgcgttttgctcattttaagggattgcaattgtattttggtttgccaaacattttttgttataaatagttaccgacatttagttcaaattttgaagaaatctgcgtgatatatgagattgtaatatatttgaaatagttttgagaacgatgattttgttacgttttaatacatgtacattttactaactgaaaatatgagattgattatttgtataacacggaaaatatgagattgattctttatattacaatgaaaatgaatgattcaaaactaaagatcatagtgtaatatagtttagcttagaaaataattaaaacgattttatttatttatttagttttctaaattttagtttagattcagaaaataattgtttaatttccttagaagatgataaacatatatggaagatttgaatctctatatattttaaaaatcaatcaataatgtcaatataattaaaggatagattagaaaaaagtttcttgaatgctaaataattaatttgttatttataaacaaaatattaaatgctgtaaaaacgaaatattaaataaatatggaaagaaaattctaccttaaaatattttgtactattaaaaccgattttttttttgcagcaaattaaaaccgaaaattaataaatacttaagagagattttaggaatgatttttttgaagtaatgttagactttttttgaagtaatggtggatttaatatagagacattttaggcaatatttttgttaggtaaatatttgatttaaaatgtcgattgaaaaaaataaattcagtggcattgagtcgtaaataagttctaagtccaggatttatttgttaaaatgactgcaaaaatgtatatatagatatgaatcatttgttttaactctacactacatataatggtcctagctggcttgtactaaatactgagaaccctagctaaatgctgcactttgattgatctggttcaaatcaagatgattatcccttgatcagttctttgattgatctggttaaaatcaagatgtccataggattttcgcaacatagcccttgcctaagcgtctaggcgcttagacaaaaccaacacatacattacatctacgaaaaattatgtactctgtatatataaacaataaaatacatgtagagagagagagacggaccctacgagtgggagaaacatgagaagagagtatggagaagagatgtttcatgcgcattcgtcgttctttctctctgaggtttcgttgttcccgtaatgacgatgcgcttccttctcctatttctctcgctctttccattcttcttcttttccttttttaggttactatgtttaattccctctttccaaatccatctctccctctataaatataaagagatagagagaaagagccgcgtaattttagatgaaaatgatgtttttcaaagaaagtcatggcttttctggttgcgtccatgagcttacacactacttaatttatacatatatatgcttcttttactttgtaagttccactcttagagatactaaacatgtccaatatgttttttacttacttggtaaggttttgttggacacatttctagaacctagatagtgttacgctaggttttgttctagtgaagcttgtagaaaatgtgcttatcaaaatcatttcagcagaacatagtaattaaattagtcggattatatgtgatgaattcttcacataagtaccatgtttggatcgacaaaaacaacaagggaatttttttgttataccatgataattatgttgatcatttgtaataggctagataaaattaaagatacctttaaatgataatgtaacaattccatgtttaattaataggtgtccatatttattatccgaattacactatacaggtcacatatgctaagacaatttggtgtcaaaaacgaagaatctaagattattcaacaagctatcattattccttaccgatataaaagactttgaactattttttggccgtaaagctgacatatttcaccggagatgtcgttcaattatacacttgaccaagtcttattctaataacaaaaataataattatacacgtgaccaattctagattgaactttctaaccaattctacatgaatcgttcaccgaataaaaacaaaaacataaaattaaacctcgcaaaattgagtcttggagcctttgctaatttcttgaatactaaaagcagatcactgttgatctacatataattatttatttctgttgttcgttatttatccataaccaaaccatgattagaactaaatcagttctgtggatgcggtaaaacaatctcttcgtcgaatgaccccaaccaaatattcaaatgtacacttgctaaaacccggttcattggtagtccggtttggttcgtagtatttgagtcaatttcatatccctagatgttatgcagaattttgccacctagaccgaacagagcgttttcaaaacttggaaaggaaaaaacacaaagcatttagaacatgatggaacacatgttagccgcaaagaagtaaaagaagaaaaccttcattttgtcttctttccttgttttgcaaaatcgtccaaaggaataacttgtgtatatttatctgtttttgggtataaaagatatatatatatatatcgcctagtcgtcgctgcttgttgttgtcaaggcacacatgtttattctttatttttgtcaaatatttgaatcaagatcagctactattctaagaaactggctatttctaaaataacactcacgaattagccattatttataaaatggtaacggtatattcgagattccagtccatacatgttattaataaagaaagattggatctccatataaaaaatagctgtctcttacattgtagcactagctaaagatctttcaatactacgtacctagtcatacaattctttgaatatggttttaaattgtatgtgaatattattaagtgagaatagtatcgacataacaagtatgaaatcttttatttctatatattttatttaacaacctataacaaacatttcacttcaaattctcactatatgtagtccatcatcaactactttcttttcgcatatctttgaagtttttggttttactaaactaactctatcataaaaggagaaagctttaaatttaaccagaaatgaagatgcccgtggttgtacaattcttcataatctctcttctcctcacatcttcattttatgtactttcaagcgctgattcatgtaagtgtatacttaatctagttagttattttttaggttatttatcattttgaaactagttgtctgaaattctaagatttgatttgtgatggtgataaatgaattagcagcatgcggtggaaagtgcagtgtgagatgctcaaaggcagatcgaacacatgaggagtgccttgaggactgcgatatatgttgccagaagtgtaattgtgttccttcggggacttatggaaacaaagatgaatgtccttgctaccgtgatatgaaaaactccaaaggcggatccaagtgtccttgaacattctttgaagatcctcatcacatacatactatctacgtactatatgtatggaaattacatctatatatgtttgatgtatgaaataagttctgtgagcttaatgaaaattttgttatcttcaatccgattcctaaacacatcaagaataaatcatgtcgaggtttatatttctcagcttcaatttcactaaacgaataacttgggatactatgatggaatgcagaattgagaatttactctctcaattgtcttaaattcataatccaagatctacaaggggtaagtattaggactaaccgattaagggtttaataattatgtaattcagagactctaacgctttgcatcgaccaaatactacattgtaacataacacaaactcattggatgtgaaagtacaaagtagtatgtctttataataatttgtttccaaggaaaaaagacgagaacaaaaactaaaacaagagaaagatcatcccatgatatttaaatagagaatcaatctacaaaaagacggcaacctgattttcaaaacaagaacagtagatcagaggcaagccggatagtacataaaaaagactcaaacccaaaccaaagaggctttctccaactagaacgtaagtctttttttgagtcgctctgttttcgtttgtggaggaaccatatcaagtttcgacgctcacaagctcatactcgatcagcgaaagattgttatcatccttcacggtgatgtctgtgggctcctctgcaacttcaacacgtccccatctatcaactgcaagcctcatagaacccttgtacatgtcgatcttcgcattacgcagagtcactacactgccttctttcatcatatccactggataaaaatgaataatagcatcagtcataaatctataaaaagtacatgagaaatactcaaattatgcaaacaactaactatttccataaagcaatccactctcctgctattatctgtttcacagattcacaaccagtatagactataaagatgccaacttagaacagaaacttgccattaaagaagctaactgagaagagaagcagtctcttaaaagaccatcacaaaagcatttattctctcaccttggtcatttcttgcagtaaagattatgattccagtctcatcaccaactaagcattcggcaatccgcatctgacgtgactgaggacccatgggacgacctcctcctctctgcatcaccatcttcgtgttgacaactttcacattcagagagtggccattggttcctggtctcaactcattaacctttgtgaacacaggcttcctcaaagcagacgttgcctcagccatttttataacaaccctacaaaaattagccataaacaacaacatctgctgtgatcagcacctaacaacaatttcaatatctgattagacaatcaaaacctcaaatgcgatcaaacaggtttaagctatcctcatttctcacataagaaacgttttaacaattcaacaaaacaatttcattctccatacacaacaaattcaataaaacgcagcaacatagataatgaaagctaaattacacaaaagatcatatactttgatcccagaaattcacggaatctcagatcggagaaatgaaattgacgtgaagaaaagtgtagtaacgttaggaagatggaattgaaacaagaaaaaagctagctagggtttttggaaactcacgtactttttgattttgagagaagagacgacgacgatgactttagcgattagatctgtggaggcgatatacacaaagacgcggcggtcttctttataactctagaactcagatattaatactcaccgtagatccgtgacctcaacacgtgtcatgtttctgaaacatcttcattaaaactacccttatatttttttatatatttaagattgaccttataactttgactaatactgattacaccctctattctccgaatcggttatcaaaaccaatttcactggaccgtgatatcagaaaccggttcactgaggtgggcgagattttttgttgtcactctcctctcctcgttcttcgatgctcatccattagaggaggagccgatgtttctgcttccatggtaacgctctcgtctccatctccctcgctctcttgcgtagagaacgtgacatgtaaatcttctcacgtttctcgggttctaatctccggtaccgataatattaatcacggtgaatcgtcggaagccaaaatactgagagatgttcatatcgtaagaactttgagatttttctttgaatctcagttctctgtgatttggtacgttcaattacggatatctaatttgagttaatcgttgttgtgtttgtgcttcttagtcagaaaggttattggaggatttcactgagcttgcaagagagaacactgagaaggacctcgagacttgtgggactctcgctgcctttcttgtaagattgttttgctttcttcgcattcaagttgattactttgggtgataagagaatctgggtggtgagaaaatcaaggaaaatgttagaaagtttcagactttattgttcctaattacaacttctaacagagatctttgcaaatttgaatttttagtgaaactcgatctatgctattgtttaaagtttacaccttgttttgacttttgtggtcatgattcatggttgttttgcttctgttccagggttcttcgtttttcgagtttcatgaacctgatggtaattacatttctatttctgttcatgctgtaggaaagaggaattttttatgtaaccactctgataatacctaagcaagaatcaacttctaattctgtgagttatcttagaaagattatctcgatcattttgtggtattcaaaatgaggtgcttactcaggtgctaaaattggcagtgtcaggctatgaatgaagtggaagtgttttccattcaaaacgaaagagaactctatcccgtaggatggattcatgtatatctctctcttctagctccctccatgtttagtgatctgtttatctactttgtcttgacttactataacgaggttatgcatattttccagactcatccttctcagggttgtttcatgtcatctgtagatctgcatacacattattcgtatcaggtacatctctgctgtttccaaattgcatatatactaggtttgagacaattctgatctcagtttcccatcatgtcattcttaggtaatggtgccagaggcttttgcaatcgtcgtagctccaactgatagctctaagtatgttcttccaaagctatggagtcaattatacagtcaacatatttccttgatagactctcaaactgatctttttggcaggagttacgggatatttaagctaacggaccctggaggaatggaggtactgagaggctgctcagagactggattccacccgcacaaagaaccagaagatgggaacccagtttatgagcattgctcaaacgtctacaagaactcgaaccttaggttcgagatttttgatctacgttaaggtaacgacttctgtggacttatcagtaaaaaggttcaaactttatccactgtgggctaaggatgtcaataataaccgtcatcataaccaccaccctaaccagaactgtatacttggtctgagaaggctgtctgattcgggttatgaacacaaggtaccttctattaagcttagcaatgttaataaattgtcatgtccttagatttggatcaattggttccattatggaagaacaacaatgaccatagacataagacattgtattggcgtatgcaattgttatatatctgtacaaatgtatacattggcatctatttctccatataacactacattaatattatcaccatatttcgccattttatacctcttaacttgccagtgatgactgatgaaaatggttgagcttttaaaaaggacgggaaaattttaaacttgagctttgacttgttaaaaaattattcattttgacagttttcgtctgattcaagtttcattcttttcatttctcatttgattgattaattagatacaaaatagccataaattagctgtaataataatttaaaaggtatctttgagctcttttttggtaaagacatattccaaatacctctcttcacatgaaacaagagtacaaaccccaaaaacagaaccaaaggtccaaacttttcttttgaaagtaataaagctatcaaagctctttccttgttaaagtaaatagtacagaggatgggttttatcagaaaaaaaaaagctagctcatttcatattgttgagtgttgctatcaaaacccatacagatacagtactttgttttgcttcaaatccctttatggccgttttcaagcacatgatagctttcttcgtacagtcaagagtaaaacctctctttttcttaccctatcttctctctctacagatgtcacagtcacctctgtcacggatttgggtacagagactcgcagacgattcactcttctttctttctctctctctgggttttaattcaaaaagtgaagttggttaccattgtcttgtacgatcgtatattcccgatatgatttgttttgacagagcaactgctttgtatatatatgccaaatatctctctctctctccctctctccttgcatcaatttataagtaagaccaaaagagatcaccaaaactcaggcttcttgtttggcttttcttattgttgattgagagagtgagagtaagagagagagagagagagagagagtgagagagagagagagagagagtgagatgatgatgatgagaggtggtgagagagtgaaggagtttcttcgaccctttgtcgattccagaacttgggacttatgtgttatctggaaactcggtgatgatccttctaggttcaacacactctccggtttttctttgttatttgttcgttgttcatgtgaatcatcatcagctgtctactattttgtttcagtagcaaagcttccgtttttatgtatactgatgggtttttcgtgtttgtcttttatctttgctttctgaattaggacttttttttttgtttttgctctgttattggcttcctgaaactattttgtttcagtagcaaagtttccatttttttgattttgattagtccttagtaacttctggctctgttctatcaaatttctctggtttctgtttttttttttttttgctcatctggtttttgattttaatggtttatggtttgttttgctttaccatctacctcctgttcttggttttgtcttgtctagttttactaaaagtttgtgggttttatgatcttcatctcgtaattggtatgaattccatttaaactacaggtttattgaatgggtgggatgctgctgcagtggttgttatattgataagaatataaagcttgaaaactcagaagaaggaggaactgggagaaaaaagaaggcttctttctgtagagatgaccacaacaagcatcgtataagaaccttagcttgtgaagcgctttctcgttttcctctcttcatgcctctctatcccgggtatgtttccatctattcaaccccctttcaagttaattttttcttcaagaataatatgaagcttctttctcaattgcaggattcatggagaagtagtgatgtcaaaatctccaaagtggttggttaattcaggatctaaaatggtaaaaaagactcttttcgtcagccttttttactcgtttgatcataagaacaatctgatctccatgtgttttggcaggaaatgttcagcactcgtgttcttgttcctgtgagtgatggtctcgttgagctgttcgctttcgatatggtaaaaacatgttagcatttcgcatagaaagtctgtcattggttttggtggttacttcataaaatgttggtctgtatcagagaccgtttgatgaaagcatggtgcatttgatcatgtcgcgttgtaccaccttctttgaaccattccctgaacaaaggctgcagttcaggatcattccccgagcagaggaatctatgagtagcggtgtgaatctcagcgttgagggcggcggatcatcaagtgtttccaatccctccagtgaaactcagaatcttttcggcaattacccgaatgctagttgtgtggaaattctcagggaggaacaaacaccgtgtttgataatgaacaaggaaaaggatgttgtggtgcaaaatgccaacgattccaaagctaataagaagctgcttcctacggaaaacttcaaatcaaagaaccttcattcagagaggaaaagaagagagagaattaatcaggccatgtatggtctaagagccgtagtccctaaaatcacaaaggtttcttctgaaactcaatgcagtttctggatcactcttcttgtggtcaatgtagcactttccataggattattatatttatctttctttgtgctatatgcagttgaacaaaattggaattttcagtgatgctgttgattacatcaatgaactgctagtggagaagcagaaacttgaagatgagcttaaaggaatcaatgagatggaatgcaaagaaatcgctgcagaggaacaatctgcaatagctgatccagaagctgaaagagtttcctctaaaagcaacaagagagtgaagaaaaacgaggtattattcgaatatatagaccttcaagataatctatatctgagttgtaaaatcccacaaactctggtttcttttcaggtgaaaattgaagtccacgagactggtgagcgagatttcttgattcgggttgtgcaggaacataaacaagatggattcaagaggttgatagaagctgtagatttatgtgaacttgagatcattgacgtcaatttcaccagactcgatctcacagtcatgaccgttctcaatgtcaaggtagtaacgtaatcacatctcattgcccctgcacgtaatctcagattcttgaattctgataaacagttttggatttattcattcttaggcgaacaaagacgggattgcatgtggaatattgagagatttactgctcaagatgatgataacttcaatatgaaaactcagtaaaacagagtacataacctcaaaaggtcaaatgttttgtttgcttcagtcacaagttactgctagagatatgatttctcacaagctt

SEQ ID NO: 30 - DNA, 99416 bp, Arabidopsis thaliana
gaattcttcacataagtaccatgtttggatcgacaaaaacaacaagggaatttttttgttataccatgataattatgttgatcatttgtaataggctagataaaattaaagatacctttaaatgataatgtaacaattccatgtttaattaataggtgtccatatttattatccgaattacactatacaggtcacatatgctaagacaatttggtgtcaaaaacgaagaatctaagattattcaacaagctatcattattccttaccgatataaaagactttgaactattttttggccgtaaagctgacatatttcaccggagatgtcgttcaattatacacttgaccaagtcttattctaataacaaaaataataattatacacgtgaccaattctagattgaactttctaaccaattctacatgaatcgttcaccgaataaaaacaaaaacataaaattaaacctcgcaaaattgagtcttggagcctttgctaatttcttgaatactaaaagcagatcactgttgatctacatataattatttatttctgttgttcgttatttatccataaccaaaccatgattagaactaaatcagttctgtggatgcggtaaaacaatctcttcgtcgaatgaccccaaccaaatattcaaatgtacacttgctaaaacccggttcattggtagtccggtttggttcgtagtatttgagtcaatttcatatccctagatgttatgcagaattttgccacctagaccgaacagagcgttttcaaaacttggaaaggaaaaaacacaaagcatttagaacatgatggaacacatgttagccgcaaagaagtaaaagaagaaaaccttcattttgtcttctttccttgttttgcaaaatcgtccaaaggaataacttgtgtatatttatctgtttttgggtataaaagatatatatatatatatcgcctagtcgtcgctgcttgttgttgtcaaggcacacatgtttattctttatttttgtcaaatatttgaatcaagatcagctactattctaagaaactggctatttctaaaataacactcacgaattagccattatttataaaatggtaacggtatattcgagattccagtccatacatgttattaataaagaaagattggatctccatataaaaaatagctgtctcttacattgtagcactagctaaagatctttcaatactacgtacctagtcatacaattctttgaatatggttttaaattgtatgtgaatattattaagtgagaatagtatcgacataacaagtatgaaatcttttatttctatatattttatttaacaacctataacaaacatttcacttcaaattctcactatatgtagtccatcatcaactactttcttttcgcatatctttgaagtttttggttttactaaactaactctatcataaaaggagaaagctttaaatttaaccagaaatgaagatgcccgtggttgtacaattcttcataatctctcttctcctcacatcttcattttatgtactttcaagcgctgattcatgtaagtgtatacttaatctagttagttattttttaggttatttatcattttgaaactagttgtctgaaattctaagatttgatttgtgatggtgataaatgaattagcagcatgcggtggaaagtgcagtgtgagatgctcaaaggcagatcgaacacatgaggagtgccttgaggactgcgatatatgttgccagaagtgtaattgtgttccttcggggacttatggaaacaaagatgaatgtccttgctaccgtgatatgaaaaactccaaaggcggatccaagtgtccttgaacattctttgaagatcctcatcacatacatactatctacgtactatatgtatggaaattacatctatatatgtttgatgtatgaaataagttctgtgagcttaatgaaaattttgttatcttcaatccgattcctaaacacatcaagaataaatcatgtcgaggtttatatttctcagcttcaatttcactaaacgaataacttgggatactatgatggaatgcagaattgagaatttactctctcaattgtcttaaattcataatccaagatctacaaggggtaagtattaggactaaccgattaagggtttaataattatgtaattcagagactctaacgctttgcatcgaccaaatactacattgtaacataacacaaactcattggatgtgaaagtacaaagtagtatgtctttataataatttgtttccaaggaaaaaagacgagaacaaaaactaaaacaagagaaagatcatcccatgatatttaaatagagaatcaatctacaaaaagacggcaacctgattttcaaaacaagaacagtagatcagaggcaagccggatagtacataaaaaagactcaaacccaaaccaaagaggctttctccaactagaacgtaagtctttttttgagtcgctctgttttcgtttgtggaggaaccatatcaagtttcgacgctcacaagctcatactcgatcagcgaaagattgttatcatccttcacggtgatgtctgtgggctcctctgcaacttcaacacgtccccatctatcaactgcaagcctcatagaacccttgtacatgtcgatcttcgcattacgcagagtcactacactgccttctttcatcatatccactggataaaaatgaataatagcatcagtcataaatctataaaaagtacatgagaaatactcaaattatgcaaacaactaactatttccataaagcaatccactctcctgctattatctgtttcacagattcacaaccagtatagactataaagatgccaacttagaacagaaacttgccattaaagaagctaactgagaagagaagcagtctcttaaaagaccatcacaaaagcatttattctctcaccttggtcatttcttgcagtaaagattatgattccagtctcatcaccaactaagcattcggcaatccgcatctgacgtgactgaggacccatgggacgacctcctcctctctgcatcaccatcttcgtgttgacaactttcacattcagagagtggccattggttcctggtctcaactcattaacctttgtgaacacaggcttcctcaaagcagacgttgcctcagccatttttataacaaccctacaaaaattagccataaacaacaacatctgctgtgatcagcacctaacaacaatttcaatatctgattagacaatcaaaacctcaaatgcgatcaaacaggtttaagctatcctcatttctcacataagaaacgttttaacaattcaacaaaacaatttcattctccatacacaacaaattcaataaaacgcagcaacatagataatgaaagctaaattacacaaaagatcatatactttgatcccagaaattcacggaatctcagatcggagaaatgaaattgacgtgaagaaaagtgtagtaacgttaggaagatggaattgaaacaagaaaaaagctagctagggtttttggaaactcacgtactttttgattttgagagaagagacgacgacgatgactttagcgattagatctgtggaggcgatatacacaaagacgcggcggtcttctttataactctagaactcagatattaatactcaccgtagatccgtgacctcaacacgtgtcatgtttctgaaacatcttcattaaaactacccttatatttttttatatatttaagattgaccttataactttgactaatactgattacaccctctattctccgaatcggttatcaaaaccaatttcactggaccgtgatatcagaaaccggttcactgaggtgggcgagattttttgttgtcactctcctctcctcgttcttcgatgctcatccattagaggaggagccgatgtttctgcttccatggtaacgctctcgtctccatctccctcgctctcttgcgtagagaacgtgacatgtaaatcttctcacgtttctcgggttctaatctccggtaccgataatattaatcacggtgaatcgtcggaagccaaaatactgagagatgttcatatcgtaagaactttgagatttttctttgaatctcagttctctgtgatttggtacgttcaattacggatatctaatttgagttaatcgttgttgtgtttgtgcttcttagtcagaaaggttattggaggatttcactgagcttgcaagagagaacactgagaaggacctcgagacttgtgggactctcgctgcctttcttgtaagattgttttgctttcttcgcattcaagttgattactttgggtgataagagaatctgggtggtgagaaaatcaaggaaaatgttagaaagtttcagactttattgttcctaattacaacttctaacagagatctttgcaaatttgaatttttagtgaaactcgatctatgctattgtttaaagtttacaccttgttttgacttttgtggtcatgattcatggttgttttgcttctgttccagggttcttcgtttttcgagtttcatgaacctgatggtaattacatttctatttctgttcatgctgtaggaaagaggaattttttatgtaaccactctgataatacctaagcaagaatcaacttctaattctgtgagttatcttagaaagattatctcgatcattttgtggtattcaaaatgaggtgcttactcaggtgctaaaattggcagtgtcaggctatgaatgaagtggaagtgttttccattcaaaacgaaagagaactctatcccgtaggatggattcatgtatatctctctcttctagctccctccatgtttagtgatctgtttatctactttgtcttgacttactataacgaggttatgcatattttccagactcatccttctcagggttgtttcatgtcatctgtagatctgcatacacattattcgtatcaggtacatctctgctgtttccaaattgcatatatactaggtttgagacaattctgatctcagtttcccatcatgtcattcttaggtaatggtgccagaggcttttgcaatcgtcgtagctccaactgatagctctaagtatgttcttccaaagctatggagtcaattatacagtcaacatatttccttgatagactctcaaactgatctttttggcaggagttacgggatatttaagctaacggaccctggaggaatggaggtactgagaggctgctcagagactggattccacccgcacaaagaaccagaagatgggaacccagtttatgagcattgctcaaacgtctacaagaactcgaaccttaggttcgagatttttgatctacgttaaggtaacgacttctgtggacttatcagtaaaaaggttcaaactttatccactgtgggctaaggatgtcaataataaccgtcatcataaccaccaccctaaccagaactgtatacttggtctgagaaggctgtctgattcgggttatgaacacaaggtaccttctattaagcttagcaatgttaataaattgtcatgtccttagatttggatcaattggttccattatggaagaacaacaatgaccatagacataagacattgtattggcgtatgcaattgttatatatctgtacaaatgtatacattggcatctatttctccatataacactacattaatattatcaccatatttcgccattttatacctcttaacttgccagtgatgactgatgaaaatggttgagcttttaaaaaggacgggaaaattttaaacttgagctttgacttgttaaaaaattattcattttgacagttttcgtctgattcaagtttcattcttttcatttctcatttgattgattaattagatacaaaatagccataaattagctgtaataataatttaaaaggtatctttgagctcttttttggtaaagacatattccaaatacctctcttcacatgaaacaagagtacaaaccccaaaaacagaaccaaaggtccaaacttttcttttgaaagtaataaagctatcaaagctctttccttgttaaagtaaatagtacagaggatgggttttatcagaaaaaaaaaagctagctcatttcatattgttgagtgttgctatcaaaacccatacagatacagtactttgttttgcttcaaatccctttatggccgttttcaagcacatgatagctttcttcgtacagtcaagagtaaaacctctctttttcttaccctatcttctctctctacagatgtcacagtcacctctgtcacggatttgggtacagagactcgcagacgattcactcttctttctttctctctctctgggttttaattcaaaaagtgaagttggttaccattgtcttgtacgatcgtatattcccgatatgatttgttttgacagagcaactgctttgtatatatatgccaaatatctctctctctctccctctctccttgcatcaatttataagtaagaccaaaagagatcaccaaaactcaggcttcttgtttggcttttcttattgttgattgagagagtgagagtaagagagagagagagagagagagagtgagagagagagagagagagagtgagatgatgatgatgagaggtggtgagagagtgaaggagtttcttcgaccctttgtcgattccagaacttgggacttatgtgttatctggaaactcggtgatgatccttctaggttcaacacactctccggtttttctttgttatttgttcgttgttcatgtgaatcatcatcagctgtctactattttgtttcagtagcaaagcttccgtttttatgtatactgatgggtttttcgtgtttgtcttttatctttgctttctgaattaggacttttttttttgtttttgctctgttattggcttcctgaaactattttgtttcagtagcaaagtttccatttttttgattttgattagtccttagtaacttctggctctgttctatcaaatttctctggtttctgtttttttttttttttgctcatctggtttttgattttaatggtttatggtttgttttgctttaccatctacctcctgttcttggttttgtcttgtctagttttactaaaagtttgtgggttttatgatcttcatctcgtaattggtatgaattccatttaaactacaggtttattgaatgggtgggatgctgctgcagtggttgttatattgataagaatataaagcttgaaaactcagaagaaggaggaactgggagaaaaaagaaggcttctttctgtagagatgaccacaacaagcatcgtataagaaccttagcttgtgaagcgctttctcgttttcctctcttcatgcctctctatcccgggtatgtttccatctattcaaccccctttcaagttaattttttcttcaagaataatatgaagcttctttctcaattgcaggattcatggagaagtagtgatgtcaaaatctccaaagtggttggttaattcaggatctaaaatggtaaaaaagactcttttcgtcagccttttttactcgtttgatcataagaacaatctgatctccatgtgttttggcaggaaatgttcagcactcgtgttcttgttcctgtgagtgatggtctcgttgagctgttcgctttcgatatggtaaaaacatgttagcatttcgcatagaaagtctgtcattggttttggtggttacttcataaaatgttggtctgtatcagagaccgtttgatgaaagcatggtgcatttgatcatgtcgcgttgtaccaccttctttgaaccattccctgaacaaaggctgcagttcaggatcattccccgagcagaggaatctatgagtagcggtgtgaatctcagcgttgagggcggcggatcatcaagtgtttccaatccctccagtgaaactcagaatcttttcggcaattacccgaatgctagttgtgtggaaattctcagggaggaacaaacaccgtgtttgataatgaacaaggaaaaggatgttgtggtgcaaaatgccaacgattccaaagctaataagaagctgcttcctacggaaaacttcaaatcaaagaaccttcattcagagaggaaaagaagagagagaattaatcaggccatgtatggtctaagagccgtagtccctaaaatcacaaaggtttcttctgaaactcaatgcagtttctggatcactcttcttgtggtcaatgtagcactttccataggattattatatttatctttctttgtgctatatgcagttgaacaaaattggaattttcagtgatgctgttgattacatcaatgaactgctagtggagaagcagaaacttgaagatgagcttaaaggaatcaatgagatggaatgcaaagaaatcgctgcagaggaacaatctgcaatagctgatccagaagctgaaagagtttcctctaaaagcaacaagagagtgaagaaaaacgaggtattattcgaatatatagaccttcaagataatctatatctgagttgtaaaatcccacaaactctggtttcttttcaggtgaaaattgaagtccacgagactggtgagcgagatttcttgattcgggttgtgcaggaacataaacaagatggattcaagaggttgatagaagctgtagatttatgtgaacttgagatcattgacgtcaatttcaccagactcgatctcacagtcatgaccgttctcaatgtcaaggtagtaacgtaatcacatctcattgcccctgcacgtaatctcagattcttgaattctgataaacagttttggatttattcattcttaggcgaacaaagacgggattgcatgtggaatattgagagatttactgctcaagatgatgataacttcaatatgaaaactcagtaaaacagagtacataacctcaaaaggtcaaatgttttgtttgcttcagtcacaagttactgctagagatatgatttctcacaagcttttaggtgacagtttacatgtttgaaactatacattcttctggtttgtcattgggttttcattaagatctttcacaaatataattctaaagggtcgtcgtccctaagaactaagaaaaacaaaacacaacaacttgagtttaatttattggtttcaatggttccggtgacttgtgttgaaggctcggctctcagattcatattcatggctagtggcgtagtcttggctagggtagtagccagtattagtaccaagatccgaggaatcttcagaggctcgtctgaaaattcgaatctcattactgtattgaccggagtcgtagaccctactttgacccactttaactccgtttgtcagatccgacaagtcatctctcgtgtccagagctctaacaacctgcaaaaagagaaacactcttgatcaatcagatggtttgtttctttttctagctgtatattattaggtcaagtcaagaagtgtttctatttctgacctgaaccatacgaggtcgttttaaagcggaatgtctaacacaagacgctgccgtttcaatcattttatagacttcactttcgacgtaatcattctctagccgtggatccactacttcgctgatgtcacctttttcaatggcctcgattagccttggacgtgcctgccaaaaaaccaacaaatattcaaccctcatgagattttttcatttatattgaaaacacaaataaactcataggatcaaaatataaaaatttacccattcgacgagactttcttcacccaaaggttgagaggtatcaacaggtttgcgaccggtgatgagttcgagaagcacaactccaaatgaaaacacatctgatctatccgttagctttccgcttgacgcatattctggtgctagatacctgcattgcattatgttatgtaatgttgttaatatcgtatcgtaacattttattataaaaaaaacaaataagagaagtgacagtacccgaatgtgcccatgacacgcgttgatatgtgtgactgtgcagtatcgttcagtctagcgagtccgaaatctgcaacctgtacgtaacaaatcaaatgctctcagtgacgaaaatgatcataatgatttctacgatctcccactaatcattttattactaaaacagcaaaatattaaaattaatttaaataatgactttgcctgagcttcgaattcatcatccagcagaatgtttgacgatttgatgtccctatggataatctttgggtggcctatgaaattcattaaagccaaattagcctaatccttgattatatagttttacaccaaggaaatatatatttcatgttcaagaagaaaataaagaaataaatgtgatggagtgtatatatactcacaatcttcatgtagataagcaagtcctttggctgcgcctattgcaatcctgactcttctactccattccaaaaccggtaagtttttgcctgacaacaacgtaagaaaatatctggtttaattgtagcatataagtatattagtccccaatactatcaatattcataaaacaaattaaaatgtcaacacatatattctatatagaatcctaatttagtaacaaagagagactgtaaaaagaagtacgtaccatgtaaatggtaatccaaagtattgttggggacaaactcatagatgaggaatctgtgttgttcagagatgcaataacccacaagagacaccaagtgcctatgatgcactctgcttatgatctctacttcagctttgaactctctatatccttctgcgctgaccgacttcagctgtttgatcgctactggctttccctcgaataggatgcccttgtagacacacccgaacccgccttctcctaccacaaagctcttgcaaaatccttcagttatctgacttagctcttcgtaggtgaaatggatctttgaagtccctattactgcggagtcaggggttcctctaccatgttttgggttcccaagactgttagtatccggtgaagagttctgcgccgagctgttcccattcccgggtttctgtctgtaatggatgaatccttctgcgacaagaaacaataatcaagaacaagaactagacttaagggtcaagtacacaaaaataaaatcaagagcaggacatgatttcaagagccaatttaagacaacaccaaaaggtaaaaatattaacctgtatttacagagacattagccggtggcaaatactggttagagcgcggggaagaagagcctttcttttgtttcctcctaacaaagaaaacgccagcgatgaacaatatgaccaacacacctgcgatcccaataccaatcactgtcttctcggtgtaattagactcattactttgttggctagtaccaccatccccgttactattggcattatgtctattagagcctccggaatggttatttgatccggagagggaaggaggagatggggaagaagacgacgagggtacacgatttgattctcctcccagaggtgaatccaagggctgtaaagggtttccaggagaattagggtttagcggaagcatcggaggcaataaagatgacaacggaggagacccttgactgccggaattttcctgagacggtggcgaaaagggagtagaaggcggagacggaagagaaatagggttgttgatgggttcaagtatgttattatcattaggtcttggatccggtagctgattaactaaggaggggggaggaaaaagagaaggaggaggtaattgaggctttggaaaaggaatcaccaccggagaatctccagttggggtggattgaggcggaggttgaggctgaggaggtgaaggaggtggagttatagaaggtggaggggaagaaggaggcgttggaggtggagttgtattaggaggctgattcggtggtggttgagcagctgttgccggcgggggagatgtttgtgtgtcaggggatggaggagaaggaggtgaggtggctggaggttgtgtcgtctcagaaccgccaatgattttctgatcagtgaatcctccgacatttgttggttgtgaagctacaaacggagatatcgtcttaccgaataaatctgcttgttgctggactttgtccatttgtcttcaccttgtttaatttgcttctccttgtttctttttacatgtttgtatttgatcttaaagaagtttcttgtggaacaagaaaggacctaaaactttgaaatccaagccaaactaggtttaaattcccctgagatcctagaaattaaatcttaaagatcgtagcggtttctcgagaaaatgtgtttatgagatcaacagatttttgaaattcacgaaagaaattcggaaacaaaatccaggcatacacggttgcttatgactcaaggaagataggaagaagagagtttttttttatcaagtcgattcagattttgtttgttgaggatgatttttttttccttggattttttttgttcttttcgtgttttttgtgtaaaaatagaaagtctcccaaatgtcaacagttgaattctaaaaattactgagaaaataggctaaaaattcacttgattgtttcttttttttattacagtaaataattgtaagaaataagagtatcaatatctggaagatttaccattcagcttcattgtcggaatgccgcgtaaactattctttctaaaagttctcccattgatatttctgaacaataaaattcacaaaatccggctataacatttaatttaagctcttcccatgatatatttgtcatcatacgtacgctggttaaagttcattatttagcacagtgaaacttccatgcattataatttataagtttattaaaacttcagaattcagactaggtcatagaaataaacaattgaagactagtctctctatataaaaccaggtcagtaaaaaggtaacattaaaataaataaatctatatacttataggtttaggaattaggatatggaccaaggcagagtaaaccaattgatcttacaggtttggtgtttagagattgcaatgtggagaacaaagaaggatcatcgcgcataaagctcctaccgatgagtgaacagataacattgatttactatatgaaaataagtgatgtgattttttaactccaattaaaaaaaaaaaagaagtcttttaaagcctagaagaattcaaacattcgagaagagtaagcaaaaaggagaaacggtgacagtaaaacatgaaacaaatcgagcaggtcttaaaccacaagaaatcaagtcgactccggagagaaagcttcaatcccctcaccaaaactatctggtcgagataacctcaagcctgcgaattgagtaaaagaaagaaccgaaatcaaatcaacacacaaacatcaatctaaccaatacctaagaatgccatcagtcagttaacaatgtcaatatatgttcataacctgaaccaactaagcctatcgaatcatgaattcagaagtcttactttgctagcaatgttgttggaaagccaatccagaccttcatagagcccttcaccgctagttgcgcatgtgctttggatgtacctggtaagagagagagcaagcaacgtgtttgtaagtacccatgtatgcaatagtaagtaataaattctgtctgggataaaactataaatcaccagtggcgttgccggagtgagtgaaggccaagcttatcagtaatctcagcagcattcatagcgtttggaagatcctgcttgttggcaaacacaagcaatactgcatcccgaagctcatcctgcagttacgaagcatcaataggaaaaagccatacggattaccaagtcaaaatattaacaaaattgtgtagcattaaaaacatacttcattcaacatcctgtgaagttcatctctggcttcaacaacacggtctctgtcattgctatcaacaacaaatatcagaccttgagtgttttggaagtagtgtctccacaagggacggatctgtaaaatagaataagtggataactgttactcttttctttttaatcctttcaaagagaatcatatatagtacaaagttacaaaccttgtcctgacccccgacatcccaaaccgtgaagctgatgttcttgtactcaaccgtctccacattaaaccctgtttaaacaaattatttatcaagtctcattgtctaacctagtaaaattccaatcagtagttctcagaagacttaccgatggtgggaatggtggtgacaatctcaccaagcttgagcttgtacaaaatggtggtcttaccagcagcatcaagaccaaccataaggattcgcatctccttcttggcaaaaagccggctaaaaagctttgcaaatgaaagccccattttccttttaactgttgatcctgaaaatgtcaagagatccacacaccattaaacaattgaatcactcttcttcttagcaaaaacttacaacatttttttcacactgttcgctaaaattgctccttttagcaatgtttacatcaaatgcatctactaacacgacaatcgaaaaatccaacatttcatgatcctttgaatccacataataagagatcaggaaacaaagcaaaatctacaccccaagatacacgatcattcgacgacaatggcgagcgatctaacgaaaaactcagatcacaaaaaaaaactcagatacttgttcggatcagttcatcaagggaattttaatggaattcgaatgcagatccagaatatccgaaagaatgtaagacgatctggaaagttttggagcttacctttggagaattgaaagggatctaaaccgagagagagagaagcttccaatcagcagcacaaagacgattttgtgattgaaatatgaagaaacttcttctactactttgtgatttctgaatgtgaaagtttcactagcaccctcctatttttgtatagtatataaaaagtaccctaaagttatacattttgtttcaaattaacccctcaaatttgtatattgtaattcatgaccatcaatcaaatctttcatttgacttcatatcatcccctccaagctatgtgattttgttggattctgtcattttgcatccatttagtaaacactatcatatatgattctatgcaaattttgatatgaagaaagtcagagaacaagtataaacttttttggttgcttttgttccttgtaacagacactcttctcacctctctgtggcctcaccatctcagccgttatacatttaatatgaaataaatccatcaacaagtatggaaataaagatctcatgcttagtggaacaagatgtaacaactcttcaatttatgaactaacattgactcatctttaacactcactactcaggtcacgaagcaaagatacaacaacctctgtgtaaccagttgcatgaaaaaactctagcccattcaaaataataaatgctgtattgatcatcacttggttggtggtgctggttaataaagtgaggcattttaagtagcaagagacatcatttttaatatctaaaccgtaaattcgtatgaagtaggttttataggctaaagaaagatgatatacatgaatctacatctttttacttgcgaaaaatccgttaacacacatcgtgatcggactgaactttgtttctcgggggcttcccaatcttcaaacaatcaatgggaggaagagtaggagtgttgagctcaccaaatgtctgccagcaataagcatcatacattcgatacttttcttgaaccggtttaagctctatcgacgataactgcacatctacacacgggaagttatcgctacaagcgaaatgcaccggtttcacggtataagttccttttatcctctcgtaagtcactccttccactgctactgctgatgtttggttcttgcatttgctatggtcacagtagaattggtttatcgttattggaatttgtacttggttgagctgaatgtttgagaagattatccctttcactgatcctactcctccttgccatgtcttgattcggacacctgtcattgtgttgtgcatagctacgtctcgtactgttatgttcgagacgcaggcttttgtaccctctttgccgagactaccaatgctgatcccgtgacccggtccacagttcacattgtgcacaaacacgttcgagcaacccgtttggatcgagatacagtcatctcctgcataattcaaggtttctagatttaagaattgagattttttaaagattcaggatttaagattggagatcatattaccgcaagcgagagtagtgctgtgaatgaggacatctttggtgttctggaggtgaattccatcagtgtttggactgtcaccaggtgaagaaacggctatgtcatgcaccacaacccctacgcagtcgtcgaatttgaggtgacactgaggactgttttgtatcgttatacccgtcacttccacaccaaaactcccagagaatctcaatgcctaacagaaacaaaaatcagtaaacaaactaatgcttacaatctcacagtgccaatatctatttctcaccgttggtttaatgcttggcattctctcatcaagctcacttctgatctgtcatatgtaaaaacaaaacagagtttggtcttagatgaatattgtgttgtgaatgagacagtgaagaagaagacgatgaacttaccggcataggagggttttggttagcagaattgttcaaagggacgatgagtttggtatcactatcaatgaaaggagaatcttgttgccaccaaccagagcctcttccatcaataacacctttcccttgtactttaattcctttcagctttgtaaaatcaatccaccacattaacccttttccccatgtctttgaatccgttggagctataatcgtaccatcaagctgcataattcacaacaaagcttagaatattttcaccaaagtgatacacttctatataaaagagatcaattctcacctggaacacaatgttagcttgacaataaggaccagagaatgagatcggtccaacaaggtaagtgtattcaggcggtacaagcatcactgatgcttcgattttgcaagctgctacccaagccgcttcaaacgcctgcaaccgttatgaaactctgttaattatttcattaactaatcttaaaagttaaaaccactaatcaccattagtctacagagaaactctgtagtaattgttatcaaggcttgtgaattgtggtcccatttgtaatctgttatttctgttgtcactttatattcgtttgtcttttgttttttggcgcattttaacatttgatatataatacattaaaaagttacgtgactttacagaaacagatatctttttctgagctctgttttttcttgttctgtctcgtgatgttgtcaatgatgtctcaactgttatttgtcttttgtaaaattctcatgaaaacgaaatactaaagtgctctaattaatcactaggattgaaaactgtacggataacgaaattaatgagctttttttattgtaccttagtgtcatcacatttgccatcaccctttgctccaaaatccatcacattgaaaacttgagatcccttttgaggcggaagaggcggtggttggacttttggtggccctgaaaccaccggagagttattgtcgtgagcttttggcggcgttttcagctttggtttcggtttaggtttagacttgtggtgatggttgttgttgtgagaactgtggtggtgactgttcccatggctcttcggtttcttgtttgacaaggaatcagacaagtcagaagagcttcggtggctatgtctccaatgtcttcctcttctggcaatgcaggtctctagagtcactgaccagaccaaaacagccattaatatcatcatcgtgatgcttctcagacttagacttcttctcattatcattttttgttgtctaaacgaagagtgttgtggtggttgaagaaactaaagagactttggtttctttgttttctggtttcggttgaagaaagagaaggttttttggtgagatttatacaaggaagtagtccaagaatgtagagaggctcacgggttttcgaaatggaattttattcttaaaagatagaaaacgaaattgaatcaatggtgtcctttatttttgttgataagtaacttattctaaataaattaatagattactatacaaacgaataaatctaggctttgtacaagttatccatatatgataataagaccataatgtttgattttagtagaaattttgttaaataatgctgatattgacagtgatgtaaagtgatcactcgtgaattagtatttggagcttagcttacgggtactaatatgtgaaaagtaaaacaaagcagaggtatctctttttttatagtagaggttttttaccaatgtgtaaaagtcttacccgaatcagccaaaacctgaattgtggagtaactgagtaagtaaatgagtcaggggtgatgatacactgaatgtataccacgtggaaactaaaggttggttaaaagctcatctaatttggttgccaagacttcacataattacatagataaacacatgtatgtgccaatgactgttgtataggaacaccatgaagtggggatacttaaaatgaggtgtatattcagttttcggatcttgctttttgtttaatgtggatatagatgggtacaagcatgtgtgtatgtaatacttgcatgtgttggatctgtcgtattggcatgagtagagactttagagtgtcgtatgattttcatatttactgtagcagtgtggtgaatatttactgaattctagtaaactaaattactagcaaaaacaagcaaaacagaatgattaattcaaatcactatgaaatgaataatgcaaatcactgaattagatttttttgcattattcatttcatatgtagtttgtaaactggtcgcaacattacatattagctattcagattccatgtggacaaccaaaatctttaaccaaaagaagaagtggatatcaaaatctcaaaatttgattcaagaaaaaaaacaaaaaaatgctgataaattatccgtctcattataattttcttaagaatttgatttataaaatactaaataatatagtgatatatatagaagaatattatataaaacgaaagagactcgtgagtgggtctatatgttgtcaatggggcactgattataacatctcttttagtactcacatgcactacttcacgggcattgcttttgtattcacaactcctccaattattatttattagtatttgattatttatctcatttttactattttatattttatgtcgaatccattctagatgaaatttcatttattattcaagaaaaaaaaacagactactattaaaggaaagagaagaaacagaaaacagaaagtaaccgaagcttgtttctttaggtcctcatattttttatttttttctcatatttgtataatacactaactataatgaaatttttgacacaaaacgttgtcggcattgtttttcttttctttcttcacgagctgtcggcattgtttgtgaattgtgaatgatcatttgtttctttttagtagtatactagtatatcaaatagctaaagactttgatcggcaatatatattgtgctgcatatggtaaccgtgagataatattttggaattgagtaatactacatattaaatggatttgatgattaagattagtaaaaaaaaaacgaaaatgtaatttgatgatttttgtaatgatggatagttcttaacggaaatttattataaaatcgtacatatcactatagtactttaccaattatttatgtttggatgaaaaaaaacaacagtttggtagttggatctggttttgatatataacaaatttgatccagaaattacaaaaacgaaaaaaaaaaaaaaaaaaaaaaaagatatatatatatatatatatatatatatatatatatatattgtgatttttttagaatatttgagtatttgatgatcaagccacaaaaatcaaatagaaaaatagatggttctcggattagtgttatactgttatatgttgctaattttcaattatgaccagctaattaataaaccaagttaattaaaactgaaaaatattgagacatttgttgatatatacatttgcaatcatcaagcatgcacggatcagcataaaccatctttgggattcaggaaaagctttgtgtgctaatagttttacaccatttctctgtcaagtaaaacctagtccaattaaaaaataaatacaaaagaatgctaacttcaaatgctgtaatgagaaaaaatctaagtatacttgttttgtcataacagagcaaattgactaatactatactgtattatttaaatttcatcctggatttttagaataataataaattatgtggttaatcattcatttactattctgcaatagtaaaatatcatgtgatgaacacacatatatgtgattcgacagagtcctcttcttgacagccaaaaagctgttggctatgtaggagtatttctgattcttcaaattattcaaaaaataaataaaaaaatagatacgtatatattgtgacaagaattttatcacatgaagcgttgatcatcttggtagttactaaacaaatattccaataaaattaaaatggggaatttgataatctaacaacgtaaactacaatgtgttgtcggatgatatacgaaacagaggagattaaattaatttcaatactgtacgtttctaattaattgtttaatttcttttggttgttggctattgtatcaataatacctataccggctatacgaatttttgtcatggtttatttggttatactcaaatacgatcttgagtgcacacatgcatgattcctaatgatcatataccagcgattatgtgcatggacaatagtcacaataatgttattttataatgtcaaggtatatgtaagttaagatcattttcgttttaagtttaattaaatttgtgaattgtaaaggtatagtcagagacaagagacttgttggcttctttactgagattacaggtagtttcagttttacaaacgcagcataacatatatcggtccaagtatatgcctctgaatgaccctctctttcattaagattatcgataaagccactgttcattgttgcacgagacaaataagtacaaactaagccttattaatttcaatacttttttatgttacaaggaaagaatcctgaaagatcaagatatgtgtcagacaaaacatttattaaaactatgcctaaagctaacgttgcatttataaaatcagagacttataggtggacctaacatgttgcctatctttgttggtgctactgctcttagttacacgattacgagacggtaaaaaacaatgttcataaaacttcttacacatatttcactcatttgcaaactacttcgagtctaaattgtctaggcgtagattactgtctgatcttttacagtatccttaaaagtaatttaaaaattataatcatattaattacactgctatctaaactgattaatcagtactcaaccgtatacggaatttaaattatacgaaaatggctttgattgtgatccatcacaagataacgtgcagtatattgcaaaatctaaattatctgatgatgtaatgtatatatactattacatgttatactctttaaacctttgaagagataatctagaaattctatatacgtggtggatatgctcataaatcttgttttagattatacttttacgtatacaacaacaactcatacaccgaacaagtcaagaatcgatgcgaaaattaaataatgtataagataataatatggacgaatctgtaaggtgcacgagagttttgtaattattggaaatgtaataataacaaaaatgtatgccctttgacttcacagctcgactctttatgatctcgtgccaatctctctctgtttttttttaaacgaaacttatattttgtggaccgtaccatttatccgatacgccaaaaactatagttacctgtcttctacgtttttaactaaattcacgcatttgacaaaagaaaaaaaaaatcacgcacatttgatgtatattataagtatgatcacacacgtagtcactaagtgggaataaattttaaaaagaaagtggtaataaattatatattatatacatacttgaataatcggagaaatcgacgaaagtatgttgatatgattgaaatgatattaaataaatactaatttttctgcatgatatcagatataataataccatttaaaaaatcataagcatcatgttttctatattcttagccgcagaaacctagccaaattatctagtgttaatccatcagttgatacgtttctatattaatctcgcagttaaaaaaaatccttataaaattctttttgaagtaaaatatatttttcatctatgtggctattgtttctttgattttggattagttaatttttgttttatcttttggatttacgaaaattaaaggtgagttctatttgcagtcttcaagcgtaaagccgctcgtgaacctttttttctcttgttatgcccttttattggctccccgtgaactccatgcaacggctttgcaatttaccttaatatccttccattagttcatggtctattctctaatctttttgttacaatatcattctataattctctcattactgtttttcttttgattgactaattttcatattcagacaaaaactgtttggaactaactgttgttcttaattagatttatataatcagaagattaagtgtgtaaatggtgatcgaagttgatgtggaacaaatggttgagagaataaataaacggcgaattcgtcaatcttgtgccattaataagtttaatttaggagtcattgttccgcatattgcgacaagctgaatttaatgtggaaagaaaaacgcattttaatttttatggattgtaaataaaataaactctctttttttctttttcttttttgaagaaaagcagccgacctcgcaatatttactgttatgttgcttcataaatttcatagagacaaaatttgtctcttctcccactctcgtgtccaaatcgttttgttctcattacactagagactagactatcatccaatcatcgttcaacatttggatggtcgatgcatgcacgcatatatatatatatatatatatatatatatatatgtgtaatgtgtgcacatgcatatatatagccatatatatatatatttgatacggtatgtcaaattaaatacaaatgtcaggatgctcacatgtatattattaatgttaaatcaaagtaaaattggtcccattaattgattccaaaaaaaataaaaaaaaattaaacaactttagaattgaagcttccacctaacggcattctgataaacctctaattaccaacgtaaactaataagacaaatgacgtgaagtccaaaaccagattggatccaaagctggctctggttctccctaaacaaggtttcgttgtgcattgaacaaattgatttcggacacgtttgatttgagacaacttcatctctgtccgagacgcgtatttccggttttaattggctatttaccggtttaatcagttatttctggttgggttcaatgcgttgtttagaaaagacctaatataaaagccaatatgggcttttctaatatttttcgagcccactaagaagcagatgcagtctacatataagacgacggttcatgttatataattcaaaaaagtacgggttggtttatatgggctgatacgcgtggcccattatttgacctacaactttttcccttatttttttttgtcttaaggaccaaatgacccagtagttggcccaaataaaagtgtggtctatgaatcgaaagtagtagtagtagcccttccatatccaaaagcaatcagattgttgatgagatgacaaaaatcgaagctcatggtaaccatgcgtttgttttacattggctgcttcaagacaactgatccatataaataatttatttcataacttttctaggatcttctaaaacagatgcataataatacaccgatacaaataaatttatataacaaaatatttttttaaaaagagtatgaaagacttatataatggattctctttttccttctgttccatttggtcacaaatcaagaaaagaagacttggacgcaagaacttttcaaagacttgcatacaggacaaatcttagtgaatacatcacattctttacacaaactcaagtgccgacatggcactatcaacaccgatacttccttgacgttgcacattttgcatctcatcctctgatgaatccccatgttgttgttgttattgttgtttggatcgatgtatgatgaagctgcatcatctatttcgctgtctccaaaaccttctttgccttgatctgcagcagctatcacactgttgttgtgtgacattgcttgttggagatttgcctttaagacattaaccacagactcattgtactttgctctgtagtgccaattctgagcttccattgccacttgctttatccgctccacaagctctttattcttcttgttcatatcattgatctcgtgatctttctcttgaagcttcttgctcactcctttctctaatgttgtgagaaaagacgcgatgtgtctctgtttcatatccctcacacctttcgccatttgagctgcctgaaccacataaaagcaaacaaaaacattagaatcgaagaaccttttcacgtaaaaacagagcctacatgcagagacaatcagtacctggatcttgatgaactggtcaaactcatctttttgtctatggagatcaatccgaagactatcatcgagtgactgaaagattggagaagcagctaaaatgctaccactagcagaagtcactgaagaattgtgttcatcgtcgtcataagatagtctcagaccagttgagactagattctctttaggcacttcttctcgaacactagtgttgttataattatagttcaaagacatttgaagcttctgctgttgtctttggatgttgttactaatgctttcggcttcccttcctcttttgttagggcggatcattggaacgaggttatcgttagcaaagtagtttactggatcaacagtgcatccacctcccactgcacaaaaagaaaaacagacaaagattctaagtttcttaatgatgtttagtttacgacgaggacattatgagagaaaacgaaacttactgtttccgagcaagtgaagctgattcgatcgtaggtttgtctggtattgcaactggttctcgttcatgaaaaccggtggtgcagtgtttccattgtttccacttaacatcttcctcaaaagtgttatgaatgtgtgtatgtattcgactttctcggttgaattagagtactaacagaagtatagaaacctgcagctaaggaagaagaagaatagaaaaatcaagattctgacatgtcttaagcaactaatctaacacatatactcaaataaaaaacatgaatcattgtctatttacatttggaacaccaaataccaaacagagttaaaaaacagagaatagtaaaacgagacaatgctggatcacagaaacagatttgatgccaaatctatatgctaaagagagacttgtggagaattataatcatttttacctaagcaataagattcttatgaattgtttgtctgataaacaggggatacaaaagagattgattgattggttcaaaagtcaaagttccatataaatatgcaacttaacagatactgatataaggcaaatctataggaacatggaaagataacaaaagttcaaagaacaagtcataacccagaaacagaaaaccctaaaaatattgcaatcttccccaaaaaggaaaaaaatgataacaagaagaagaagaggaaaataaaaattatacctttttcagagatttctcacaagatttaatctgatttcacaaactctagtttccttctagatcctgcatatatatattaggaaaacaaaaatcatcatcaactaaaagaaagaaatacttttttatatagcccataattattatttttgtagaaagaaaaaaaagaggttaagaaatcgagagagacaaaccgatgattcaggatcttgacagggaaaaaaagaagaagatgctattgtgaagatgaaacggctatagaagaagaagaagaacaaaacccaataaatttaaagccacaaaaaaatagaaggaagaagacaaaagaaagaggcaaaagaaacggaagaagaagaaagaaagaaaggaaatgaatgaatgatggatgtggtaagcaaagcgggtgcgatggagcgggacagtggtggaagaagtgggggaagttgggttggcgattttcgatatgaaattattaatacgttttttttttttgaatcattcaaaacaaaaaaaaactttgagaaaagaaacaaaaaatggttgatagtaaatgtaaacaccaaacaagaaccgttggtggtgctttctcgtcttttctttcgtgagttgtgtatttctctttcattacgccaacttttcattattaccttctttttttttgtttttggtttccttcttttttgttacaaatcccataaaattataggtttgactgatactatattaattagagatgtgtaatattaggatatggaaatgaatagtcaaattttgaaaacaattttgcttaatatagttcgcaaaacgttacataacaagttttactagattcatcattgatgaagttatattgctaatgcatatatggaaggtatatatacaaccattaaagattttgaataaaaatagtgagattatatttttaaaacgtgtttatcaccaacattgttattaattaaatgacttaatgaaattactaatttagggttaatttttgaaaaattgttttgactaaaacaaaaaataaaaaatacagaataaggtaatttaaaaatgtggaatatgattaaatttcagtaaggaaatagtataaatacctcattgcatgattccacatgtatctagtttaagccatttcatatcaactaggattctttttttcacatcgaatatcatttactacggcagagatttgtcattttgaaacgtatcaaaatatgaaatattaaaccattgaaatttttcagataattataatttatgtagggtgttacatgtgaacaattcaaattggattctctggaagtccataccatgagaggcgttattgatatatatatatatatatatatatatatatatatataatttaaaatattccaccgattaaatcaataccacgaacgacgaacacagatgttgctatgtacatcatgagaactatttatttttatatagaaaaatcaaactctgtctccctaattttaaaatcactcaacgaccatcaacacactgtatttcctattttatatttattataatgtaataataaaatgaatatacaagatgtgaacggagataataataatgaataatgaataatggtttcacgtcaaattcaaagtcaggcaggacacggattccacagtgtgggaattatgacagtcgaagaagaaggagagagatggtcaactaaccctaggggtattcttgtctttttgacatccccatttacttactcaaattcatgcgacggtaacggagaaggtatcaacgagaacgtgtccgccgtgatctcagtcaatgttttggtgtgataatagaaaaaggagccgtttatttgcgagtgggatccacgcgcctggtcgttgggcaaatatggcgggtaagttttggcggggaaataaagaagaagaagccttatagagtagttaccgtgactttctcgaaacgtggaccagaccaaaccgtcgcacgccagatttgtcggaaggtaattatagtttacttacttggaaaacttttgcactaataaaattaaatcgtgtaaaaatttgttaacattcgtaaaataggaatattaatttatccaaatgaaaaagagggaatataatttttgaaaaagaaaaagcaaaaggttttctagtggttgcaaccacacagacgcaatcaatttattattatgtgtactatagttttcttttgtaacgttacacgatatccaattaatatttagttgaggatttgttatgcttatagcttttgactatgtccattgtccagtgcataacctttgcttttctttcaagttgttaacagcgattctctaggctgaaaaaaccctctaatttgcttactaatttcaatattgacggtctactagtatattagtatgtaagatccgttgaaaattatgtaacaaagaaattgaacctgaaccaccaaaattaaatgttttgtatgattggttgtgagattttcggctaaactgatcgattcagcttgacaagtctgaaaagtagaagccactcatgcaggttttgatatgtttcttgaagggtgttgacgtaaagaaaataaaccatggatgtttggtatatgtaagaagtatattttgtcttcattttaatggaagaattgatctttcctatattcataggagccacctttttggtacgagtttgagtttcttgttttatgagcccatgtgttgatcgtccaattcttgttgtatgaaaagaagttggtgtcggtcaattaaatctgagagactttacagaaatgtgtgtttcgtctagctccaggccggaactattcttgcatagtggaagaaacaaatcctcgtattattaagtctccttgttcccgttattaataagtttcatgtggtatatatcatctcaatattattagaacaatagtataatataactaagaaaatctttccatatgttttatcttgatttgttcagttgttcatattcatgaagattgtatactccactttttatccttgtgatggtagtgtccattttgcctctcaaatatttgaatctctgcttctcacgatttgaatgggtactgtaattttgatttgatgcatgaagatcaaaagctctatattttctcttgattcagtctaataatgctgcatgcaggcaaatactgatgctactcatgtggatagtaagatttttattaattatagcggtcttaactagtttttgaaatgtatcactttaatgtttttttacagttttggaataaaatccaaaattgaaagaacaactaatagcagcaaaccactaacgtgatttagtgatgctgcgtaagtaaattattctttggtaatctcattgtttgcttttagtaccctaaccatatctaaaaccacttggttgttcaagatgtggacgatcatgatgactcattcttgacatgtcttaacgattacttttgtccacaaccacaaaacaaaatccttatattgatattaaaaaataacattggcaacttcatttgaaatctcaattaggcaatgatgcaaaaccaaattgtatttgttaaagaaactttatttttgtataacatttgagagcagttactgtaattgcacaagagttgagacctggtaggtcgacttaagggccattcaagtcacacacagactcgcaagtcacaagaaccacaccctaatcttctaaatttgcggagagcctcatagtttaactttcaagttgcctctatacacaaaactttgtcgtgtattgatgattcaagtggcatttggttggccacataattcaaaaggtatataccggggaccagtcacttttgtgatatgtttgaaggcagatattcatcggggtttggcactctattccaaacaaccggtctgaggaaattatatgtcttatagaaaacgtagttagataagatgtaataggtttatgtcttttcacgtcatatttttagtattcgatttaacataacattttacaatgacaataaatattaatttttaaatttaataaatttataccagatgctattatatgtaaccaaatcacccaattcggtttggtttagactactgtcagttttcttgcaataatttctcgtaggaccgacaaaaaaaaatgaatttaagttttaaatttggttggttcaaaacttaatatcaatttttatggtttagaagaagaattatagctgccaaaagtattttgtccggtaattactaattactctttgtaatctcatttaacttgcccgtttaaataaacagacaaaattaaagaaccctaattaaagtttggcagaacctatgtcccagaaagtaagaaaaaaacaaagtaaactgagaagtcatagtcaaaagacaagttagttccaaccaaaataaaataaaatgtgatatcaagttgaaaaagtgacggatagagaatctatcctttggatcctctcctctatttttagcccttcacttggatctctcttggataactcattaaatgacactatccaatataaccacatgtgtatctgcgtatgtatatgcatgtgtatttatatttagaagcttcctagttttgtctaagaaaatatcttcttgttttgttcctttcagcgctataactcataattctcttccaaagttcttggatttgttccccaaatcaactggagatctaagaagaagaagaagaagagcgaagatcaaaggataaggaagaagagaggaaaatgtgtactcatgctgatgaatcacaacacaacaatctcccttgtctccattgccaaccacattcttacattcgcatggtacataactacatatatacacatactgtatatagtttatacgttttgtatttgatgtaacaatcctcacaactagtggttgattttgttaggttcaacatatgatagagagatgcattctactccgtatgacgcgggacgaatgcgtcaaggcgttagaccaccacgcaagcattctaccactcgttacactcactggttagtctttacaacgttacacatataacctctatatgattcctcaaaactgttcgaaagcttcgttaactaaaaggaattaataatgatatttagacatatgtttcgattttgcttcgtacgtcaaattatataattatatggaacaattgaagaaattgattattgttttcttggatcatgtatgttcatcattatatattcgacataacttatattgttgagttcacaacagtttttcaacgtaactagttaatttatgcagttttcagctatatattaggctttgcaagtgtgctacaaaaaaaattacatgatatttttcccccccccgcagtttggagaggacttcaaagagaaaacaaggacttctttgaaacgtatgggcatttcgtctctcctaggcccttcttaagtaagagattgtgggatcaaatgtcctcttctaattgttaacaaatttcaattaattcctcagtcaacatataaaccacacatcaagtatgttgttatatagttcattttgatgagagttatgttttctttatcaggcggatatgttcgaagatcgccgaggtttgcgaaaaggatataatgaagacttggtttaggctcgtagctagatatataggagaaaaagcttgaactttatatatacctaggcatatgtattacatattcctatgatgaaatactcatgcttattatctgtggtccttttgatgtcataaggttcccctataagattaagcagataagattgattttcgtgtgtaaactagttttaaggttgcttatttagataattagatgcagtctgtttattgaaaaccctcgattataagaggctttacgatttatatatagcaaatgtgtaaaatatattttttaactaaaccatgacgagcgcttactaatttgagtaaatagactgcatctaaataagcaaccttaaaaatatgacactaagactaaaaccaatcccgccggcatagaaaacgaccaatctggttcgaattctgaatactaatttgaatctaaactaaaacactttatttccttttacgaaagaataagtgcaactgacgatcattcagttagttgtttataatgtatatttttaagttccaaacgaggctggctaggtgtataaatgtaaaaaaaaaaaaaaaaaaatggtgacaaaagataggcaaagatttgcatatgaaaagatgttggaaatttggttatttcctttgacaaattttttttttggatattttatttcaaagatctacacgatttcatgagtaggaaataagagttggatatttgagcatattcctcctaaaaacataatgcagcaacaaatgttttaacaaagtgacattaaagtccggttatctccggtttaagaaaagtgaaagacggaattgatttgcgctcacacctgttcggttcttttttttttgtcacaccaacagaaatacagaggtacacacatatcctaaaccgaacaaaaccggggttgtaaaaattaattgcgatttgtggcgattccgtttagatcggataaaaaatctgcacgacaaaattttccatcttcctcctcttcctctgccaacttataatcccgtcaaagatctttccttttttcttcttctggtttctttgtggtttcctggaggctctcagcatcttcgagtcgttgcgaggatgcgttagaagagagtctcctctcaatcttcgaatctccaagtaatctttctgtattttaggattcacctctctttttgttctgtttgctcgatacaatgaaattttgaaaaacttcgttaatttatgaaaattgaaatggattctatatcgcaagttcttgttccaattatatttgtccgttagtgcaaaaaggtcttacctttttcgccatcttacagtcttgtgaataattcaaattctaaaactttttgagattcttacagagacattttgtcactctttgcaacagaacagtgtgagaatgggtgaccaatatgtttcttagtggtgatgttctcttttgctttgttggtggaatcttaggactgtattgactggccatggctgctgataccacagcttcaagttactggttgaattggagggtcctcctctgtgcattaatcctcttagctccaatagtattagcagctgttctcatttggaaatatgaaggcaagagaagaagacaacgcgagagccagcgagaattaccagggacattgttccaagatgaagcttggaccacatgttttaaaagaatccaccctctttggttgcttgcctttagggtattctcgtttgttgcaatgttgactttactcatttccaatgttgtgcgcgatggagctggcatattctacttctatactcagtgagttttaatcattatacttccttctcacatttctgaatccttgaaatgaatgaaaaagatctaaactttttttctgaaacaggtggacatttactcttgtcacactctactttggggtacatctcttggaaattccgttgttgaggttactaccttagttttagatactaaatctgtgatactttttttcttcgtagtatgcttcggtgttatctgtttatggatgctgcatctataataaagaagctagtggaaacatggagagttatacaagtataggtgatacggaacaaggcacttatagaccaccaatcgctcttgatggggagggaaatacgtcaaaagcttccaatagaccttcagaagcacccgcccgaaaaacagcggggttttgggtttatatctttcagatccttttccaagtaagtgtcttattttcccctaagttatcttgttgagagtgaagactgtacaatgccatctcaaagcttcaaaaggacttacaaagttttctgttgggatagacttgtgcaggtgctgttgtgctaacagatattgtattttgggcgataatctacccgtttactaaaggttacaagctgagttttgtaagttctggctctaataccgtttgagttccattctttagaaagatttggatttctttgatatgatcacttttttttctggcagtctctatactaaaagtcgacaatgaatatatttattccttacatgtgttattttgactgcagctcgatgtttgtatgcattctctcaacgctgtttttctccttggtgacacaagcctcaattccttggtaagttttcaaaactgaagtctgcggatacacaatctcctgccttttttattagaatctaatggcaatcttctttcttccttatccagcgattcccactgttccggattgcttactttgtactttggagctgtattttcgtggcttaccaatggataatccatgccgtcaagaacttatggtacacacttgttctgttttcttatcttcatagaggcataagtttccatcattttgaccccagatattaactcattgtactgatcaagtactatgactttctgattgcgccaaatggcccactcaaaatcttcttaacaaacagagccgcagtgtctttacgagttttaagggatcttgttatacatgttttgcaggtggccataccaatttcttgatctttcgtcaccatacgcacccttatggtatgattataactcttcacacttactatgatatcaaagtttccaataaaaatcaaatttaacaataaaaaagagacaattgttgtgatcttttactaatgtttctgcaggtacttgggagtggctgtgatgcatataccatgctttgcggtcttcgctttggtcataaagctgaagaattacttgctgcagcagcgtcacaactcgtgatagttttggtctccccgaattcaagtttcatcttctatttatgagattctttgttcacgagagaataccacacatggaggaaacaatggttcatggtcatggtcaaagtcaaagtcaaagtcattcagaaagtttgagaaagtcaaaccctcttgttgagtaagagactatccagaagaaagaagagtaatctccaacactacaacacattaatttaggtcttgtttagtttgtttatgattaaacaagtctcctcaataatgaagtgtcataaataagttatacaatcccttgttgtaaagatgcaaccaaataagtaatgagaaattaataaatatttttcttttaaaaacaaaatttggttatatgtgacacaaatggaatggttgaagttgaaacgttcattttcaagttaggtggcatactctaaaattgaatgaacaattgaacatccaccagcttttttcagagatgcgtagctgcaaagtcttgctaatgtttgttaaataaatcctagtatgtagaaaaataatccaaattctaatgcaattatttgctaaatcctacaaaagtatatactataaagatttgagaaagaaataaacattaaattatgtgcatatgtaaaatgattgttggttataatactaaataataaagtttataacaatattttacaaatttggaagttgcaactataaatggtaaattcggtccttaagattagaagacaaagaagagtcgtgttggtgagctaactacccaacctgtgaagctacccccattctctctcaacggtaaagatccgccattttcaccgatctctgtttcttctcgtttggatctttggaaattttagagtttgttcgttctctctcgtatctcattttggaattgaatcgttagtggatttgatcgggaaatgagtgttttcgcgttcgattagtgtttatcagtctctggatctgtgattttgattttgttttctccagttttcgttttgaaatggcgaggaagaagatcagagagtatgactcaaagaggttggtgaaggaacatttcaaaaggctttctggcaaagagcttcctatcagatccgttcaggtttaaatctgtttcctttggatcttgtctttttttatagcttttggtaatggacattggtttctccgacattaggcagatgatgttttctggttacattcttgctttggtttctccgacattaggcaccatgtggtctagcttttctccattatgaatcatggatcatgtttttggatctatgtcgtttactgttgttttcctgttttcataaagcttcatgtaaccttttctcatgtgtgtagattaatgaaacaactgatctaaatgagctagttgaaaaggaaccttggctctcgtctgagaagctggtggtgaaacctgacatgttgtttggaaagcgtggcaagagtggtttggttgccttgaaattagattttgctgatgttgccacttttgttaaagaacgtttgggaaaagaggtaatgcttttgttttgcgcttttaagccattctatagagaccattttgactccatctctctatttgtatcatatgtaggtagagatgagtggatgcaaaggacccataacaacattcatagttgaaccatttgttccacacaatgaggagtattatctcaatgttgtctcggatcggcttggttgcagcataagcttttctgagtgtggaggaattgagatcgaggagaactgggacaaggtattttgtaagagatttttgttttaaatatgtcttatagtctaattcagtatcttgcatcataaagatgattttttttgctgaggctccaatttctacaggtcaagacaatatttttaccaacaggtgcttccctgacacctgaaatatgtgcacctcttgtcgcaactcttcccttagaggtaatcgactctttttaattggatcataggattgtatatgtgaacatgacttagaaattggactcgtgacttagacttataacatttcccatgtacagatcaaagctgaaattgaagaatttatcaaagtcattttcaccctattccaaggtatgccaaggatagctgaacctacacacaaatcaaaatcccctttactgtgataaaaactaagcatttttgttatttcttttggtgtgctagatcttgatttcactttcttggagatgaatcctttcactctagttgatggaagtccttatcctctggatatgaggggtgagcttgatgatactgctgccttcaaaaactttaaaaagtaagtttgaccgccagatttcctatctctttgagcttaagtacaaatgattgagccctcaaacttgcagatggggcgacattgaatttcctctgccatttggaagagtaatgagtcctacagaaagctttatccacggactggatgagaaggtatcactgtcttgacaataatttaatccaaatgtatgtctgcttcattgttctgtgactagtaaagagctttctttgcaccttttgtggttgcagacaagtgcgtctttgaagtttaccgttctgaaccccaagggacggatttggacaatggtagctggtggaggagcaagtgtcatctatgcggatacggtatgttccctaaagaatcattactaagagaatctctgcaaaattttcccttctcaagtccatcactaaaatttcttatctaggttggagatctcgggtatgcatctgaacttggcaactatgctgaatacagtggagcacccaaagaagatgaggttttgcagtacgccagagtcgttattgatgtaagaaaaatttacttattttcttccataagactttctttcatgtgactgaacaataacaatacaatatactgcagtgtgctacagcaaacccggatggaaaaagcagagcccttgtcatcggaggcggaattgccaacttcactgacgttgctgctactttcaatggcataatccgcgctcttaaagaaaaggtaacttaagaaacctcgaacgtctatcagattcattactgagtaaagaggatcaaaagcaaaacatcttgtcatactgtgattatatttctcaacaggaagcaaagctgaaagcagcaaggatgcatatatttgtgaggagaggaggaccaaactaccaaaagggacttgctaaaatgcgagcccttggagatgatatcggtgtccccatcgaggtctatggcccagaagcaaccatgacaggtatctgcaaggaggcaatccagtacatcacagcagcagcataagcttctctcagtaccttctatgaccaaaactttgtctgtgttttagagcctttatttactgtggttaagattactcaagctataagatacttgcaatttcttgaaaacttctgttgttcgattctctttcccctaacgttttcttcagattcaataaataatcgttacttttttttcccctctattttatttgattttgatatttcctacagtgttagaggttctgttttgagaccggttccttgaacaatgaatcaagaatgaatagcataatcaaatatgagttacataatcatataatataaatgtaggatcgatatttagaaaagaaaaaaaaaaaaccaagagttttgataattcaataataactcttaaggatgatggcgctgccgctgctgaagactgataagtttagagtagggaccattcttgttctcaacgaggatattgtggctgccttgctctatgatcttaccgtcttgtattacacttatcatatctgagttcttgatcgtcgatagccggtgagccaccaccaccgtggttcggtctctcattagccgatccaatgcttgttgtacctgcaattcattagtataaacttgtaaatctttgcctgttgtacctgcaattcattagtataaacttgtaaatctttgccgaaaatcttgatccaagctctaaacgctattgaaagcttaccacacgctctgattcaacatctaaggcgcttgtggcttcatcaagaagcagaatctctgggttcttgaggacggctctagctatagcaattctctgtctctggccgcctgacatctgaatgccacgttcaccgactttggttgagtaaccttcagggagagagctgatgaaactgtgagcatttgcaagcttagctgcttccatgacttcagattcagaagctccttctttaccatacaagatgttctcatagatagtcgttgcaaacagagccggttcttgttgaaccagaccaatgtgtcttcgcagtgatttcaacttcagtttcttgatgtcttgccctgcaataaaattttattgattgaaaacagaattagctcactcaaccataagtccataaacaaagttcttgtgatgcaagaaacctgtgatcagagttatttgtgatagaagaaattctgtcaagagctagcactcaccgtctatcatgattattccggctgtaggatcgtagaaccggagaacaagcgaaagaaccgaactttttccagatccgctttgtcccacaagcgccatgcttttgccagaaggaactagtagattgaaatcgctgaaaatagtcacatcaggccgtgaaggataactgaaatgaacacctttgagctctatagtgccttccacattactcagctcctcaccagtatcaccaacaacctgtgttcttcgatccaatagctcgaaaaccgaaacaaccatctggtttcctttaagaagatctggggctagagccaacacttcacccatcactaacgccgttactatcaaaaccatgaatgttttcatcacagattcgaaacttgataatcctttctccatcaaaatcgatccgtacctattaaaacatttaaagcttcaataacgtttcaatctacacaaatttatactttgtgtgaaacagtttatatatataccagagggcaaggccgtaggaggagaagatgaagaattgagaaacaccgtacaaaatcccggccatctgtccacgcctgaaagaacgttctgaaggttctagaagctctttggaataaaggtctaaaaccttctcctctgcacaaaaggcgaccacggttcggatgttgctaatagactctccagccaacatgttagcctttaaatacgctttactcaagtttcctccatagccttgcatgaaaattttctaacaaatgcaaccaagaagaaaagagtaagaacttacttgacgaccaaaaaaaagtatgtaaaaacgcaaaaagctgcgttttacctcgctgatatgaccgcttataatcaaggggtatgtggccaagacaacaagagtgagacgccagttgagtataaaagaaatgatgaaagcagtcacaacaagacctaaattctcaagtagaattgtcgatctatcgaccacgatggttctaagcaaagtcgcatcactttcaagccgcgatgccaacatcgaactagtgttatcaaccttatcaaaccacccgatttcattcctcaagatcgctaaacaaagaagaaaacaatcacatatttaaatcaaccaatgtaaagacaactagtcgtaggatttagctagactgcggttttgtgtttgtgcgtacctgaaaacatcttttgtcggactcggagagtgagacgctcacccataataccaaaggtggtatgctcaatggtatgtacgatgacagtgatgacggagccacaacagaagaggatagagattcttttgacctcgttttgagttgtctcccagtccatgtaataagatactaaagcctgtgcgataccaagcgcgaaaagcggcatttgagatcccgcaataaaggaacctaacgtcccacataatccgtatttccaatccggacggatcatagagtaaagacgtcccaccgttactttggcctgtttggtcgtatctggttggtttactgattgatgaatggacgaggtcgtctccgtgattggtagttccggcaagggttttgtactgcagaaattaaagataaagaaccttcatgagaataactataacataagtgataaacgggattgggcatcataaatattgagtataaatacctgactggtaagcttggagtgtggttcaagttagggctggcagcttcttggatacgaagaagagaagaataagctccatcagggttagatatgagttcgtcgtggcttccggactcaatgatcttccctcctccaacaacggctatgatgtcagcgtttcttacagtggagagtctatgagccaccacgaccgttgttctcccaaccatcaccctgtccaaagcttcctgcacgattttctctgactctgcatctagtgcgcttgttgcctcatcgagtaagaggatcgatggattcttcactatcgccctagaaatactgatcctctgcttctgcccgccagatagctgaattcctctctcacctacctgtaaaccgaataacaagcaaaatctagggtttacagttgttaatttcttgtgttctaagctatctgatgttcgacatacctgagtttcgaatccttccggtaggttgttgatgaatgagatggcttccgagagctttgcagcattggtaatttcctcagaggtggcatcgtctttaccatacataatgttctcgcgaatcgtggttgcaaacaggacaggctcttgattaaccaaaccaatatgacctcttaaccacttaagatccaagtatctgatatcgttcccatccagcatcaccgctccatcggtaggctcgtagaatcgttcaattaaggatatcatggtgcttttcccagacccgcttcctccaacaagagccacgactttccccgcagggatcacgaagtttagcttgtcaaagatcaccacatcagggcgagaggggtatgtgaaagtcacgtctttgaatagaatgtctccgtttacattcccgagtttacgacctgttttatcctccgtgttccgttcaatcatctgaaaaatcggatacgcagcagcactggctcgcatgaatgtggaaatgtcaggagccgcctgaccaagagacctatacaaaaacagagctttattatgactaattcgaaaaaaataagggtaatgtgcagagcaaagaatcaagaagttatgtattacaagccagcgatgacaacattgagcatggtcgtgaaagattcgccaccattagcgattcccttgtgaacaacgatgcttgtgaaccaaatgagcaaagcccaagacaaaaacaggacaaaatgcaacgaaccaagccctagtcctttggctaaaccggcttttctcccgtaattgtaagtgttcctcaaagctccttggtacgaactcaccgccttttcttctcccgtaaacgcttgtacggtcctcacattcccgatcacctaattttaaacagagggatatatgaaactagatacagaaaggaaaattcacttttcaggtacttttcttgactgacaagttaccaacctcttctgcgatctcgttggccttgacgtatgatttccggacacggacgataagtccgctgctgacaaaagcgtaaattccgccggcgagagcaatgaatgggactatggagagagtgacgagacttatttgccatacgctcgcgaacccgatcgcaaaaccggctatgaaccggcttatgaagtgcatgaaattccctacctgcaacaaaaataccgattaacctgatttaaattatgcatgccaaaatcttttacttttattggactgagccaatatatgatatatcccttatgcatggatttaaaaaatttaggactagacaagatgcatgcttgctataggaaaattaaaaatccaacatccaaaatttaagaccaataccggtttgatcttggtatagcgtaccttctcggagatagcgtcttggacaacaaggatctcggaggtgatggcggagatgacttctccggtggaaatctcggtgtcgaataagcttatgtcttggcttaacattgaccgcaaataagcttttctaatcttcgctgcttgtctctctcccgtatgcatccaacatgcaacctctgtttccattcatttttttaaaaatttgatcatatcttcaaaaaaaatataattgattgttctctttgttatgtgatttacctaaccatgatgaaaagagtatcaccacactcagatatacaaaatccaacgagtactgcacatccaaaaataaataaaataataagccgagcagagaataaaactttttgtttccggtcaatttcagagaataaaacttattatttcttaccttttcatttcattttttatttggagtcaacattagtaaagatgtatttcagaatatgcatgaattaattagcattttgacctcgcttttggaaatttaattgatatatctcatataacattgaacccaagaatatgataactttagtttttaggaaaaatttgatttatcaaatctcaacctctttagatatgtgaatcttcatgtaaattctaatggccaagttcaaaatcttactactcactgcaattcttagacatataaaaatatacaattaacaatttcatattcactcagatggaagattatgaacaaaccctaataatttaaagttttctaaaaaatactacgaatatacaaaaaaagttatgaaccttggcgactttgtgagaagcttcttgtgggaagaggtaagcaagaccgatgatgttgatgagtttgccaaagaagatgaagaaaactggaacggaggctccgtgaatgcaagcaccaatggatccaagagccatcagaacgcaatcgtaaaaatcagcaaatgagaagagcttaagaaatgatacacttggccgcttcttctccttctccgccgctgccatgtccacgattgctggatcatttgacggttgcattttcacttttggatatggagagaaagaagagttggttcgagggagactagaaatgagaaggcatgtatatagaagaggaagttcaaggaaacttatggaagaggtattaattaggatctaatttgaatcttaacagagtttcatgtctcgacgtgttttctttttaatactgaattatttatattactaagaaaattcatgaataaacatgtaaagacttttcctctaaaactacttatgccggaaacaaagtttttttatcaaataaacaattggtaagaaatcctattttcatcggaaaggtaataaattggaaaaaaaaaagaaaaaaaaaatcggaaaggtaaaaaatatggacagagtaatttgattgaaaaagaagtaagaaatagaaaatatgtatatactatgcttttttgttggtaatattttaacttataagctggctgattttttttttttttaaagggtaataattaactggattttctattaatggttaatctgaccatctttaaactgtacatatcaaattttatagaaaagatcttaaaataatggaaaaaattgataatgacagatactaataacaaaaagtttagatagaaaaattagatattcaatttacttttgataaaaaatatatctcatttcaagtacacaatttcaattttatattcaattagagaagactcaaacgaaatattttttttcacagactcaaaagaaaataacaatccaaatacacacaccaacatatatatatatataatataaaattctatatatatacatctataattgatcagtaaaaatacttacatgcatattttatataaaaatttatgtattatctataacttatatatacatgcatagtttagtccgactaatagcaatacttatatttttttgtactatcaattttttcagtggcacagataaaatttgactttaattggttttagtccggtacattgtcaactttaatatttgagcttctctttcacaccaaatatatgttttacaatggaaaattagttcttgcattaaaatatgcactgctgatgtattcttgctctccgttgaagctttgatgtcatatataaatgattgggtgatggtaaattggcactaatataaaatttccatagaacaaacagtttatggacggtcaagattttcagatacacgaggaaatgaaaaacagatttctaatattttttattataaattcacaaacatagacattagacacatcacacatgaaacttaataatagacacatgagcaaacatagtccaatttaattcccaaaaaccggaaagaaaacacacatgaagacgatctaaaatataattttcttcccattgtacatactattatttaaagatgattctttcggtagcaactgaatcttaaacatttcaagatccactataccaccaaaatcaaatcaatagaactcgaaaaacacgagcctgatgccgatatatgacttgccgttttgtctcctccttgcttctcatggccaagctaaacaaactgttggggagattttccaaactgaggttcctctgtctcttccttaaatggctttgtctgcattttttctgccggtttcattcccttgaagattttttttatgaattatttggttcaaggttttgaatttagagatttgtgggtgaaatctctatctaaagaagctaatatatagagagagatgtgtagatagaaggaggctgattatttttctgaaagtggggagataactattagataataatatcacattctatgattggtcctagtcatagttcaactcaaagtttcccactttcttcttttcttctaaaaaaatattcagtttagtccttaaaagtttggtgctgcatcatcgcattcgtgggaaataaaggtggtagattctcatgtttgttgtgaatgacagttttgccctttcatgcaagtgtatctatttaagatcatcctcattgcacaacttcatctgatatgcttttaattaattttagtcattaaatattaaactaaaaaaattagaaccaatcagaatattacacatagttcaagagggtcttcaaagatgtcttcaatgtttggttaaagacattttcgtttctctttcttcatttgtgtctttaattaaatattaaaaaactaggaagacatctccatttatcaccaatagagatgctcttaaatgtcaaaatgagttttagacttttagtaaacggattatacgcaacgccgattatagcaaaatttctgcatgttttttggtcaaagtagaggaaacattaaaatcagcaatatatacccttaacgaaaaaaaagaatacatttgttttagaaacttatttaacaaaagaaaggaacattttagaaatttctactggaagaaacaaatgctcactccacaagtgcatgctacgttgttctttctttatgcaattgtgcgttccttgtatgtttccacatttttcatgtctatgcactctggttatttatttatcttccaatggctttttcagtatcttatattattgctatatactgtatatagttttttaaaattccaaaaatgcatgaaaaagtagtacaatggactggagagatcgtacaaagtcaatggcattaaaaagaaacttgatgataattatatatattttaaattataaaatagaaatgatatgcaacgtataatgtggtttttattattcttgaaggccacatcgttttaatagaacttttgtgaaatgacttctgaaacgatagttcaacaatttcgttttccttaacaaacaaatttatgaaaggacttgcgtttaactatttcgctggacttattattttgggccttgaccttttctagttattacttttatttatttcaaaaacacagttgctcgtattagctgaatacacaactgttcactctagggagatttttttattatttatgtgccgttgcatatctgtttttcttttctgggaaaatgctatattatggccatgttcgtttgcttgtcgctggtaactgaaaccagcgacagcgaccaaaagttgtttgtttgcctatcgctgattcagcgacaaaaattagcgacagtcgccagcgactgcaatttttagtcgctgaaatttttagcgatcagtcgttggtttcagcgattagttgctgcttttggtcgctggatccagcgacatgcaaacgaacaactttgcgatcaaaaaataaaaattaaagaataattaaaaataattaaattaaacagaattaaattaaattaaacttaaataaatgtcttttgcactttgaacggttgtgtcttttaatcgcaactttctgtaaaaaatattgacggttgttttttctcgcttgtgtcttttattgcaactttcctatattgtaattttctgtcaaaatatttacggttattttttctggttagttatatatatactattgaataattacgaaatttataatatgcatcatttggagttacatttgttttaaagaaattattatataaacaaatttataatatttttctctgcgatatcacgaagggtttgagttctagtttaattaaattaattcttattaaattaagttaaaataaattaaattcaaataacataaactaattatagtcaaattatatttgataaaactaaaataaataaatatattaatttatttttctcatggtgtatgatatatatgatttacattttaaatttaaaatataaattaacaccaaaaataattaatttaaaaaaaaaatatagcgactgtttataacgacattcaaacgaacaacacagcgacatttattagcgattgtcgctgtaattggttgctgagtccagcgacagacaaacgaacaatgtatgttgtcgctggttgctgtcgctagtcgctgttgctggatccagcgataagaaaacgaacagaacctatgtaaactataatataaactaagaattcaaatatgacgctttaaaaaagtaagaaaaaattatgcaaaaaaatgaatatgttgcacgttgtaaaagaaaaggcaattttaccttaattcaagacgaatggaaattttgtaaataaaaattcttctacatttttggtcagatatttttttattttgtttcacgtcgctattaatgattcttttatggataacgttgcattatccaaacatgatgaactacagaagttgggtaaaccacgtgtctagcaacacataccaagtgtcaatgcatttcaatatcttcacttcacccattaatatactgatcaatttatttccaggatccaacgacattattcattttaatttctttcttgctttctatataaatctcgcaattaactaacttaatacattcaaaatttgaaggataagactaaattaaggattatcggccctcccaagtacaacgcaccgggatcaccaaattatgggatctctaaccatgtggagtccaataattagcagcttttcaatgtgatttttcaaatattcttttcttataaaatgtaaaacaaaggttagacaaatgaaggagacgcaaccttcaaccaattgatggtagtgaggatatatagtatttgttcagtcaacaaggtaatatacaaaagttgatgtattctttctttgacgtcgttttggtgagacttcttcttcttttgacgtcgttttaataagagtcttattccaatcatatttaatgagtttgatgagattattaaataatttgcaacctataattaaaaattaaaaaaaaaaaacttttttcaatcagctttacgtatacgagtgatcttcaaaacatctgagtttcttcaactaaagcctcacatatataggctatagcatttgctttctgttatccactcgcgagagaagcctttttcttttaacaagaatagtttactacttataattttcttaatctttgtaagcatatactcgccataataagattccgcaaataggatattttgatccctgttaaagtatgacaaaaaaaatgattataatgtggtagaagtgtataacccgataaatgggtatagttattggttacattcaaactaaagctatgtacaatcacgttactaactaaggagaaacaaaaataatataattataagacacaagagaaattaattaaaaccccacaagaaattgataaattttaaaaactaaaaaaaatattataaaagtattgtacaataaatctttgacgaaaaagaatatcagtataaactcgaaaacttccaaaatcttggaaattttgatgcaatgaggactaaaactttttggcgtattcttttctcggattccacttgcgtcggtggctgtcactgatcttcgaatgatgtttgatgtatattaaaatcctttaccgaaaaaaaaactaccgacgtagttgcatatatttttgtgcacacagttaaataataaaatatttcgtagacaaacgtcatgactatgtaacatatcaatcagacaatcaatttaaattatttcatttaactattgtgaagtaggatagtaatatatttgaatgaaaaaccaaaaaaaatttggggtaaaaacaaattagatgccaccaggttgaatttttaatgtataacaaaagaaaaattctttggtatgtcagatataacatgacatttcattgcatgctataagtgaagaaattcaccaactatgtccaattatgagaatgatctaaacaataaatgatgaagaaatgttgcgataaaaggaagagattgttgagactaataacgagaaagaagacactattgttcttgtgatataattataaagggggagagatttctgcattcattcaatttttcaaccatttagaaaagaacaaaaaagattcttttagtttttaggcaaagaagaaagattccttttcttttgtatagttaaaaaaaatatagatggagataaaagtaaaccaaaaaggtagataaagtgtaagacttttgatctgtgaaccacatttgttagggttgttaatttcatttcaaacttccaaggaaaaaaaaactattttgaggataaatgatttttatgatcaaccaaattcactgagtatgaatgcaaaagacagaaaatttgtaaatgaataaagctaagaaatcatatacatcaattatactcaaaacagggggaaatagaaatatacataaacatgaaacaaacacttcatattcactaaccttgattagtgtcctaacgttaatacaactgagaaacaaatagagtaaatttagttaagttcagaatctaagactgaagagtactaaaccagattcgaggattacgactagatgaagaaaactaaccctaaaagaaggttataaagagagagagagggatcagagtcgtgaaaacagagttaataactagctctttgaatgaaaacggtttctaggtccggcggagagaagtaatctctagtgacggtgacgtaactgcacttcaacgacggtttacgcttctttggcgccgctggacacggcgggacccttggaattctgacggaaaccgccgtaggggtcgtaggacactgatcttgctcctctgtttcggtaactgtgacgccgggagataggttaatctgcttgagaggggaacgtgagggaattccggcgatgacccattttttaccgtcggtggattctcgtatctcgccgtcgagttggtggtgaggtttgccggaatatcccatgacttctctcgaatgtgaatgaagaggaaacagagaaagtgaaaaaaaaacagaggagttttgttgttatggttgatgatgaagatgaaagaatcaaaggtttgctttaggtttttgggattgatgtgtggggaacgaatgagacgttttgttctctctctcttggatactttttttttgtggttaactttggtggcgagcgaatgtgaagtgaaggggacattttttcttagaggacggttttatagtcaacagagtattaattacgttagatcggtgtcgattcagttcggtaatttctactgattttgctgaataaaattattgtaagttttctttttataaaaaaaaaaatcaaatttaattatagaaagacagtgagatagagttgtacgttttttttaaatattcatatttattcgttactgatgcctgaggctgagggcagagtggagggaataaaggagcatgagagaagtagcaacaattcctacatttcaaaatttaaatttctaggtcatttttattttattttagatcatgcagcctgcaggtaaatttaatcgcatttgagatttttatcttatagtgaaaccaaatcttttgaatctttttaacaaaaaaaaaaagaaaaaaaaaatctttgaatattataaactatgaaaatgatatcaaagtcatgaatagtttatggatgcatgtcttcgaaacaaaattacaaaatacatgaagtcgattcttataggattaatgttgatttgtttgacccgttgatattcattagaaatttaacgattttattctaattaatattatatatatgacatattaagaggtatagcacatatgtatatttttatataaaaaaaagtaattttgtttttaagatgatatatagacatatgttatttttttaacgtataatacaccttggtacaattttagaactaaaaaatttaaaattttaagttatatatatatatatattgttactttggttttgttttcaaaattgtataattatatttcgattgttaattatatgatttcatccgtagtatatataattccatattaatatcaactcaaacgcgtcctaccgtataaccccgtcatgtgaaattaaacatcattttgttatttttctaaaatttaaatatttatggtattgaaattaaaatatatatatatatatatatatattgatccaaactttataattgtattttaattgttatatataggatttcacccgtaatatatattgtctcatattaatatatatatatatattttaataaagtataactttttaaaagttttaaattttttgatatttaacttttaagaaactttaaatatttataatattttgaaatttttaaagattcagttctttaaaatagagattcagagtaaaccggataacatttttatttttggatgcctgataaatcaaacttccagttcattgttattcaaaattattttggttctttttataataagactctaaagcattgcccaatttcttaagtaatgtgggatctttcacacttacttttttctttatacatagagtaatatatgtctgtttacaaaaatttgaattacatcatatgcagaaaaaatctaatattttataaactatatatattttatataaaatcaaataaattagatataagaacaacaaaaagtgaaagaaaaagcatatatttatatttaatgtagatagagaaattttagaaaattcgtaattaattgattgtagttcaataatgataagatttaattaaggatttagacacatatttgttttagatagattttgtagaggctaaatatgtaatatagaaaagagttaatttaagtatttaatgcaaactaacaaattataaatttttagtaatagaatatttggttgaaatataactggtaaggacctaaatgttattagtaaatagttaagggatttttgaccaaaaagtctatcaaaaatgtatatgtagatataaaaatcatagaaaactctttaatgtataataacactatgacaatgccgcccattaacaaactcacggaaaaaaaaaaaactacttttctctattttctctcagtattgcttgcttcaagcatatttgtacttagtgtaaatacacgcccattaacaaacgtgaaccataatcttatccggtgaaatacatacgccaccaaatataataatatatcatgtggtcaaatcctgcaaaaaaactcatcaaagatattttgtgtattgtaaaatgattctatagtagtactaattaataggtaatatatactgttaactaatgtggacaattgtaaaacgacgacatagtcattgaaaacgaaatggagtatatctaatctggctgagagaagagttgatatgaaaagagagagcccgtgaacggatatacaaaatgagttttaaatgagaatagggaacccgaggaaacgcgtgacctaagctacgtaaattataaaaataacttatttttatattcatagggtgtgtttttatttacacaaatatatatagtatttgtatcaacttctatgtattaaatataaagagataaaaataccctttagatgcaagtaataaatggagtaacgagatggaaagagtcgttgagattcacacttcagttggcggtcctatttttgactttctaattatcaccggtcaacatattttgtagagattccatcgccgatgctcaagttttttgcaccctgtgaaaacatatatagaggtttttggtcggtgtttgccggcaacgacaaatatgtgatttcttagtttcttcaacaataaactcgtgtttgcctcttatctagctagaatgacctttgtttagtagttttctgaattgcagtttccctaaaccattatcttagtgcacatacataaattatggtgcaatatcattttggtaacgttactatttgttagatatttatttaacagaaaatgtcataatccttaaacacaaattcttatttaaatatgtaaacgttttctaaaacttatggcttcttctgatttattggatctaatatattggagcagccttttgtttaccattggaatactcaagctaagaataatattgttagcttgaaattttctacattctaatgtattctagtttcaactttcaactaacacatcatctttccacatagtaggcgcgtataccttcccaattttgtccctttaaaccggaaactaaccgaatttccctatccacattctaactaaaccgagacaaaccgtttcatttcgagcaagtcttgaacaaattagtttcagagtgctgctattcgtttttggtattcggacaaattaaacttgaaccgatggttagctacttagccaattaaaccgaaactatccaacatcttcataacgtgtctcatttgacagataggggcatttacgtcatttcggagtctccgccacatgtcagatttgttttataaacgaaaaaaattcggtatatttaatttgaagatatccgccggaaaattcgtaaatttgacccttcgtcttcggaaatggcggctatttctccggcgaatgcaaccaccgctgcttcactctccctgcctcaatttagctcaacttcttcctcgttatcttcttcttcgtctccatcgtttcttaatttcaaaactgcttcagtcagtaatcgctgcatcaagtgcggagtcagaagcttagagaaccactctggtcaccggagcctcgatttcttatccaatggggatccgatcagcctaattaatccgaattcatcgtctcctataaccatggccgcggcgacgtcggaatccggttcgaagagctctaagcgcgtctgtctcttccacagcgacgagactagagatctcgccgagagaatcgtcgcaaaatctgattgcattgagctacgaagcatcaattggaagtaataacccatcaatctctctatcaatttgatgtcttttgcttaaaaatttgaactttcagatgagtttcgtatgtgtttttggtcaatgctcttattctgttgctcaaattcgagaaccttgagatgagatagctctaagtcaccgtaaggaattttgcatttaggcttttaagcagagtcaaattgggtttgtttgatgtgtataatggttggaagaggtttaggttcttgatcacaaagtaatttacaaccgttgttcttgtttttaggaaatttgatgatggattccctaatttgttcatacaaaatgctcaaggcattcgtgggcagcatgttgctttcttggcttcattcagttcacctgctgtgatcttcgagcagctttcggttatttatgctctgcctaagctttttgtttcttcgtttacacttgttcttccattctttcctactggaacttctgagagaatggaagacgaaggagatgtggccactgcttttactctcgctaggatactctctaatattccgacttcgagaggaggaccgactagcctagtgaccttcgatatacatgccttgcaggtctttatctacaaccctggtcacctctctttttgttctttgagttgatggttttatctagattctgccttgtcttcgtttggattgtaggaaagattctactttggtgatactatacttccatgctttgaaagtggtataccattgctcaagagcagactccagagtctacctgattctgataacgtaagtctctttccctctttttgtcacatttctatcatgttgagtagattatcaacaagattcaattcattttggttactgatcttcatttgcttcagatatctattgcattcccagatgatggagcatggaagcgtttccacaagcaactccaacattatccaacggtactatattttctcatacctagacgatatcgcctttgcacatctcattagcatcttacagtgaacccatgtggatcgttttaggatttagtaagctggatttaattcaggagcttgttcttcaagcttacattagatctaactccaaaagaagcattgcatcatccaatcttgtacagaaaatctgtacattaaccttttgacttaccaagtaatcctacttaacgttcagattgtttgcaacaaagtaagaatgggagacaaacgaatagtgcgtatcaaagagggagacgctgaaggaaggcacgtcgtgattgttgatgatttggttcagtcgggtggcacattaatcgaatgccaggttctgtactcagattcaactctcaaaagtgtaactctgtactcacttcttcataactaaccactaattcttgttcccttcagaaagtcttagctgcacatggagcagcgaagataagcgcatatgtaacacacgggatcttccccaggagttcatggaaacgtttcaagcttgacaccaaaggttactacaaccactatacaaatgttttgaatcagtctaaacagagtcatgccagtttctttgcgatgtggctaaaatcttggttttcttttctttccgtgatgcaggtgatcccgcggaaggtctgagctatttctggatcacagactcgtgtgggatgactgtgaaagaggtgatgaataaacctccttttgaagttcttagcctggctggctccatagcttctgctcttcaagtttaagcttatgtgattcgagaagaaatccagccgcaagtaatttttgggtttgaacaaatctgatttataaactttggtgtatagttctcgatcaaagcattttccacggaagaggttatttgttgttaatgttctgtaggaaaatccaataatgtaataatgtttcttctgtcaaagagagaaaaaaaaaacaatgtttcatttcacttcttttatacttgttgatagacagaaaattcctttggaaaataaagtttcttttaagcgtctcctaaattttttctaattggaataaaaacatttactaatgatttatcaattatcatgaattctatatcactatcgcagctctaggcattaacagcccaaaaaaaaaaaaaccatagcccaaaaaatcatagctgaattctcttgttttctggtttaactttgaatttgctttgtaaagtttgattgatacgtatctaggagcatttagtggctgtggaaagatcatacaacctttttcagtcacgctctatccaaatctttgcatattaatatttctgttgaataactcttttcttggatccaatatatgatattatgatagttggaacactcacagattcgcgaatacttaatagagatattgaaatattgaccgagatatgtgaatattaattcttgtaaatcaagagagattatttctttcctgactaaaatttatcgctgttatatattgattgagttttgtgtgtacaaattacaacaactcaataagacaacaagaacttacaacactttttttctttcaaaacaagaattttaacacaacacatttctttgagatagccaaaaccatgaaatcatcacatatagctttgctctgtatagtcgtgctttctctcttcgctctgcatgaatgtaagtataaacttttcttataatatatatctacacataaattagaatttcttttagattttttattcattctcaaagtttaaaatcaaatgaatcatgtaggtgtgagcaaggaggtcagagacactcccaaaaggttaatgaagcgtgtgtccctggcccatgtcatcctttggtacctcattgttggtgctgcgaacatttacgtggtatcaggccgcaatgctgttggtcaggcagtactggtcgcgactattgcaaccagcaatgtaacttataaattttaaattttgataaaataatataatgctgctgcttattcgcaattttcaaactttttcaagtagtttcatgacgtttgtttgtacgacttctctttatttactattttgtttaataaaataaatagacgtttttgctaaacatatatgtttgctttggtcaaattatttcaaacatacacttttgactaaagaaatggtaatttcaatatggcactttcaatataatgtgttagtttttttttgggtcaaaatattacaaacattttattagaaatataaattaacaatacatgattacagaagatatatattaacaaaagaaagtgacaatagtttgttaattttaaaattacgacttctagaaattaacaataaaaaaaattctgagtaaaaaaatatttataatataaattaaaaatacttatttcaagttaaatatatttgattaaaaataaaatattataaccactttcaacatgttggaacttggaagctaagtagaagatttttatacgagtagctagaggagagttgttgtcatattgaggccaaagagaattgtatttgactttttgtctatcttcatcctcccatacgaaaaagacttgcatcatgcaggagtttgaaaaaaaatagacgtgacagtttcatgaagatcacaattcatttgtcccaaactcaaatctaattttaatcaaaatatactgggctcaaatctaatttaaataagcccaataatatgttcatttgggccccaatagaaccacaattataccaaactaaactttgaagacagattattgggcttgggaatttgggcccaaatgaatatttttaatctgagcagagagcgactatggaaatataaattccgtacagcacgcttttcaaatttcattcgtaacagaaagacaacgaagaaaaaagaaaatttcgaaaaggagaaaaatatctttggaagatggcgggatctctaacagcatcaaaccgccgtagaaacgcggaggattcttcagaaatttaccggtggacgatcggttttgctcggtttgttcactatccatcttctccttctccgcatccagttctgaaacctctcggaaagagagagcagtatcattcgccccacggaacctggctgtcggcgtcttcttcgacggtttctctccacattgtcgacgaattgaaccgatccgatgtgattctatccgtcaaactcggccagaaagtccttgtgagttggatttttactctctctctctctctctttattatatatagttctatagatcggatgtttaggttggtgtttcgcgatggtttaagcttaatcaaattttgaaatcgggatctatacatttttgattaaacgtcatggtgtttaattgttcaatatctacaggaagaacactacatttcaaagctgaacttcacatggcctcagatgtcatgcgtttctgggtttccatctcgtggtagtcgagcgattttcgttacctatatggattctgctaaccaggcaagctcttaacacttgaatctcttttggattttatggaattaagatataaataagcttactatttacttactagtgatgaatttgatttactgttcatgagttagttgatacttcagatttgtgattgaaatcatgtggtttgtttgtgcttgttgttgttctccagatccagaaatttgctttaaggttttccacttgtgatgcagcgttggagtttgtggaagctcttaaggttagctattattgcaaagagtttccttattatatgttgatcagatggagacgatgtttcattaaccttgaattcagttttataagctattttcttcaaatcttgagccaaggattcctgtttttttctgtttgcaggagaagattaagggtttaaaggaagcttcgactcagaaccagaaaaataaaactaggtgtgatgtttctttccagtcagattacaacccttcagatgcgattatccccaggttagatcacattagagtgttgtgaatttgtactagttctctagtcaaaaatttagatattgtaaattcctttttgcagagccactcagaaagagccaaatatggttagacctcttaatagttatgttcctgaaatgctaccaagaattgtgtatgaagctcagtaccagaaaagtgaaactaggtccgaggtttctttccagtcagattacaacccttcaattgagattttccccaggttagatcacatttacagtgttgtgaatttatacaagtgcttgagccaaccatttagacatggtaaattcttctctgcagagccactgaggaagagccaaatatggttagattttttgatagttctgttcctgaagtgctaccaagacctgagtatgaagctggacaagccttatacccatcacaatccacgctaaatcaaatcccaagtcttcctccgagtttcacaaccttactctctggctgcttccccgactccactctaggtacatttttcattgtatctttacttatttggagtttgagacatatcaccctctttcacacatttcctctctattgaacctactactatagatgcaggccaaacaactgtgaagcagaatcctgatctaaagtcgcagatactggtacagtataaacaaacccgagtttcttttctctttcaacacatcaatacaattcaaatgatatctccaactttttgtttttggcagaagtacatggaagattcttcatttcaaggtgaacattctccccattacacacacacacaaacaatattgacccatatagattccaacttcacattcaagcttcaaacttcacttaataagtctttctaacaagtggttttctcgttatccagatatgctgcagaaagtagagagaattatcgacgaaattggaggtaactggattacctgatttatcataaacatatttactaggtatcaatcttattatccattttgagtcttttgttcatatattgcttaaaacaattgagattaaaaggagcaaaccaacattggtggaggacaaatgtagtttgtattttattttgtttcaactgcggacaaatgtatcaatttgctctattttcgtccaacaattagccgagaagatttttgatttgccttgagtttcaccttatggtgaaagcatgtgtttattagcttccacaatactcatatattatacgaagattttcttagattttgctatattacatttccttttcatttttgataaaaatgatatgaaaatttcgactgcctgcaatgatctgtaaacaggggaggtaggaatgagaccataatttttgaagtcacaatggttttggaaactaaattcaagaacttcctgttttgattttagggaatatgtttaataatttgcaaacagtgaaattcgagaacttccagtttcgaatttagagaatatggttataaactagatatatccgaaatgaatcgaaaataagatatttggaaatcaaccgaaatttctagctgtatattctctcgagtgaggtctttcctaattaaaatttctctatatccatatataaatagtatatactgattaagttttgtattacaaactagaacaattctacaaaacaagaaaaaaactcataacaaagtcctttgagacagccaaaacatgaaatcgcatatagctataatctgcataatcatgctctccttcttctccatgcatgaatgttagtataaatttttctcacagatatatcaaatgtctctttcttttctttccatagtaattaaaattttgaattatgtgtttcagatcgatgtgtaggtagcacgatagggagatcgagcaaaatctatataccattgtgttttcacaacaattgcatccacccatttaaagatgattgttggtgttgtctcgcagctggaactaaaaaagattggtgttggctagaaaaagattttcccgacgccaaagagctttgtatgaaaacatgtacaagaaagatttgaggggaaatctattggagtatgaattttaatttgtttcggtggggtttttagattagatgggattttaataaatttcaaagatgttctaattattttaaaggtgttttgagattagaaaataaaattttcgtctactagttaactttattttcgtccataaaagcaattagccgagagatctttgatttccctttcgcacacaagattttaatactaaaatcgagatccttctattacaatattttaaattttgtatttcaatacttcagtttgtattctgtatagttatctagacgagtttaagaaggtgataagattctacaatatgttttgacagctctaagttataaataagattataaccttattttgggtttgacctgataaataatagtttgatcattccataataagtaaacacactcaaaataaaatttaatacattaacaaaaaatagattcaataacaattatgaattacttaacagagacgttgaatatggataaaaatcctgaaataaaaggttatatcttgtttttttccttgaaagaaacttaaggtgtatcctaatttaattttctctacttgtttatatattctaaaagtttttgtatttacataattccacaacaactcgagaagacaaataaaactcacaacacaattgtttgagacactcaaaccatgaaatcatcacatacaactttaatctgtataatcatgctctccctctttgctctgcatgaatgtacgtacataattttgtttcttctcgtatcaattaccttttttctctttttctttccattgttaaatttggttttgtgtgtatgttcaaatcaatgtgtaggtgagaagatggaggtgaaagagatagggagatcgagcaaaatcattttaccagcgtgtatgcatgagacttgctccggtggtttctcactgaaaaatgattgttggtgctgcttgcgacttaaaactaaacaagctcgttgttggaaagaaaaagaatttcccaacgctaaggagctttgtttcgccaattgtccccctcttgaataatttttatggattctgtcatttcgaagcagatttttttaaaaaacgttgataaatctaaatatgtatgttgcatattcgatttaaggttttttatgacatttatttcgattttagtggattcctttacattaatgttacgatattcttattttctataatttaaattcactgaatatcaaccaattacatttctaaataaaaatatatattttataggtgttagataatccaattacagttgccaccaaaaaatatggaatttaaaactaaattacaagtatatgatatttaatttggatggggtttgttaggaaaagataaaataatttgcatagttttagtttttgagtcaaccaaatggatcaatagattaattgagaaaaagaaaagaaaaaagaaatcaatcataatgttttcgaattttttggaaagcttatacgatggaatcggagacgatgacgccgccgacgacgacgaagacaacaacaacgacgagaaaaccccgaaagcctcaacggaaagacacgatttctcgagaaacgccgttcgtttgtcaccggaagaggaggctcaagcgcgtggggttaaagatgatttgacggaacttggtcataccctcacgcgtcaatttcgtggtgtggctaactttctcgctccgttacctgatggatcttcttcttcttcctccgatctatcgaaccatcccaggtttaaccaatctcggtcttcagatcctggattgaatcaatcgcgttcttcagatcgggacgaatcgtgtgttggaagtgatacgccggagactggaattaggtttaggagctgggatttagaagaaaaattggcagaaggcaatgatccggaggatgaggaagaagaagaagaggaaacagatgaagaagaagaagaagaagaagagatcgctgcggttgctcttacagacgaagtgctagcatttgcgaggaacatagcaatgcatccagaaacttggttggattttcctcttgatcctgacgaagatcttgatggtaacgtatacattgagtcaagtctttcgctattagtcttcattgatttgacttataggcatatcaaaagtttgattatttcaacttttatctaatgtagatttggaaatgagtgatgctcaaagaggtcatgctttagctattgagcgtcttgctccgaggttagctgcattgagaatagagctttgtccatgtcatatgagtgttggttacttctggaaagtctattttgttcttcttctttcaaggctcaataaacacgatgctcatcttttgtcttctccacaggttaaaaaaacctgaatctcaatctcttcttgagtcaaaatgattctttgttgttgctgttgtttattcaacaaaatccttttgcttttgcaggtgatggaagctagagcattgtggatgaaagagcttcagaatcagacacattcttcaaaagaaagtagagatatgattcttgaggaagaagatattacaccatcaacttctaattactacaaccatgctcctcctgagtttctttctccaagaatatatgcttttgaacctccttcgattatgtatcgcgattttgaacacgggtttgaaaacgctcagttcatcgataaagctgttattgaggaaaaaccaatccagaagaacgacaaaaatagtgcaagccttagccaaacatctaaagatgttgttgatgatgatgatgatgattggccagaagaagaagattctgctaattcttgggctccaatgtttacagtgaatgaggatgatgtttctttcagtgatcttgaaggagacgacgatataagtagcttagcactcaagtctaagattacatcaaagggcacagaccaaaaaggaacatgaaacatcatctggcttgttgctttgccctgcctcacgagatcgaatcaatagaattgaacataagtactgtgtgctgagtcaaatcgtggaagtcttttgggtgagtttgattgttttgtggatttatgatgtttgctctcaaagagaaggaagaaagaaagaaaaaggttttgattgaaacatgtacagaagatttactttgacactgcaatttcattgtaatgttctctctcgccaaatgtaatgaaatattgaaaagcactatttcattcgcgtggaacttaaaagaaattgatagagaatggcgcaagtgaattcaagtgtaacaaactgttagaatcattattggattggaaaatcatatgggattttattgcttatgttgaggatttgtatgtatgaaaatgggaacaaccaggaggagctatcatcaattaacaaaataactcctatgacttaactaaaaaacaaatctatgttgaaatgtataacatttgtcaaaatgctagtactttgttaataattaaggggtgttattggtttgtgatttatatagagttttagtgatttaaaaatattatatagaatctgatgttattcaattcaaattttcattttttttttttaatttggtattattagtttaagatttataaaaattaatctaaaatcttcgtaagtaagattgcttccctaatacagagaaagaaagaaaaaccaagtaagattggtaatacgatgtcgtttcgcagaataatgcaaagctgaacccaatttaataagctgcacttttctttctttctcgagtctcccgtcgttttttatgtcagaaccaattcgtcaggtcgtgaataagtgactttatcgacgaaccaccactcagctgcagcaaatgatcgtttagctccggcgaagcgtaaaattcttcagatctctctggaattaataatccgtctgtttgatcgatctgattcggcaaatccttgagaaaacaaggagggaagaagaagaagaacatggcaggggcggcctcagcgctgtttctgctcgatatcaaaggtcgtgttctcgtgtggcgcgattaccgtggcgatgtcaccgctgctcaagctgagcgtttcttcaccaaactcatcgagacagaggtgaagttttaacatttggaactaatgaacaagcttgatcagtgcttaaaaggattcaatttgatcagaatcgttatacttatgactaaatgactagtgttttctctgcgggtttgcttactttcgtctaatatgttcagggtgattcacagtcaaatgatccggttgcttatgataatggcgtgacctacatgtttgtacagcatagtaacatttacctcatgatagcgtccagacagaactgtaatgctgccagtcttctcttcttcttgcatcgtgtagtcgatgtaagcatccctagtgattcagttttttgcatttccatctgttttctgaatttgaagaaaaaagaacggcactgtttcatatgttacagtcttatactgatcgtaggtcttcaagcattacttcgaggagttagaggaagaatctttgagagataactttgtggtagtggtaagataatgcttctcacatctcttcttataactgttttccctcttgcatgaggtggatatgtgtgggcgaaagttatttctaaaaacatttacttatgttactggcagtatgagttacttgacgagatgatggactttggttaccctcagtttactgaggcaagaatccttagtgaattcatcaagactgatgcatatagaatggaagttacacagagacctccaatggctgtcactaattctgtctcatggaggagtgaggggttaaagtttaagaaaaacgaagtaggtgctcaacattttacttttcaattgttttaggttttctaatgtttgcagactgatgttttgttttccaggttttcttggatgtgatagagagtgtaaatatccttgtgaacagtaatgggcaaattgtcaggtctgatgtcgttggagctttgaagatgcgaacatacttgaggtgcgttctctagtgtccctagttaaccaacgcatttaaaatcaaaagtccctcctctttgactctctgcttctttatccatgttattacagtggaatgccagagtgtaagctaggcttgaatgacagaatattgttggaggcacagggacgagcaataaaaggaaaagccattgatttggaggacatcaaatttcatcagtacgttaatctcttgcaactttaaacattctttgacagtcactctatcgaggccaatttttttactaactcgaaaaattattgaatacttgagtttttacacgtctctttcttcaaaatgtaggtgtgttcgattagcccgttttgagaacgacaggacaatatcattcataccacctgatggatcttttgatcttatgacgtatagactcagtactcaggttttagaatgtgtaatattgcagaaatggttttgtccccttcttaaacgaattatatcatgatatatcttattttcgcataatacttgttcaggtaaagcctcttatatgggtggaagcgcatatagagaggcattccagaagtcgtgttgagatgctagtaaaagctagaagccaattcaaggacagaaggtaagtaacaaatgttacttaacacgtttaaccattacctgaaatactgaaatactggaatcctttaacgcgttttgataagagttccttttttctgcagctatgcaacaagtgttgagattgagttacctgtaccaactgatgcgtataaccccgatgtaagaacatctctcgggtcggccgcatatgctcctgagaaagatgcactggtctggaagatacaatatttctatgggaacaaggtaagttcttatagtttaatgtaacacttgaccatgtaaagtcgaatgcttacattaagttttgaaacaatgtaggagcatacattgaaagcagatttccatcttccaagtatagccgcagaggaagcaacgcctgagcgaaaagctccaatccgtgtcaaatttgagatcccaaaattcatagtttcaggaatacaggttggtattactcacaatgatacgttattatcatatagatcacattctttttatattactgcattgaaatctgaaggcaaacaaacctgatgtgtgttaattatgggtattgcaggttcgatacctgaagatcattgagaagagtgggtaccaggcacatccatgggtgagatatataaccatggctggtgagtacgaactgagactcatgtaaaatgagatcgtttttttgtttttactattatttaagccattgtcaacgacacaaagcagaggaagatcaatgagaaaaggaaaaagattgaaatatattagctgatagaatttgcggtgaaggttgttttagaagccattttcttgtgaattgtttcatggcgttctcttttttttttttttttttctgtaaaactatatacgacagttatatatatattgggttacaattgttaaacatcgagttttatttggggttctttcagttcgtttaccgatggaaaatgcatgcagtctgggtgactacaccaataatggttttccttaaacgtccgctaattttgtaagagttcactatataaataactttgatgaggcagtagagcaacatgacgaactaacaaatattataattttcaaaatggaagatatatattttacagtacaacaaatcgagaggagaacaagaagaacaatgaataatctgtattagtagtaaatagcctaaacaaaaacttaagccctcaacgtaacaaccctaaaacattttttttttgcatgtgatcaatgtacaaagttgtttattctgggtgatgatgatgaacgaggagaagaaggagattgattggggagagtctgaggaatctttctaaaaacatgtttcctgcaacgttggaagatgctgtcgtatatcagatcaaactgaacaccagctctctctctgttcactatgaacattatgtgatctgcttccactatcttataatacctgcaacaacaaggtattcagattttctcaatccatcaacgtcattaggtcatatatgattcacttaccagatcccgggttgtaatgtttgacattccgaatcgctccttatgaaccggctcggatgctcaacaggtagcctcggatgtgtcattgatattgtgttcaatgccccgtcgttctcttgccagtcctcatcccttcattcaaacatgttttcttagaccaatgcagcaagggcttcaaaaatcaatgttaaatttttgagtgtttttgagtacctgtagcctttataaggaggagagacatcttgtgggaatttccattggctcatctgaaagacgcggaggaagagcatcgggtggattccaagaacacctgaagggattgtcatacccatgactctgcgggtgcgtttagtcgcgtagctgaagtagtaagtgtttgggaacgtctggagattggagttaatacttgttgagccttggattgtgagatcaggtaagatccaatcgccagaagcaaaaggacctgcgtttcccattaggcaatcaacgagacctctcacaccggtcttcttccaagaaatgttgaagtgatcgaacccgaaattgtaataagtctttagccatgaaatgtccaaccaatcgtacattatcacgcctatacgacacagctgcaacaaacatatcggtttcatgctcactccatcatctgtcctgtaacagcaacaataagaatcaacaattaggataaaagatcttggttttctaatacaggaacatacaattgcttcaaagatcaaaccttatttcaaaatgaagaaacaggaacattccaatcaattgtaaagatccatgtaaataccgaaaagaattgaaaatgtcagaatgaaaactaaccgcatgccatctaagtaggtcctggtagttccattgaatgccccggataacgatgtcacactcagaacccaattctcattcgtttcttcaaacccttcaaatgcctaaacatcatggtttcgcatcattcatcaaacatagcttttaaaccagaagatatgcttccattaaaagaaggattcgacacaaacctgatctgcaagcatttgctgcaatacacgcacaacttgcgcacccgctgaatgccccacaaaatgaataggatgatcctcatcccattcagggtattgccctaaaacacataccaaaatcagacttgcattcaacatgaaacatttggggtatattagtagtctcttccaatgagcattcatatcaaaatctaaccttgttcgtatcttcttccaaaccgagaatgtccacaagcctcgctatgctcttcgccaaaatcaactacccctcctttcaaataatagaacaattcccttgccctggaaaccaatgttatcatcaccacaatgcacacatggtatatcaagatctagatcaaaacaacaaaatcctaggaggtgcaaaaaatgaatccaatacctgtcatagatgcttgttaaggaacccaaatcaggaacaagaaccctctcatctttcttctcagcaccgccaaagtaagataagcctcctaatctctgctcaatcaaagcaataagatcaaacctcaaaaccacaatcaaataatcaaaagaaccaaatttgaggggtttgtttttgcattacccctttgccaaatccaaagatgccatgaaccaatacaataggaggcaaaccctcaacattggtttgattttgaccggtttctccgaaagcgacattggacttaaacaagtaatcattcaacgtctgagagatatctccggcaacggcggagctaaatatataaaacccataaagcaaatgcacaatagagctcacgaagagctccgcgagttggagagaagtcatcatccacaacttaatcatcttcttcttctacttcttcccccaaaaatcaaaaatcggagatttaataaaaatgaaaagcaaaaaatcgaggtaaaggaatctcctttatcctaaaaaatcaaaaactccccggaagaggggagagaaatagagaagagagccttctttcaaaagaacataaagaagatgctcctttgacgaaaacccagaaaggaagaaaattcgaaaactttgaatttccccgagaaaataaaggaaaatgcgtcgtctctctctgtctcttttatcatccaacaaaaaactttgttatccacttgtatctgcccacctctcaccaaaactagaaaacaaaatgagttttcaaaaattgacaatctttgaagctgaatcatgccatgtgtaacggtggtgacctctccctcaaaactccgagtttccgcaataataataatattgtaatgtctccactaaatttttgggggaatattttgttaataaaataatgaataccttagagatgattattattaaaataattgagggaaactgtgtgattggttgagagaaacggtgaagtgggctggatcggcgctggaaggttcgttcatagaatccgaccaattccctaactgtcttctgtaaccttatccattttaatcatagttgtaatgtttaatcacacttattttcgtttccacttgttgctaattagtacattatcggtaggcaaattatgtggaatatggataagtaagtggatttctgtttatgaatggtaagactttggggttgacacatgtttgttagcataaacttttttaaattcatatgcttaatcacataacataatcgtatatgtttgatataaccaagttaatcaaatgtacttcaaaatcacaggttttactataagaccacgtattagtaaaacttgtgatttcgaagtatataatttagttatatttggcataatttcgagataaaggtagatcagttacgttcgtccatggttgtcaaacactcttaatgacaaccatcttgtgctgctaatagttaatacggaattttgagatgttcaaaatgaactacaaataaattaagatttatgattcttttcatacatgaggaatcgtcaattggcaaattctggcaacaaagttattcatattttaactttaaaaggtaatattatcatagttgcgtgaaagatatgcagaccaaaagagaaaagaaatgcagcctcatgtggaggttaaagataatttggactctattggcgctggagaaggttttgtgtattgtggaattaattagtgggggaactcgtgcacatggactgcttaatatttccgaggtttttttttataaatttataatatagtagttgctaactggaacttccaaatttaaattaccaaatatggctagttggtaaaggtatcggtaacagatccaaaaaataataatttccattttaggcaagaaacaattggcgtgcaagaaaattatgagattcagaatacagtaatgtgatgcaggcagcagagccgtggagtattgttcttgatataatattcggaaaatcatttgtattttcatcttcttctttttttcggacaacccaagttttaatctatcgtatagataaatcttgagatattgcaacacctgtcaagtgcatgaaagatctaatgccagcttatggacttttatctccgattccaagaccgaaataataaaactaatgggtctaaataaataacgtttttaatattttagctactggccacaatcatttaagggtatttaataaatattaaccttaaagtatggtcaaaagaaagtttcacaatttggaaaatccagagacgttgactactctaattggcaaggaacaagagtatttactttgaaaagttattactgttgactctttcataatctaccagattgattaccaccattcctaccattttttactatttggtagttgcatcttccaaatttgtaaaattttaccaatataaaagtcatatttttgtttccttaattaattatatatggtatatagaggatatatatacaccattttggtaaagtaatatctgctgactaatttaaataataatgataactaatatatactactatatataccttttatttcaatattacagtctatatatagatttcactatgacattaaaagtcacatactgttggttgaaataaacaataaaattgcctacgacaaacaaaagatgaaatcacaaacagttctcatctccatattcatcttctctttctttgctctacatcagtgtatgtaaagagtttttttcacatatttatatatataaaaactgctctccctttgttttcgttattgttgatgtttggttagtgatcgtgtagtttcaaaatgtgtaggcatgcagatggatgttggagaaatagagggctcgaacaagatctctattggaaagtgtgtccctgcccaatgttcagttagttttttcaaacgggattgttggtgttgttttagagatcaaagtatgtgttcgaaaacccaaaaagaatgtgaatccaatccccgttgtcctcctttaaagttttaaactttttgaaaattaatgtactgctatgaaatttacaactttataatgttttactcaatgtaagaacgctctatataacctgactacactacctggcaatgtacgaccttgattaaaattatttttaagaaaccaaagaagctaaaatgaataggtgcatattggtatagttaatataaaatttatcagtgtaaaaaatcagcatataaaattagttaattcttattatcatcttttaagatcaattctaattatcattttcatcccagaaaagattgcatatttgtttttttcatttatttattgatttttataaaggaatgaatatttttccctcatatggaaatgaatttgtttcgtaatcttgaaaaatacttttctcagtatgtaaatctacaataataaaaatatgtataaaattatacctaaacatttataggttaaataaaatcatttttggtcgataatttactccatatatacaaataagttgatatatattttcatgtttggtaatagattttaatgtatagaaaattagacaataaaacaagagaaaaaatcataaaattgtttaggctaatattcttttcgaaatatcgacttgtctattttagcttctctatttcttgtttatatcaagattgattaatctttgtaattaacaacaactcaaatagataactagaaaggcatcatacaatatccttcgagatatccaaaccattgggtgttgcaagagtcttggtcgtcccagcattgatttatgtttattccgcagcaataacagtttcttttaaaactaaaattagggtcacaattgatatgaaaaaatgtcggtacatgttgaaaacctttttagaccggtgcgcgcgcgatgaagcattcttataattaatgcttaattgtactacttatctttttaattattactagatgcttcagttcaaataagaacgttattcattataattagcttaattctctatataatctgaatttgattgcatgcatttactaaagaattgatacaaactactacgttaaccagataaaaagaaatgacataaagttaagaaaattaatgaaacaataagctacaaattctcaactttaagtcgattttggacgaaccaatcccaaaattgtggaaacatgtgttttgtgtgtttacaagttacaacaactcagataaagagataattcaaaaaaacaccatacaatatccattgagacatccagaccatgaaatcatcacatacatctctcatatgcatactcatgctctctctcgtcgctctacatcaatgtatgtatatcatatacatatcaaaactatctctttaaattgttttgatgtgtgtttcaaaatcaatgtgtaggtgtgaggatgaaggtaaaagagataggaaggtcgaacaaaatctatatacctccatgtttccgtgacagctgcgaccatgttttaaaaaaagactgttattgctgcgggtcaaagccagatctttgctgggaagaccaacactattgcaacacccattgtcctcctctaaaaccattaataaactgatacgtacaacaacttacttgttcaaatttcagacttttctattcaagcattcttacaatgcctaattgtaccactttacctaattttcacatatacgaattagttaagcctggataactataactactaaagaatgtaagaaattaatagtcgcttatggatgaattcttgtcgatagtatttttacattttctccaatttacttttcacatttacacataaatgaacaaagattgttgtaaaaaaaaactaataaatgatgaaagtagcccttataaacctgcagatataacctaaagaattttttcacgagaaaatatgaatccctaaaccctaattaattttttctttaagggcatttaggatttttccctggtcctccgtaataaaaataactcccccaagccctattagacccaccttgaatatcgtaacaattcggatgatccgcaagtactcgaagattaggagaagggaccaaattgttatcccaatcaactacttggatgtttctgaaataagaagattttgtaaacccttcctctgcaaaatgcccacttcccatctgtgttgaagtatgggctccaaaaggactcgaatttacgatttcgccaccgtattggaccatgcttgcgtgctccttcaggtgtgtgaacaagaacgatggccaatacccgactagaatacccgacccgaattccagccaccaattcccatgcttcggatcctgaaatttaatttaatttagtttattttatattaaacagacatagtaactcttaacattttatttctctgaaaaaacaaatttactttatatcaaaccatactttagttacagtgtatgaccggcaatcgtagtttatctaatttgcatcgaacaattacattaacttatatgaattttaatgcacctaacaataaagaatagatggtttaatctgtgtgttgtttgtcctgtataaaaatagaactaaggatgcctttaattatgacccatgtgaggctagctatagaaaataaatagtactattaatttgataacttatgagccatgctcctagctttgctttgagagttgtatgttgaactatttggggacaagtgtatcaaagaatgaaaaagaacaacttagaacaaaagtaaagaagagttgtaataagtggtatgatactcaagtatacttctctttttcttaaaaatgataaaaagagaaaagatagagcatcttctaattaaagcatatgcaattgatcggattgtttttttttttgtactgtatacccaattttcaaaggtagaaatcaatgaatattgtagttaaagtgtgactagaggagataatattttgattataaattagatagttcagttatattgtaccttccaaataagcagagtaatatcgaattgtccacccttgtatgaagacgagggagagatggcagctccaatcgcaatctcactattggtttggacaaaaccggaacacaagagattgtagcaacctgttgcttgatatgcatcgttctgttgccaaaacataagaactaattaattatagaaaacttaaaactatatagaatttacatacaaaaagcataattattatttataaaaatgaaaggcttagcataggaggaactacttacagtccagtaagtaaagaatcttgggtaattatctccatagagctctggactcacctaatggcaaataattatcaacagttagaagctaagcatctatagttttaagctattgatgtgatataatctttgaaataaatatatgaagaaaattgttacctgccaaccagcttcaatggtgttgagatcattgccaaaggaaccagagataatccaaatctgagataaactaaattcgtattggttctgaacttgtggagcccaaacattgatgcttgctttagcaccatagtatttctctccgctcacgtatcccaccgcgtgctatactcagtataattaacacaaccgaacattaatttattatcccttcaaaagtaagataagtgtataatcaaaagcattatttcatgtttatgcaagttgtgtcaataacaaattaacttggcagagctatatcttcgtgagagtttgtgttttccaaatctagataactaaggattttattttattataaagttatataaaatatgtgatattatttgggaaaacaatataattgctgacagaatgtagaagaggaattaatcattactcaaataagttaaaaaaaaaaatactttctcctctttcttttgttttttaccgacaagcttgtctatctttctttgttatacaattctcaaaagatgaaatttcaaaaccaatagaagaagtgaaaacacttgccaatttcgttgaccacttttatcttctcctctaaagaggcaaatatagtaaataaataaaaattccatatattttaaaaccttacattttcataccaaaaattcgaatttcgaatttataaacactccggacaaaaaatctttctctttagaattttgcttatagtataggtggaccaaagatctatctctttttcttttgggtctagattttaattttcttggtaaaaatatatttttaggttttcaaattggacccatatgactaatgttcacattaagaaaaaaaaagaggagaagatgaaaatcttacttcatgcccattactgctagtgtctcttctgtaatgtctgagtttcttgccaaagctagaaacagagtttgctctgagaatgtcttcttcttttgttcttctgatagggactgttccctcaggacatgtctccccctccattccccataactggaagctcttcggtctcaatcctctcctgttatgccctcttggcctctctggaggatccttcagtatttaagttcacattttgattagtttatcattaacgggtctaatgactgtgtttattaagattaacatatggtatgtgtaccagtggcttctgtcctcttaagctgggatgatcaaatgctggttggtgatgtaataaaacacagtctatgatgtctccatcggggctctgcaacaataaaacagagtatgttcttgaaacaataaaaaaacagagcgacttgttatttaacatttacaccaaaaaaaaaacagagcgacttcttgaaacagagcataaagaatcaagaacagagaaaggaagtgcttttttttgtttttctgagacagaggaagaagaagattgtgtttatgaaaaagaacgcaaaaagaagatcgcgtacgataatactaattcaaacttacatgaattgtcttaattgaaggtttattgatcttcctgagatgttgattaatggctttgagcttattaagctcatcgagtggcctgagagtttggtttctaggtgagagattctcggacaagacagaggaaaaagaagaagacaagagaagaagagagaggaaaagaatgttggaggaacaagtacgaaacagaaggatcatatctaagaagaagcttcttcttcttcgtcttgtttctcttgttctcattcttgtttcttctgagaacaactctgtttccgtttgtctcattgtaatgcatcgatcgaaacgacggcatttattgccgtttctgggtttcctcaacacgaacacacctcccatcaaagcccaaaacgttttctcgatattaaagaatgagcaagtgagcaaaagaagacaaaaacccttgatttttataatcctctcaagctctcaccatttccaaagctatagaagctaaattttttcataacaaaacccaaataaagaatcatgaaaacactcttatgtcttcttggggccttatgctaacaagaaagagagagagagagacgagagaaagtttcaaaaggggtttatggaattatggtgtcttaaagtaatagtctaaatgtttatatgtgttttataagtacttggcttggatagtgatgaaatcattcatgcctttcctttttttttaacctccaagaatacagaggaaccaaaaatgaaataaaaatgacaaaatcataaaagaccactgacataaagtgactaagcaaaatctaactacaatgcttttctctctttctttgttggtccatggcttaagaatatgagtatgcacacttcctccttaaatcacctattagaacctattatatagatatggctagctaaaacagaggtggagtaattgtttagtctaaatgtctcatgtgttaatgaataatctctttaaaaacaataatcattccttttcaaattgtgtttgtattttacctggtatcggaatttatcctaaaatgaaatctgctaataagtaaattctatctcagtaaaaaaaacaaaaagtgtagatggatcccatacctaatattagacctgaaaccttagtttggacccgtaggtttgatgctatcttgactatcacatagttttacttattagcagataagaatatgcaaaaattgtatgcaacatgtagttataagtgaaatcaaattaatataagctaagttggtcaaaagagaaaaaaaaagttgggggaggggaaatgttcccaattagcaatacaaagcctgaaacatattatgtttgtttgaataaatgtatatagccaaatataaaggaaagtcttgtggttgctatgtttcttatgataatgacagtcaaaattctgtgtttcttcttcttgttttatcttgtgttagtttgcattctctgtgtgtttaaaaaaaaaaacattttttgtatcttttaagagacaaaaagaggaatttgcaaataatttactttttcttattgttgattcttgaagttcgctttttctctttactctcttccctatatgttccttctgtcagctactctctctcttttttctttttcttttacaacattttttcgagagcattatatcttcataagattttaacttctacttgaaaaatatacatataaatgaacaactacgtgaagagtataactgtggtagtggaagagtataacaaagtttagtactaattaattgtaaataatagattagatcattttaatttactaagtagtttgtgttagggacatgggagtgttggcacgcgaggctgagtattagcaatgcatgctcgagtgcttatgttggggacccatccatgcatgccatccttaatttattcccaccaattatcattacctatcccttgattatgcatggtatatttttcaatatttaaaacctatacaggataagaacagaaataatgtaatttgaatacgtacagagttatatgctagtatttacaaatggtattggtatgtatattgttttctgcttcatagttacaaccatttggacatgggcatgttaaaaatttaatatgtggcaaacataaatttgatacttgtcgtcatggcttgtaaataatatgcaatgtaaaccttcaaaaattgagattcagcatctataatatatgttgcataacttgtgaggttcaagatcctaatcatattataaaaaaatccatattcttccttccacatttccaccattagtggattcttaagagagaagaaaaaattaaacaaccttaaacttgttagttaagcattgagcaccaaaatcgattatacattctaatcctagtttacttttgcgtaaatgtcaaaacaaactcattgcgatatatttatcgtggatagcacaatttttcacgtatatgataattttttattgtgcatgcatatatacgccatactatgaatacgagatcggttgtgaatcatatggtgaggtcaagctggttgtgtgattttgcattattgcattgttggatcatatggtcaaactggttgtgtaatttttatgaatcattgtgatatctacaaacatacacacatttgattttgtgagctttaaatgtccgtagatatgcatatctattaactgaactactgatgtggtggtggttggctttagagaaggccattcgcgagattccaatacaaatattaaattagtacaaactaaaaaattgtgaagaaatgtagaaaagatcaaagaaagaggtggatgaagcggcatggcatgtatcatttggcagctaacttaatctagaaacaaaaaaagaatcgccttcaattgcggtcgtgtgtcaaagcttaaaagaaaattattcaggaaaaaaggaaacattatctatattttattacaatttagaccctaatttgaattgggaatacagttgagtcactaattcacaaaagccaaacactaagtagtcatatcgctcgaccagtgaaacgacaagcagttttcagttgcactcaacttcaagaagcaaaagctggagaaacttccaactccaataaacagtttttttatttatatcttaatggtaatgccaaatgtctttgtactacacattttgtaatccactatatgcttatgctgtattatactctttgcttatagagcaaataaggagtttactggacagaaaacgtaacgtacacattaagaagtggtcagagaatttgatcacacttgtggtcgtgtctggacgacatagagcttcccgtctctgatcacaccttcaatgtcctgtgcagttccatagagtttctcaatggcatctccagcgcgtgcaatgtctgagagaacctttttctggaagctcaagtcagtgatcagaggatctgttgtgtaatcgagcacgacttggtcttcctcgtccattggtacactgcaagaaaacggaaggaaaaatttcatggttgctccagtgttgttaagatgatgagatcaagacaatgacgataagtttttgatttatgttcacattacctgtcgtagaggcctgcacctgcataaccttcaagatcttctccattggaatcagatctgaagatgattgaacgtcttatgaacagcccaatcggtttgcttgggtagcccaacacctgaatggtgttttaaatttcatcagcattcatgagttaaacagagttgacaatatcatattcgaactttttactcataaaacaccagtggttagctttagtaccagaggcgaatcaaggttgtttttcttgcagatgaaactcagagaccgaccgggatatgctcctacaagagtttccccaaggcctttgaccacctgaaaccaaaacacaacagtcaggtgaagttggaagaagcagaggttcatacggggttaggaacaaggatcttttacctcggcataaatctctgatgaatctccagaagatggattagttgtgtgaatgacgaatgcgtaatccgcattgatgacttcttggaccaaaacagccatgcagagatagtcatgatccagttttactttcctcgtgctgaagtatgctctctcgttccatttcgaagcccagacctgagatttacatagccggttagtgagatttgacatcttcatgttaagcagcaattccccttacttcaagattttacctttttaatggctgcccaagcttgctcccatctctgttcaccttcatcacccggccatggcatgtcagaacttttcatagtacttttcagttcttcaacctgagaccaaaaccataacagtggcacttctcttagaatatctctacatttcactcaatttccaccgagggaatgtgagcttttcccaatatataaacttttataagaattataggcatcaagctaatcgacagcatcaggaatatgcataaactaaaagcaaaatggtttggtggtagggaatcaggtcaaagaacagagctttagggtccgaatgtgaaatttaatgtggtttagtatcatgtgttgtaaaaaagaacaaccgcagcccagattcgaaatatgcaggaacaacaacagatgattgtgtctcaaggttctcacgacaaaacaatatgaacataccagttctgggggtgcaactagccccaacagtgtctgccggatttccttcagagcaccttggtctccctcatcaagagttttcttcaatactagcaatttatcgttcaccgcctgccacatccagagggagagaaagtgagtgggaagtgaggttgggtgaacttaatcatcaaaaagttaagtctaaagagattatatcggttttgacagcatgatagtcatgcacacccgtgcttatgaagagacctcacgaaagatatgttctaagcaattccacataaaatcctaagaagcataggaactatctctactctaatatccccagactaataccaccagtaaagaacagataaacatagaggtagcaaaaattcagcaaagtagcttcaaatttttttgagccagaatgagttgagagtgtctaagatacctgattcgccttttcggagataaccttctcaaaaacaccaaatggcaacgcaactgaagttgggataccaacccaagaaggaacttttcctttcagatacccgatatttcttgatttagcaccaacctagaaaaaacaaatagggttgtattacccaaacccgtgaagtcagttattcaaacatgaggaaattcatatataatttaagaactatgttatttgatgcaaagttacaaacagaagaaagaaaactactaaaacagataaatacgggaaagtaagaatccaataacattacacactaaccaagtcacttgtgaactcctcagatgatatagcatatctacccgcaaactgtttcttgaccaaagaaatacttggaggggcatcttccaggttgtctgaacttggactcgaaagctcactatcgtttacctctctacatgaaagagaaaattaagtaagaacataattttgtccaaataatcttctcaacatgaattaagtgaattctactttataatctgtctagcacaaaaggagagaagatctcagctcgaattcccgaaatataggtaaaaaggatgattacttatagactacatctgcagaggttggttgtaggctcaacagttttccatcttttccttggaggtcagataagataccagaatcaaaacatgtggcaaagcagatctgcaagtgaaaagccagaaaaaaaagtgaatgaacaggccatgagcgttcagcaacgttttgcaccagaatgaaagtttttacctttccatttcttgctcgaacagaaacatgagatagtacatccggcatgtcaggtgtcagtaccgcaactgcaccatcagggatttcctcctctcctctcactctgtttgcaactataattgtaggtctatcgtaggttttattctgtacagtgagcaattcgtccacaacaatgacatatccgacgacctctacaggactaataacctgccaactgatcaagagaaagagaagcaacattagattttctaatgtgtaactaccatgcgtcaatagatacaacttgctacagaacatgtcaatcagtcacagacaattgcttagctatctaaccttcccaagttagcagtcttcctaagaactgggtcaagtcggttaacaagtgacgacaatgctgctgcagatccagctcgaatgatctcttcagtaaatatactaacctggtaaagagttttaatgaaatatcaaaaccagggacattaataagttatggatgaaaaaagaggacgggttcagtcacaggaaatgtaacttacagccgactgatcgactccaagacaagatccaagatattcagccgatggttgcagaatttcaaggtacctctcagctttgcttgccagtgctagtcggcttctgtcaagaacagattttgcatacagagcccagtgatcttttttgctcttgcacatgtcgagggcaaattgccatccctgaaaaagcagtagaatagcatcatgcatcttctcgaaattcttcaagtgttaggccatggaccagccattaggacagagtagagggatctaaattctgtattaaacctagctatgcgagtggcaaagctaagttagacccattgaaggaagccaagaatgctaataaaccttgatgaaataatgttctaaagcaaacataggaaattgactgatattcaattcaccttcaagcagtatataaggtcttcattgtcatctgaagagagggcaagattttcaagaactaggctgatgaagtacatgattttctgcaacaagaaaacattaaatacgactaggagaataatatctggaacaacaaatgaaaagccaagaacaaaagagaatatggaactgttgacacatgatgttcaggaacaatctatcatgccgatgaataaatctactaacctcaggtccagcatcattcaattgctcatatcctctttcaatcgctgttctgacagtagaatcaagagcgaggtccaagaataacagatccttgaggcggtcatgggacttcagcagaagtggccttagctcttgacgagcttcaagcaaaccctacatcaatattccttcccatggtaagtctacgattcacagaagtcaaattaacagtacaaataaaatcgacctagtaattatgaaaacatttcacctcaagaagtggctctacattcttttcttcaacatgttctaggacgaaacgaagcaagtcctgttgagggaagtgccaacacagtttaagttggactgatttaacaggtgtattaaattcttgagatgagtagggaagttgagagaaaagttactggatatccagaaggcaatcctgatacaggatttatctgcaccccaaccatgaaaccttcaccctgaaggacaacacaaatgttcagttgccaattccaagaagaagaaataactgtaacttttcagtatatcggcattacgtcatcttggtagcccatgcaattttgtatagccgactcaaggtctgcccctgaatgaacagcctagacaaaataaagaaggccacaagttaaatgatttctcttagtaagaaaaggagaaagaggaaatcagaccaactttgccaaagaaagatgtagctagactcataaaaggggctagcataaacttggggaagtaacctttaaagtcctcatgtagtgtccaagatcacgcaaaagaccgtctttttgttctcctctaaaatttggttcagaatgtatagcacgatcataacttaagagtcgctctttggttatgccattatcgttcaaggtcttccagtaaacacttaagtcaaagtcacttttgatataatccatcaatgcctacaataagaaaagtgtcagagaaagattaagattggtagtttggtaccagaagggtaaaatttcaaatacctgacagatgacaacatcatctggactagtgttgttatgcaacttctgatgccattcctccataattccacccttgcagtcatttttccgctgcaagcaagaagttcactcatcatatttcaaatgaatatagaagtcgcaggcaaatgagggacatgaccaacacggccacaactctgctttattttaaagaggtgtgggacagtaggagtaatagggacccagtcccagaaagttcaagaaatagagttccaaccctggaattttagaatttcttcatgtagagcttctcttcttatttccttcattgttcattcggaagtaaaatcttttacagataataagaaatctaaagaccaacctggatgactagaatttcgtcacggattcgttgcccgacatctccttcacctcctcgacctacagtagacattatcatccgcaaaagttctctgtactctggataacttgcataaacgtcctggagaaggtcagtcagtctatcctgcgctttgcttatctccctgcagtaaattggtgtgaaaattactgaaacgatgctgtatatttatttaaatatcattttcagatgtcaaaacatattataagactcccataaggtttgctaatatttcccttggggccgaataagaaaggtggacagagtctaaacttccaattaatgtcacattatttgaactgtaccttggcttaacattatagtttttgttccacacaagctgtcttgtagccataaacctcatccagactaggatccctgcaaagcccagttgaccagcactttttgcctcgtccacaagatctgctgcaatgttgaatctagaaaagaaaaaaaatggcaagatccaccccttcagatatcagagttccggaagttgtaaatcaactcatgcacaaaagagatgtatcactgggaatataaatttggtgatcacagaacatggatcaatcaatgtattaaatatggatgaatgactctaatttgtataagtgatcatcatatatggattaagcttctcgaagtctgaaacatgaactaagaaccaggatgattgagcataaaactgaccgatgcatgaaagacttctgggcctcactctccaaatctgcgattttgtccagtaaatgcttggctgtaccctttccatcgccataatcctttcaaaaggaacaattaaagattcagcctctaggggacaataagatgcaattgaaagcgaattttaaaagaccaagaaggaagagaaaccttctgaacatgtttttcttctttagcaaagtccacataaaagtcactgtcattatttttaatccacctttcaccagcattgagtacaaacggcatgcccttgtagctgtcaccttctatttccagctcaaaagtttgaacctacatttttggttaacatgagagcttttacataccatctctgaatccaaatgctagtagacttatagtagtattaatagattcgacttgtcataccggactaggaagatctgttgaagtgatggtcagttttgtatcaacagcaccacgtactggcaaagagtttggtggcagtatatctgaaggtgggtcctgcagtgtcaatgactcacaaactcagaccaaatgagaccagaccagacatccgattgagaaggagctgatgttaaagtatgttcttgtttaagaaataaagaagaattatcttaccaaccattctccacccttttgagacaaagcccagtgaagggtaaccggctctttaaaatcagttgccacatgaattttcgtctttccggaaagtttagtaacaaacacctatttagagggagtaataacttggcattagaagatactgatggatgtatatctaaccggaatagaaataaaaaagagagcaagatagtgatgctatcaactgaccaaaatcgcactgccttcaagcttgaatgttttcttgctaaagactggagtggtttcttgttcctcctttgctttggcgtatatctccagagttgttaaggaccgtggttcagatgaggatttggattctggttcaacaaaatcagcaacatgcttatagataagcttagtcaggtcccttcccttgcgctggatcttgtcagtgttataattttttttacgctctggttgcttggaaacttttttcttttcctcccgtccactggatgatgtcccattagattttggggattcattactgttatctttcttcaacagctttgctctgagatcttccactgaagcacctcgcatcatttcctcccgtagctccgtccgggcggcttcatactcctcctattgatcagagacaaattattctgcttagctataaaataatggatttacacaaaaatgcagagaacttgatattgatgcaactgagatatatacaggttcatcagataaagcaacaaatatattttcaagagccaccagagccaactaaaacgctattaccaaaaaatcaatcaagagcattttcaacttagctaacctatcatcaatttgctgatcagtccaatataccagaatctgcatctaaatcaaaattgttggaaatttgtactggtgatggaatcaactaaatggctggtgagaatcatgattcctctttatgtgaattgtagaacaacataaaaggtgaagaatttaaaaatatatgaagaaaaataatccttgaagatatgcttgtataggtacaacgtctgactgaccttctctttctcagggttgtacatttgtttacccttacgttcccatctaagatatgcttggatctgtacaagatcttcaggaacagaaacattttgtttcacattcctttccgttggtaagtttatatgaaaattctgaccattatttttatacctgcatatgttttagattatgagaaacgacaaaaattgtaaacagaattaggttctctgctcaggcttagtaagtaagaagaagcgaaaacaagctaaccatttgttccgactttcgtcaaatataaggaactcaatagcgtgtatggcaggatcatctatctctagtttaaggtgagaattgccaccggactgcagataagaactcaaagcatcatttggaaatcttaagttgtactggtatcagctggaaatcataccatcacaagtagcgctgtaatgtacgtcgaagaatgaattcaaagcttactttcacaaatggagttctaagcgcactgttcttgaagttttgagttctatccggagagcgagaaggtagaacccaatttctgacatggaaaataagaaagatagttaactataccatgtgccataacaagctattacctaggaaagttgaacatcactagacaaggacatactctttgttgtcaagaattgcaccccagtgtaggaacaatgtgtcacttgtataagctatctggatatttacttctcttacagttgtagaagtgacttcaacctattcaattacattcataaaacctaccattaagtctacaaatgccaacaagatagaaatttccattatttgtaaggatatacttaccagtaaatcgatatttccgtcaagactaaatttctcggctgcctgttaaaggatgaaactttttagcacacatgtcgataaaataactatcttatgcattcaattggaagaacaatgcatatgattcaggtcaatgaaaaagttttggacatgaaacgtctaacatacattgagtagttggaaccaaaatatcacattccaaacaatgtcaatagtggtgaaaagtaaatccataagaaaataacctgaggatccatggcaaggacagctcgtggaacaaatgagagaggtcttcctcctgtttcagtgaccagactgcgtcctgcctgcttaagacctttcccgtaaagttttgatctgccaatcttgccaagagccggatttgctgttgaagtttggtacacagaggagttgagcttgttttgatgttcaaagttaagaggacgaatcaaaccccggttaagtaagttatgcactacagagttactcatgctttcttgtcactgaatcaaacttgccggatctgttaagtaaagtagagattatataataagataataaggaaaacaatgaagcttttgcaatagatgagaaaaaaaaggaacaagttatactatttgtctcaaaaagaagaatctgacagagttagacaagagaaccacacttgttatttttattttattttcactttgtagagaaacagttacttcattctgcgaatggaacatgtgcaatatacactaagaagaaaagaatcgtcttttatagtcaaaacgaaaatatctatcaaaagaaaatttgcaatttgaatcaaataacaaaaacaccgaaagcaatcgaaattgaaggtaaaattcaattgaaaaagatacctgatgatcgaaccgagacgaagaaactgaatacaatgagagaaagagagaagatcccagaatttgaatgatcttatggatgaagtgagtgctggggggtttcttcgctctttgttcttcttcactcactcacacatacatacactcacgtgtaatcgaagtaaaaaacgacactttatccttcgattccaccacgtggcacatcgttattcgagcacgtaggaggaacggcacggagaaagagagcccagtgatacgttgatggacggtatctgtggactccaccttttttttttatttgggtgatattttcttattatatacagaatcttctcaccgttgattttagctttttttaatttttctttcttttttctattttcctgtttttgtctttttgttttgatatttttatgcttcgttctcttgtatcttttttttattggtcgacatgtttttttttttttttctcttgtgttcacaaaccacgaattgcagaagatatttttgtttatctttctattcttgtagtgatatatatcccaagcccacttgttcaatcatgtcaattatatcctagctaaaccttatttggtgtttttgtgtggtgtttcttctatagagagttttacacattgtggaaaacaaaatgtatgttaaatatagaagcaaaggataattttgtataatgttatgtgtgtttattatggtccaatatttttcaatccaaatcaaagcaattctcactttcttaaaacacttaaagacattgaaacatgatcattgagcaagatctatcagttttgcatgaaagaaaaattattgaatgcttttatgatcatatcaaactataatatacatacagattttaagaaaaagagttaaaagaccattttaaatggcaatatttttatccaatatatgatatagccaaattattttctcaaagatatttttttgttatggatcctgggaaaagtaaaacataatcacacatatactttctaaaaacatcataatgatatccatatcaataatgaattagtgatagtagttaacaaaacaaaaagttgtgcattactatagtttgtgtttgtctttgtcacttattgttttatttttcggtcaaaacttaatcttattgttgatagtgaaaaagtaaagtgggttcaagaaaggagaatggaaaacatttctatcggcaaattgttgaatatgaaaaaatctactagcgattattaattacacgaaattcaaatataattagttacacccagtggcgttacatacgaatgatggatcaacaacaaacatctctctcaaaacaaaaacaacaaaaagaaacccaaattttaattgcttgagattttttatttcttcaattaattagtttttgttttgagaaaaattaaatcaattgttctcttaaatcgatcatctaatcaatgtagacaacgccaagcaattgctgctaatttttctcaagtcaaccactgcattttggatcgcattaacctgttgtgtttcaatgaacccgtccacacatgcaccgtaatcagacacagccgcagttagatacgtgttcatcgccggcacatcacgtttccttatgctctttctcgcgcttgccaaattgtaaaccgcgtcgcccaatgtctcgtaacacgtgctgaccgcttggttaccgtttttgaacctagctgtttcggctagagctagtttcgtcttagcctccaaagcttggatggttcggtgcgtggcttttctagggctcgtgacacgtttcaccagaggtcggcacaaagatggatacgcggtgtgagagcagatattgatcatacgcgactccgcgacttgaccagccatgagaaagatcaatacggcggcggatgccgcgactgctgcaaaacgcagctggaatgtgtcgcggcccgccattttattgatatttatttatgtatttgaattgagaagaaattatcaccaggtcatttttcaatgcaggagttaatcacgttatatatagacaagtttttttggttttgaaattgttggtggtgcgcgttttgcgttttctcgttttattttaatgtaatgcaatctgaggtttatcttgttttaaggagattatcttcttttatcttttttaagcataggacaatacttctttgatacataagtatactccaaaaacaaactttatcataaactgtaattatattctgctagatcactactagtatattattaatgtagattaagaaaacaagaaagctaattaagaaatgtgtccataatttttcgtttaaaaaacaattgtcataagttcatcataaccatgaatcaggaaacaacaattactcaagagttcaatataagaaatgctcagcgaccagaaagagaaacagaaatcaaatggctgaaaataagattagcagcaaaaaattatttcattctatatgaacaagatgctcgttcatgtgccggaacttgcagatatcatcgcagaaatcatctgcactgctgtgattgctcttcatccggagaatccttatcaccattcgtttcagacctctcgcgtatttcactagtgattcaagcgtgttcatcttctgttctgcgttcagtggagatctcactgtgataacaacctcctccaaacacggtattgtaaatccggtctcaagctgcaaagagaatggaggttacattattgataagtaggctttgacttcatcggtaaggaaggtttctgatgaagaagagattatttttaccttcttaaggctgtttttctggcagagtgcagcgaacattgctccatggatgtcgaatgtttgaagctttggatggttattgaagaactcgacaaaatcaatctcagggaaaggttgaagagcctcattgcctgtgaattcaaccttcataaagagatgcttcacgtctcttgcttgctgcagtatcatgcatattgcatcccaacaccattgtacacctcgaatcgacaaggcctcaagcgatgaaagattattgaaatctaccatgtaaactctccctgttaaccaatcagagacaaagtaagacaaatgagatctgcagatggtaatggaagaacgaaacaagttaaaactcaagactcattaccagtaacactggagatggataggttctttaagaatttggtttcagggacacgaatccagctacaaccttgaacatcaagggacactaatctctgactcgtgaggactagcaaggtgttaccttgtccatagaaatccagcttacagtgctccaagtatggcagatcgattgatatggatttaactccctcacaagctagtagaagcaagttactcagattcgggcatgcacgaagagcatgagacagtgaggaatcatccatttttgctcccactatttcgaggcttcgaaggtttgggaacatatcccacttaggagggctcatcattaaaacaccccaaagcttcaaaatctccaaattcttggccacaccaatgcaatcaagcttcaaagggccttcgacaacaacctcctcgctagcgagattatccattcttaactccaatagccttagagatgaactcacatgcatcatccaagatgctaggccgctgctagtgaatgggctatacaccacaagctcctcaagacgacgagaagaagagatcatcttccgaacgatggagtcagaatcatcagtctccatgatgctttcgaatgaattcctgtggaaaacaacgctcttaacagagtctgtagactctttccatcgcttggagacacagttgcaagcagccacatcccttgcagaagtcaggtaggaaagaatgtattgaaggatcgcatcaggaagagagtccatttgactgagacatttcatcgaacagttggtagtcagctaatgaacacactaataatatacacacagtctcgtaaaatgaaataaagtattcatctttatgcttgggcataatcaatccatgaatatcacaaacatgagaaagcttaaaccccaaaatttcacatcacccatgatttaataaatgcaacgcgacgacagtgtaatgcacattttaatgcctagtagatcttgacctgagaaacattcaagagccataaatccacacaaatattacagttgagatccgaaaattgagccgctcgtatgataataagaaattacccaaatagcagatagaatcaagcaaccctaggatgacattttctcaggaaaatagctacaaatgttataatcgatagacaaagaagaagagacgaaaacccacattgcataactatctacaagacaagcaaatctacagattttcaaaaatcaagttacagtcttacagatttggaagagaaacataaagcaaaggaacataaacagtaaacagatattcatcttcaattcttaatgggttaaccctaaaatcgagctccttagggacactcaaggtaaataaaatcccagcacaggtgaggaaacagcaaaacccaagtagaacagaagaaagcaaatagatttttggttgggagagattcttactgaatgaatctgggtcgaactagaatcttgtgaaagagagagattcaaaatctcaagactttgggaaaatgtcaatctggggagagggatagagagagtgagggatttgggtattatttgtaagggggaaagagagagagagggtggcgcgtgaagagagacggaaggcggagtttcaaattttgaaaagagatctctttccatttttcaaatttcatttcgcagcttttccctattttctttttatttttaattatttcaaacagaaaaccatattatatatatagagtatttcgttttgcaaaattagaaaatccaattcactcgtattccttaatctgaaagaaagattgagatttcagttgtataaactttgtaaagtttttgaagctgtaaaaataaaaataaaatttaaaagaattaaatataaggaaagtatccaaccaaaaagaaaaaatctctatgaaaatataagcctttaatgtgtaagtaacaaacttaataaaaggggaagatataagttttgtagaaacatatatctctttattaagtaatattatgaaaagagatgttaaaataggtaatgctacatactggcatccaacaaatacttccacatggctccttttttttatttgcatttgtatttctttacttatttagaaaaatatcaaattaaataaaaaagtagtatgtatcattttatttatatagttttattttactaaataatcaataaaaagtatactcgaaaataatacaaagagtagctactgtgataaaataaaattaaaaaataatccgtttattcttgaaatttatcacacaattttttaaaattgatatgacattaacaagtataaattatgcaacaatattattttaaatgagttaacatatatatgtctttaacttaattaacggactattcgcggggggaggggggggggttttgaacttataaattaaccgaaggttttttaaaacttagagattacccgcggtttttctaacgtattacctacgttttcttttgtccataaaaacaaattaacttatgttttatatgtggttttaaacttaaatttatatatatatatggtgtaaaagatttcaaataaaaagcacaacactaatttctaaacattttcaaaaatgactttttatttattaaaaaaataaaacacccaaattgccttgtgtcataaagttacaaaatagaataaatagtgggatcatgttttagtctctcacaccaccatccatcactaatcactaataaagctttcttctgctcaaagttggttgagccaactccttccgttttcttcttcctcaagactaatcagctgctcttctgcaatgaaaaagcactcaaaggagaacgctctcgctcttcagcaggagactctcgaccttgagaaccctgaatcctctcctcgttcctccggccggagctgttcctctgctttctcgcgtctggttggtctccgatgtctcatcgttttggtcctaagctgtgcgattcttctctctgcgatcttctggctattccctcgtcgatcggtgtctgaattcaaagctgatgggacagttaaactcaatggtaagcttcttacaacaaaaaagttgataacgttttggggatacatttcgtatgatctctcagtaactcaccagggttcttgagtattctgataatcactgttttggcaaaggttatacagaaattaagagaaccctttttgatcagtttactatgcttcagtttagttttgatctatagttgttgtttaaaggtggagactttaagtacagaagctgtctcttgaggcaattctcatttttatgcaaattctcatgacttcctttactgttcgaatttagttcttagtatgatagattgcgaaaagatcttgtatgatatacactatatctcaatgatcttagtccttaatgacttaaattttcttcttatttctcttaaaccagcttcagtacaagcatcctttagacttcaaaaaccagtttctgaagttgttcgccataaaggaaagatagagcatgatatccttcggagcataggtctttcgaacaacagcaaggtatacaaatatttctcgaaaaacttatgcaattaatctagtgttttgatttctactcttagaggtctaatatccatttactgctgaacaggtgactgttctgtctctgaatcaatcaggtgcatctaactacacagacgtggagtttgcagttcttcctgtccctcctgaccatgaaataagcaaacactcgttaagcttactgcgatcgtcttttgttaagctgtttgctaaaagatcgaagctgaaactcaccacatcaggtttcgggaagccaacttcttttcaggttttgaaatttcctggaggaataactgtagatccactggaacctgcacctgtctctggagtagcactggttctgtttagtgttactatcaaaacttcgatatcaacagtacaagataggctggatctgctaaatggtctatttgagcatatgttgtctttggagccatatgagagtgttcatttccaactcacaaataaacaaggatctaccatatcaccaccgctaacttttcaggtttatgttgctttcaccatgagaaaatatcttcatcagagattgaaccattttactcagatcattcaaacatcccgtgctaaaaatctcggtctagacgaggcagtttttggtgaagtcaaggatataactttctcaacatacctggatggcaaagttcctgattctgatttggaattggcaccagcgccaactccttgcttatcttctctgtgttgagccttactatgaagcttcttcttaccaaacttggcaaagcagtttctctttacctattttaggcacctaataattcttttggcaaggacgtattattaatgtttcttgtctaatatattagagtaggttttggcaggatctagttagctttagaactaattgtctcatcgagtttgtatgaaacaaagttctttattctaatgagatgcagcttgagtttactagttacttctttgatttagttgcttaaagtaatctattaatacaacagaaaatttcagattttgcatattgagtttatatagcctccctatggtttcacaaatggaatatcaccgttttctttgaatcgattaagctcttcctctagcatcttaattacttcatctttctctgcaagagtctccagcaatgttctattctctttactaagagcttgaaactggctgatgattccatctatctgcacttcaatggcttcatcactaagttcaaatgcagtctccacaacccgcagaacccgccacaagctcaccaccacgatgaacccggttcctttcttctcaagaagaacctggagaatcagagctacaatcgcaagagtaccatccattacacatccaggttgtttgaagaatgacttccccatagcaacaaccagagccatggatttaacggcgagaatgctcagaatcacggttcctccccaacgaaaccattcattttcggtttcggttttcttgactgatgtgcaggatagcagagaagaagataattcgagggacgttaagatgatgtcaagagagagcaagaagatggtgaaaaggtgaacttggtatgactctaggaagtttgataaagtgattctccattgttggttgatagagatgagttcttcttgttgttgttttggggagaagttgcagagttgcctccatttccgtcgtctgcaccaactcttgattaggttttggatcgagaattcgacattatcaactgttccggtgttgatgatgttcatcaaaagatgaaaagttttggaagttgttgatagatgatgatatgagctttaaaggaaggcaaccattttaaacagttttaggaaattaattatttttggaaagatggcttgaaaggcaagtaaggttgagatatgatacaagctttatttatttcttaagtgaagaaacacacttgccaaatctgaaagacaatcctattaacacaatttgaagataaaaattcaaactacaaatgaccaacagattttcaattaaaagttacatatatcaaaaatactgcaaataacgtaaagtttattacaagactattccgtctttgacgccatgaatgcagagagaattc

SEQ ID NO: 31 - DNA, 67673 bp, Arabidopsis thaliana
agttagctttgaaactaagaaccctaagttgatccaactggttcaaactcttctcgttaagtgagccggtgagattcaagtactcaagaacaagcttggagactcttccattcatacattctctaacaccttgccagttgcagagatctgttcctctccaagaaatcgaattagatggatcgattgaagatttcaagcttagtaaagcttcgacgtcgctagatctcgccggagtaaccaaacagaagaagactgtaaatgcaaagactacgaacgacaccgtactcgaagacgaagaagaagaagaagaagccattgtcgatgaatgatgaatcaatcaaatcagaaagagtggctcttttcctcagctcataaaagaaacagaaatgattgatacagttcgaaatcgagtttccataaaaagcatcccatgaatctcctcaaagccatcactttctattattaagtcactttccagatctgccccattatgctaaagcatctcgatcgaagcaaaaaagggaaaggtaaaaaatgaagaagaagaagaagaaagtgagagctctgctctactctgctctttaatggcggaaagaaatcttctggtagtgagcactaagaagagaagaagaagcattaaaattccccggcattttctctctctctcacttcactttctgagtatcttttctcgaagttcttggtcgaggaagatgtcatcacgtgaagccatgcctggaaaactttttttttgttctcactgtgacatcttcaatgcattcatgaataatagtagtattataaaaaaaattaataatgggtttatgaaggagagacgaaggagaaagagaaaaataattcacgtatatttttgtcgttattgttatggttgctattactttgccaagattcagagacagataggttttggggccaaggtagttactgctgctgagaaaatttatatagagattttatggtgaagtgtggtatggagcagaagaaatatggtgggaataattaattttagggatgatttatttaaagtaaggagagacattgtttttcaattttattcagttggtgtctggttcctctttgcactctctaccaattattgagctgcttttttttcctacctctttttcttgttgaatcttcacatggtttttataatatttttaatcgtattttaatatggacctcatgttatttatacaatgaggatatagattgttggatttttgtttgagaggaaagttaaagatgtgttaacattcatggttggtattcaatctctaaaacgaggatgttgaagtgtttattaaattaggaatttattagttgcttagcttaagcgtgatgaaaatgtaataaagaagaggtgagaattgagttcacgtaaaggctgagttaattattaaccagcggtccaccagtccaaacaccaacctcgcaaagagactgcagtcatttaatttggcatcaatattattgttgacttctttgaccttcaatgaatcatcaaggttttcgactttcgagtaataaactatagtacatttaatacgttttatatatttggttttacgttttttgataccagtggtgattctctagtttttgccgtttatttaggacattgttgattttcttacggacttatgaaatgaccatgtcttatagactttttaaagttggttactaaagattagactttgaattagtcctctttttcgattaaaccctaataccggatggaatttggagggaaagtttctaaaagttttggattctagttgactccatgactgtttgttttttcttactaagttttgactagttggttagtgtaatgggcccatgctattaaattaaatgttcaatattttgaggaatattatggtcctggccttttacaagagaatagcattataggtccatgggctgggtccatccttattataggtcggaaaacatttagggatcattctataagaatctcaaattttagggctcttttgcaattttaactgcgaaacgctttttttttttcctctctacacccaaattgaagggaaaaaaaaatctgcggatcctcgagaagccctatcaaacacataaagttctttctcttactcatctccgccgccggcagtaaaaatatcacatcgttagggtttcacggcggagattcaagttctttgacctaggaagctttcactatcaccggagactatttcaatggcaaccagtcagtataatcatcctctctgttcttcactaggacatagaattaatatttgcatctgtttattgacgatttctgtatatgtcgtgctaagtttcttccgtggtttatttctgcagtggctaggtcgtttctgcaggcgatatcgaaggatgaggcggtggctcctccgcttagagttgttcagatcgaaggactggtaacgtttcttagtgttccctgattttacggttttaagtgtttttcctcgttttctgctgaccgatggtgtttgataaataaaaactctctaggtgaagctaatttgcccattatcatttggtaggaagttgtgatgctgagaattttgtttgctattgtgataggctgtactaaagataatcaaacactgcaaggagttttcaccgacccttgtcactggacagcttcttggacttgatgttggtagcgtcctcgaagttaccaattgttttcctttcccggtatgttgatgaattttacacgcattgtgaggatttaagagcttgttcatgattgatgtacatgtgatttactggaatttgtatcttaaacgaggacaggtcagggatgatgatgaagaaattgaagctgatggtgctaattatcagcttgagatgatgagatgtctgagggaggttaatgttgacaacaacactgttggctggtaggttttttaatgacatcagtctgagttcacttgttaaattttttcttgtgaatgtatttagatctgcctaattctttgttcaggtatcaatctacagttcttggttcgtatcagactgtggaactgattgagaccttcatgaattaccaggtacttttttttttgttaaagaatcctgtctaccatgtcattataacattctagatttggtctgttcatatgttatgctcttcattcagctggaaatttatatgtatagcatggctactctagtgtatgataggtatattggcatgtgtaaaagttgaatgtaaattggatcatgaatatattttctgagactttttttgtccgcaactctgttacaatcccttgcagaatcatgatatgaactcttaagaaatgattcttctgcatctacaggagaatatcaagaggtgtgtgtgcatcatatatgatccctctaaagctgatctaggcgtcttagctttgaaggctttgaagctttcagattcctttatggagttgtaccgaggtggaaactttactggcgagaagtatgtatcttgatccattgaaaatctaggttttatgagccacttaggatgatagttgtaacgttttaatcactatctttttcaggttgagagagaaaaatttctcctggatggatatttttgaggaaatacctgtaagtctctagctttcttctatattgaattcttaccagctaatcttttcaagtcactaggttggaattgttacctaattatattttcctctgacaaaaaaagtggtttaaatgtttgttacttttcctttgacagatcaaggtttcaaattctgcccttgtcagtgcctttatgaccgaactggagactgatacacctgtctcacaggtacaatactactatctggatagtgatccttgcttgctgtcagcattgcagattttgactcttgatacttctgtattttcgcctttctagggcgattatgatcgtctacactcatcaaccactcctttccttgagaacaatatggagtttttgattaaatgcatggatgatttatctatggaacagcaaaaggtgtggtttcttctgcactcttgttcaattctcatcatcagaagtccgaactatcttaacgcaaaatcttaatttatttctccagttccagtattactaccggaacctgtctcgtcagcaagcacaacagcaagcctggctccagaagagaaggtaggtttatattttctgcagaacctttttgttctagttcaggtttgattagtttcactacctcgttatcttggaaggtgatacaactttacttacgagagttgtgaatgccttgtaacatttgtcttcagcttttccttgtccttttgatcttccaactaatgaaagaggtgtttggtttatagaacggagaacatggctcgtaaatcagctggagaggagcctttaccagaagaggatccttcaaacccaatctttaaggcgatccctgaaccatctaggctagagagtttcctcatcacaaaccaagtctcaaacttctgtggccaaatcaatgggtatgttcctctttagtattgtttcaccatttttggagctttgaaagatacttaaaatgagtcgacctgttgttatgcagagtggctggccagaacttcagcaggctttacctgaccaaagcattgcacgacaactgattgcaaagactacccaagtttttgttttttgagtcagaaagtgaaagacttggtggtagaatggatcctatatttgtttttcgtggatgtttttgtttttatttttgttgttgtgaagtaatttaatttacaagcttttcaaaaaaaatctttattcttatgcataatgaaaaattattgaagttttgaaagatttatcttgtattggacctctgattgccttacaacaaattatacatagttatcaaaatcctaatcaaaagagtaaaaaatctaatttatagagattttattatagttgtagtgttagttccatcgctaaatcccttgaacgacaacgtttattatttcttcttcggacgattgtttgaagaaatttaaaaacgacatctttttattacttcctcttcgaaagattgtttaccaacaagaacaatggcggtttatcatctccttctctcgagcccaccttcgcttcttcttctccctccttctcctcgccgccctaacctcaccttaatccgccgtatcccagctcatcctcgcctcggaaactcgaccagcttgctttcttcttcgtcaccggtaattcggaaaattctggttcgtagcactctccgggaagaccaacccatcgcctctgactccgagagtagtcctactctactgatcggtgaagattctgctgcttttgaattagggaaacagaagcttgtttcctgggtttatttcggtgttgtccttggagttgttctctttatcctcaatgttgtttggatcgataattccaccggtttcggaaaatcattcatcgacgccgtctctaacatctccggctcaccggaggtatagatcaatttaacagtaactgaaccagtttcaatttcagttatttgattgttaaaaaccacttgtttttgcaggttgctatgttaatgcttatccttatatttgcaattgtacatagtggtttagctagtctaagggatataggagagaaacttataggtgaacgagcatttcgtgttttgtttgctggaatctctcttcctttagctatgagcaccattgtgagtactctctcttctaactctgcaatttttctcctgatcaatggtataaatacctgtttgatgtctcttatggtctatgcaatgccttgttcttctttcaggtttactttataaaccatagatatgatgggtcacagttatggcagcttcagggtgttcctggagtccatgaagctatttgggtcgctaattttgtatccttcttctttctctatccttcaaccttcaatcttctggaggtagcagctgttgacaaaccgaagatgcatctctgggagaccggcatcatgagaatcactcgacatcctcaggttttgaacatttccctaatgtgcctaaacatgaagacaatttccttcatttttgtgtttcaaaaatacagaaagattggatttttatgagccaaggtttattagtggctgtgttaatgagacccccaatcattgaatcaattatgggcaggtattggccattgacttaaatacacccattacatcagcacaatcaaatctcctcatccttctatgtttattacatcaatgcttgattactttacttgatattgcttttgatcttaaaattcttatccaattgcttcatcatgtgtttggaaaaacttgataatatatagaaagataggcattttagcttcagttttggtttgttctattctctcttcattatactggctttgttaatgagacttgattgttgcacctctctcctctgatcttctccagatggttggacaaatcgtttggtgtttagcacatactctctggatcggaaacacagtagctgcatcagcttctctcggtttgattgcacaccatttgtttggggcgtggaatggagacaggagattggcaaaaagatatggagaggattttgaaagcatcaagaagagaacaagtgtgattccatttgctgccattttcgaaggacggcaagttttacctgaggattactacaaagaatttgtcaggttgccatatcttgcaatcactgcgttaacggttggggcatattttgctcacccgctaatgcaaggtgcaagctttaggcttcattggtaaattatatgtcatgctttaggcttcattggtaaattatatgtcatttatgtttgtttgtttcctgcagtgttcataaagacttgttaaggaacaaatgtatacaaaaagccatattgtttgtgatacttgactcttcttcatttctcgattattttggctcaacactctgtaaccactatgtgtgagttcgatccaacaagtgggtttagattagtattaactaggaatgtttaatagtactgctaaatgaatatttaggtaaaactattttgtatataaattcccactcagatgtcatgggtcactctgacgcctaccactatactaatagaagtaaatttttcttttttcgatgtttagttacaatcggaaaatgaatctaaattttaactaatattaataatatgccaagatctccatccaaatctagattgatatctacatattgatgccttgatatctctaaactctaaagataaacttaaaggcaagtgattaattgttaactaaaattaaaaattaacaatacaattttaattcgctagttataaaaattttattaccaagaagaatatggaaaaaaaggaattggaggcaaaaaaaaaaaaaaaaaaaaaaaaagaggccaaaagaaaagaaagcaaaggagtatgaatacaacaaagaggttctgcaagaaacaaacaacacagccaattactactaaacaaacacactctctctttcattctttctctctctctctctctcgattttctcccattggagttcgcaattagctgccactctctgatcgatcttcttctcacatcacatcctttataatcttcagttctactgctcggaggtgtttgcttgcgttctctcttgtcggtcacatccctaattaccatcactgcccctgattaaagttttactctatcttctttgttgatgccaaatctgaggtgggtttctcatctttttattctttcagctgtgttttgtttcatttatttgtttctggatttgctaaaaccctaaatttgatatctttgggggcatcatcgtagctcaaatcagcttcaattatcaaatctccacgaatgattccaatggataatcactgcttgccaagtactagcaccaccggtcttgtattcccgaccaattacggtgttaatgcgattaacgcttcctccggttttcacccagctgtggatgcttcgggttcagtggctgcaggagtcaaacaagaagctgctttggttatggattggtccgttgaggaacagtatgttttggagaacggccttgcaaagtaggtatcttcgtttctgcttaattctttggatatttccatttcttatttttttaatatcctaaatgtgtctttgttcattcgtagcttttcaaactatgcttatatttttacaataacaatacataaaagttgaaatcgggaattgttttatcagaaaagtagtagtgggaacattatattctcaatggtggactattaaagtatgttcctttgttccttctgattataaaagtatcgcctttgtgtgttccatgacattgttttctgggactgggaccattagtaagttcgggttaagttatcgattttctagctgaggttgttcctggttactttggttttctagagtctgtagcttgtttgttctatttgtttgcatttatgacatctttattttttttccgtttgtagattaaaagatgaacccaaaatttcaaagtatgtaaagatcgctgcaactctaccggataaaactgtaagggatgtagcattgaggtgtagatggatgacggtaagttggttaagcttccttgagctatgtgcatacttcctgttgtttatgtgcttttgcttagatgacaagaaaaattaccactctagacgtctctcaaggatatttcttttgctagggaattacttagttgtctctagcattccttttcaagtggtatgtggctgttatggaaggatttttgttgaaggatatttctgtcactgttaaaagcatatgctaaatatgagggaatcagcatgatgatgcaatcttgcgtgtgtgctttgtgataaagataaagtcctacaaaaaaagctagcggttttattgatgaaaagtcattgacatgtcgtaaagattgtctaaacactggtaaaggacgagcaaaaagagaaaatgacaagtattgctgacgctagattagtctttatattagctttcgagtccatgattgtggaggaattattggaaaaggaaataagcctaacgctttttgttaattatttctgtagttatcctcacatagattttacttttacgggtgatggctgagactgatccctatacttttatggttttttttttaaaatgattatattgctcgcagcatgagtttacatacatcataatgttaattgtttgcataataatgaaatgaattaatgaagtacaaatgtacaatgctttattatcatcatatttccatctccttcatgtctctgtcctttcataattgacttgagttttcaatcagatatatgatgtaatcaaacataaagctgcaaaattactccgttttcttttaatttagtgcttgtttgccaccagatatctatcatggtctttaaagttctcttggctaagtcgggtatctattttcacagagaaaacggaggaaacgagaggataataatgccgctaagaacattagcactaggaaggtatgcttgcccacctcaacctttcttgtgtcgtatttaccagttaataagtcgatggaggtaggtgcctcatttacgttttgggttaaacgggattttcccacagatgtgacttttattcatgcaagtctgagctaacgatggtatttttcaacgaagaaactgtaattggctaaattgcttgtatggtggacttttcatgagaacatattttgttagttcctgactaagaaaaaggactgtctgcatgactggacaatcaataaagtttgtgatcgatttttcaatgactgacgagcagcaaatgatgttgatccaactctgcagaagtattagcatatattacttatgagtatctgagcttgtgggcatgtttataatgataattataaggtaatctagtgattgttatgacatttgataaagggttagtgtgtgtgtttcatttcatgcacattctccttcctgggtcttatgaacttctgtagatcaatatgcttttaaacttggttctaaagaccatgcttcttcatggtaaggtggtggatacatccccagaactgaacatgctatccaatgtgccacaacaaaatgctttatatgtcctgaacaatatgtgccacagtacacgcacgcctttcgaaggtctagtgctcttttaattctttgctcttcttctgggttgtgtggtcttaaaaataaacaaaatcaaattgtcagctaggtacttttgttgaactattcgcaggtttaagtgacgcagtaatggatcttctacagcaaaatgctcaagcttttagtcagatttcttacaacctctctgcgtgcaaggtaatttatacttgcaatcctttgtggctagttgtgcgagaagattgacagactgaaactgtcatacaagtttgatcaaacattgtataccagatttcctacatgctcagttattctttagaaaataatttgatactgtttccttttgcaaagtaattcgcacatagatatgctaacttagtgcatacagctgcaggataacatcagtctctttcatcaggcaagaaacaatatcagcgccattttgactgagtatgtggatctaatactaattcaattttcacaattgagacatctcatctgtcttcctttctataatttaaaccttcaattgctaaattcttagtttcttctgcagcatgaaggagatgcctggaatcatgagtcggatgccggctctaccggtttcaattaatgatgatcttgcaagcaatctattgtcgagtacaacacaggtaatatattttgctacatatgtcaaaatagctaatcctgaaaagttcgccatgtgacctcaaataattagagcttcttgacccaaaaagtgaaacatattaagatataaatatgaacatagaaaccattaatgttttttagttttattgatctcttgaggatttctcttggaagctggccatgcctgatgtttagtggattgtttccctgtctcacagccaatatcgtacaacattccaccaagcatccacctgaagcaagagccaagaagttgatggggaaatccggattttgaccgatactaaagtaaatagtacaagagcctggtacgtggcagtatttccgtggacgacatggcaatgtttatcaactgcagacaccgcttcagaacatgagattcaacaatcagtattggtaaaatccttttgccctcgggtaatttgacagagaagaatgaattagactccttctaaagccaaggtaaaactctttgatacgaacaaaatgctttggccgtaattcgatcataggattccttgcaattcgtagaagacggcataggttgatagaactcaaaagtcttttgctgtaatcttcttgttgaggcttaaattagtatagtgacagttcttttgagtggtattcagaggccggttatgtgtaacacaagttctagttaaggtaataatttatcatcctctaggtacgtatacgttatcttcatggtttaagtcgtgatgtgacacaaatcattgtatatacgcattgtcacctgtctcaattcattgttataatgtttgcagaatcttcagtccttattagagatttacttttaaaaagtttcattaatttcagacagaaacagacaaacaataatgtagcttaaagacgatgatgaaaagtagttcagaacatagctcagcacgatggcagagtaaaactattacagatggtttatgaagtccaagaagacagtggtggagtttcagaattcttgtaagtaactatataggtggctgacctttcccctttcacagaatcgggatgtcccatggcgtcaagctcggccatctcttcgatactgagtttcacagataaagctcctatgttctgattaaggtttttgatcttagaggttcctgggattgggcagacatcatttccttggtgatgaacccatgccaaagctaattgtgcaggagtacagcttttcttctctgccattgcattgaccttctcatagagaatcttgttgtggtctaagttctcttgctggaatctcggtaaaccctgaaattaagagatggtgaatgtgcttaatactcggctcttttcttgaatgtacttaaaagagatggtgaacattcatatagtgatggacttgcctttctgtagtcaccattgtccatactctcaatgaattttggtcctgcagcaaagaaccccagtcccagaggactgtaagctacaattccaatcccgagctccctggagaaagtaatgcaaagaatgaacattacaagaggaggatataaaattatatcaaggaagagggatgtttgcggaagattctgcacctgcaagtaggaatgatgtcttcttcaacgtctctcgaccataaagaccattccaactgcacagcggttagcgggtgaacagcatgggctcttcttatagtcgaggcacaggcttcagacaaaccaatgtactttatcttaccctcttcaactagcttcttcagttctccaatctttgaaatggcaggacaagacaacaccataacaatcagctgaaggattcaagaaagaagaaagattgccaagaaaaagcttacagtgacttcaatggggacagtggtatcgatcctatgctggtaataaagatctatgcagctaactcctaaacgccttaagcttgcttcacaggcagctctcacataggctggatctcccctgtaacccaatttctgatctttcaagagaagcccaaatttggttgccaattccaccttctccctcatcccatctttcaaagcctgattacattcacatagccaagcaatttcaaatcctaggcaactcaatagtgtatgaacaaacataggatatctcgaattcaaacctgaccaaggagcaactcgttggtctcaggaccgtaaatgtcggaggtgtcgaggagtgtgatgccggagttaatggcatggtgaatgagagcaatgagatctgtctcaaccttggtagttccatcgaagatggaaagtcccatacaaccaagaccttgcgctgacacttcaagaccttggcttcctagcttgatcctacgcactccacttgcagctgccatggattcaaatctctccaagtttttaaaaaaattctcacacttttgcaatcagtaaaagagagatctaatttgctatcatagtcaatgcaacaacgaaatggaagtcttgagaaaaaaggctcaaaataaagttgtccacgttgaactaataataatgaattctctctgcattcatggcgtcaaagacggaatagtcttgtaataaactttacgttatttgcagtatttttgatatatgtaacttttaattgaaaatctgttggtcatttgtagtttgaatttttatcttcaaattgtgttaataggattgtctttcagatttggcaagtgtgtttcttcacttaagaaataaataaagcttgtatcatatctcaaccttacttgcctttcaagccatctttccaaaaataattaatttcctaaaactgtttaaaatggttgccttcctttaaagctcatatcatcatctatcaacaacttccaaaacttttcatcttttgatgaacatcatcaacaccggaacagttgataatgtcgaattctcgatccaaaacctaatcaagagttggtgcagacgacggaaatggaggcaactctgcaacttctccccaaaacaacaacaagaagaactcatctctatcaaccaacaatggagaatcactttatcaaacttcctagagtcataccaagttcaccttttcaccatcttcttgctctctcttgacatcatcttaacgtccctcgaattatcttcttctctgctatcctgcacatcagtcaagaaaaccgaaaccgaaaatgaatggtttcgttggggaggaaccgtgattctgagcattctcgccgttaaatccatggctctggttgttgctatggggaagtcattcttcaaacaacctggatgtgtaatggatggtactcttgcgattgtagctctgattctccaggttcttcttgagaagaaaggaaccgggttcatcgtggtggtgagcttgtggcgggttctgcgggttgtggagactgcatttgaacttagtgatgaagccattgaagtgcagatagatggaatcatcagccagtttcaagctcttagtaaagagaatagaacattgctggagactcttgcagagaaagatgaagtaattaagatgctagaggaagagcttaatcgattcaaagaaaacggtgatattccatttgtgaaaccatagggaggctatataaactcaatatgcaaaatctgaaattttctgttgtattaatagattactttaagcaactaaatcaaagaagtaactagtaaactcaagctgcatctcattagaataaagaactttgtttcatacaaactcgatgagacaattagttctaaagctaactagatcctgccaaaacctactctaatatattagacaagaaacattaataatacgtccttgccaaaagaattattaggtgcctaaaataggtaaagagaaactgctttgccaagtttggtaagaagaagcttcatagtaaggctcaacacagagaagataagcaaggagttggcgctggtgccaattccaaatcagaatcaggaactttgccatccaggtatgttgagaaagttatatccttgacttcaccaaaaactgcctcgtctagaccgagatttttagcacgggatgtttgaatgatctgagtaaaatggttcaatctctgatgaagatattttctcatggtgaaagcaacataaacctgaaaagttagcggtggtgatatggtagatccttgtttatttgtgagttggaaatgaacactctcatatggctccaaagacaacatatgctcaaatagaccatttagcagatccagcctatcttgtactgttgatatcgaagttttgatagtaacactaaacagaaccagtgctactccagagacaggtgcaggttccagtggatctacagttattcctccaggaaatttcaaaacctgaaaagaagttggcttcccgaaacctgatgtggtgagtttcagcttcgatcttttagcaaacagcttaacaaaagacgatcgcagtaagcttaacgagtgtttgcttatttcatggtcaggagggacaggaagaactgcaaactccacgtctgtgtagttagatgcacctgattgattcagagacagaacagtcacctgttcagcagtaaatggatattagacctctaagagtagaaatcaaaacactagattaattgcataagtttttcgagaaatatttgtataccttgctgttgttcgaaagacctatgctccgaaggatatcatgctctatctttcctttatggcgaacaacttcagaaactggtttttgaagtctaaaggatgcttgtactgaagctggtttaagagaaataagaagaaaatttaagtcattaaggactaagatcattgagatatagtgtatatcatacaagatcttttcgcaatctatcatactaagaactaaattcgaacagtaaaggaagtcatgagaatttgcataaaaatgagaattgcctcaagagacagcttctgtacttaaagtctccacctttaaacaacaactatagatcaaaactaaactgaagcatagtaaactgatcaaaaagggttctcttaatttctgtataacctttgccaaaacagtgattatcagaatactcaagaaccctggtgagttactgagagatcatacgaaatgtatccccaaaacgttatcaacttttttgttgtaagaagcttaccattgagtttaactgtcccatcagctttgaattcagacaccgatcgacgagggaatagccagaagatcgcagagagaagaatcgcacagcttaggaccaaaacgatgagacatcggagaccaaccagacgcgagaaagcagaggaacagctccggccggaggaacgaggagaggattcagggttctcaaggtcgagagtctcctgctgaagagcgagagcgttctcctttgagtgctttttcattgcagaagagcagctgattagtcttgaggaagaagaaaacggaaggagttggctcaaccaactttgagcagaagaaagctttattagtgattagtgatggatggtggtgtgagagactaaaacatgatcccactatttattctattttgtaactttatgacacaaggcaatttgggtgttttatttttttaataaataaaaagtcatttttgaaaatgtttagaaattagtgttgtgctttttatttgaaatcttttacaccatatatatatataaatttaagtttaaaaccacatataaaacataagttaatttgtttttatggacaaaagaaaacgtaggtaatacgttagaaaaaccgcgggtaatctctaagttttaaaaaaccttcggttaatttataagttcaaaacccccccccctccccccgcgaatagtccgttaattaagttaaagacatatatatgttaactcatttaaaataatattgttgcataatttatacttgttaatgtcatatcaattttaaaaaattgtgtgataaatttcaagaataaacggattattttttaattttattttatcacagtagctactctttgtattattttcgagtatactttttattgattatttagtaaaataaaactatataaataaaatgatacatactacttttttatttaatttgatatttttctaaataagtaaagaaatacaaatgcaaataaaaaaaaggagccatgtggaagtatttgttggatgccagtatgtagcattacctattttaacatctcttttcataatattacttaataaagagatatatgtttctacaaaacttatatcttccccttttattaagtttgttacttacacattaaaggcttatattttcatagagattttttctttttggttggatactttccttatatttaattcttttaaattttatttttatttttacagcttcaaaaactttacaaagtttatacaactgaaatctcaatctttctttcagattaaggaatacgagtgaattggattttctaattttgcaaaacgaaatactctatatatataatatggttttctgtttgaaataattaaaaataaaaagaaaatagggaaaagctgcgaaatgaaatttgaaaaatggaaagagatctcttttcaaaatttgaaactccgccttccgtctctcttcacgcgccaccctctctctctctttcccccttacaaataatacccaaatccctcactctctctatccctctccccagattgacattttcccaaagtcttgagattttgaatctctctctttcacaagattctagttcgacccagattcattcagtaagaatctctcccaaccaaaaatctatttgctttcttctgttctacttgggttttgctgtttcctcacctgtgctgggattttatttaccttgagtgtccctaaggagctcgattttagggttaacccattaagaattgaagatgaatatctgtttactgtttatgttcctttgctttatgtttctcttccaaatctgtaagactgtaacttgatttttgaaaatctgtagatttgcttgtcttgtagatagttatgcaatgtgggttttcgtctcttcttctttgtctatcgattataacatttgtagctattttcctgagaaaatgtcatcctagggttgcttgattctatctgctatttgggtaatttcttattatcatacgagcggctcaattttcggatctcaactgtaatatttgtgtggatttatggctcttgaatgtttctcaggtcaagatctactaggcattaaaatgtgcattacactgtcgtcgcgttgcatttattaaatcatgggtgatgtgaaattttggggtttaagctttctcatgtttgtgatattcatggattgattatgcccaagcataaagatgaatactttatttcattttacgagactgtgtgtatattattagtgtgttcattagctgactaccaactgttcgatgaaatgtctcagtcaaatggactctcttcctgatgcgatccttcaatacattctttcctacctgacttctgcaagggatgtggctgcttgcaactgtgtctccaagcgatggaaagagtctacagactctgttaagagcgttgttttccacaggaattcattcgaaagcatcatggagactgatgattctgactccatcgttcggaagatgatctcttcttctcgtcgtcttgaggagcttgtggtgtatagcccattcactagcagcggcctagcatcttggatgatgcatgtgagttcatctctaaggctattggagttaagaatggataatctcgctagcgaggaggttgttgtcgaaggccctttgaagcttgattgcattggtgtggccaagaatttggagattttgaagctttggggtgttttaatgatgagccctcctaagtgggatatgttcccaaaccttcgaagcctcgaaatagtgggagcaaaaatggatgattcctcactgtctcatgctcttcgtgcatgcccgaatctgagtaacttgcttctactagcttgtgagggagttaaatccatatcaatcgatctgccatacttggagcactgtaagctggatttctatggacaaggtaacaccttgctagtcctcacgagtcagagattagtgtcccttgatgttcaaggttgtagctggattcgtgtccctgaaaccaaattcttaaagaacctatccatctccagtgttactggtaatgagtcttgagttttaacttgtttcgttcttccattaccatctgcagatctcatttgtcttactttgtctctgattggttaacagggagagtttacatggtagatttcaataatctttcatcgcttgaggccttgtcgattcgaggtgtacaatggtgttgggatgcaatatgcatgatactgcagcaagcaagagacgtgaagcatctctttatgaaggttgaattcacaggcaatgaggctcttcaacctttccctgagattgattttgtcgagttcttcaataaccatccaaagcttcaaacattcgacatccatggagcaatgttcgctgcactctgccagaaaaacagccttaagaaggtaaaaataatctcttcttcatcagaaaccttccttaccgatgaagtcaaagcctacttatcaataatgtaacctccattctctttgcagcttgagaccggatttacaataccgtgtttggaggaggttgttatcacagtgagatctccactgaacgcagaacagaagatgaacacgcttgaatcactagtgaaatacgcgagaggtctgaaacgaatggtgataaggattctccggatgaagagcaatcacagcagtgcagatgatttctgcgatgatatctgcaagttccggcacatgaacgagcatcttgttcatatagaatgaaataattttttgctgctaatcttattttcagccatttgatttctgtttctctttctggtcgctgagcatttcttatattgaactcttgagtaattgttgtttcctgattcatggttatgatgaacttatgacaattgttttttaaacgaaaaattatggacacatttcttaattagctttcttgttttcttaatctacattaataatatactagtagtgatctagcagaatataattacagtttatgataaagtttgtttttggagtatacttatgtatcaaagaagtattgtcctatgcttaaaaaagataaaagaagataatctccttaaaacaagataaacctcagattgcattacattaaaataaaacgagaaaacgcaaaacgcgcaccaccaacaatttcaaaaccaaaaaaacttgtctatatataacgtgattaactcctgcattgaaaaatgacctggtgataatttcttctcaattcaaatacataaataaatatcaataaaatggcgggccgcgacacattccagctgcgttttgcagcagtcgcggcatccgccgccgtattgatctttctcatggctggtcaagtcgcggagtcgcgtatgatcaatatctgctctcacaccgcgtatccatctttgtgccgacctctggtgaaacgtgtcacgagccctagaaaagccacgcaccgaaccatccaagctttggaggctaagacgaaactagctctagccgaaacagctaggttcaaaaacggtaaccaagcggtcagcacgtgttacgagacattgggcgacgcggtttacaatttggcaagcgcgagaaagagcataaggaaacgtgatgtgccggcgatgaacacgtatctaactgcggctgtgtctgattacggtgcatgtgtggacgggttcattgaaacacaacaggttaatgcgatccaaaatgcagtggttgacttgagaaaaattagcagcaattgcttggcgttgtctacattgattagatgatcgatttaagagaacaattgatttaatttttctcaaaacaaaaactaattaattgaagaaataaaaaatctcaagcaattaaaatttgggtttctttttgttgtttttgttttgagagagatgtttgttgttgatccatcattcgtatgtaacgccactgggtgtaactaattatatttgaatttcgtgtaattaataatcgctagtagattttttcatattcaacaatttgccgatagaaatgttttccattctcctttcttgaacccactttactttttcactatcaacaataagattaagttttgaccgaaaaataaaacaataagtgacaaagacaaacacaaactatagtaatgcacaactttttgttttgttaactactatcactaattcattattgatatggatatcattatgatgtttttagaaagtatatgtgtgattatgttttacttttcccaggatccataacaaaaaaatatctttgagaaaataatttggctatatcatatattggataaaaatattgccatttaaaatggtcttttaactctttttcttaaaatctgtatgtatattatagtttgatatgatcataaaagcattcaataatttttctttcatgcaaaactgatagatcttgctcaatgatcatgtttcaatgtctttaagtgttttaagaaagtgagaattgctttgatttggattgaaaaatattggaccataataaacacacataacattatacaaaattatcctttgcttctatatttaacatacattttgttttccacaatgtgtaaaactctctatagaagaaacaccacacaaaaacaccaaataaggtttagctaggatataattgacatgattgaacaagtgggcttgggatatatatcactacaagaatagaaagataaacaaaaatatcttctgcaattcgtggtttgtgaacacaagagaaaaaaaaaaaaaaacatgtcgaccaataaaaaaaagatacaagagaacgaagcataaaaatatcaaaacaaaaagacaaaaacaggaaaatagaaaaaagaaagaaaaattaaaaaaagctaaaatcaacggtgagaagattctgtatataataagaaaatatcacccaaataaaaaaaaaaggtggagtccacagataccgtccatcaacgtatcactgggctctctttctccgtgccgttcctcctacgtgctcgaataacgatgtgccacgtggtggaatcgaaggataaagtgtcgttttttacttcgattacacgtgagtgtatgtatgtgtgagtgagtgaagaagaacaaagagcgaagaaaccccccagcactcacttcatccataagatcattcaaattctgggatcttctctctttctctcattgtattcagtttcttcgtctcggttcgatcatcaggtatctttttcaattgaattttaccttcaatttcgattgctttcggtgtttttgttatttgattcaaattgcaaattttcttttgatagatattttcgttttgactataaaagacgattcttttcttcttagtgtatattgcacatgttccattcgcagaatgaagtaactgtttctctacaaagtgaaaataaaataaaaataacaagtgtggttctcttgtctaactctgtcagattcttctttttgagacaaatagtataacttgttccttttttttctcatctattgcaaaagcttcattgttttccttattatcttattatataatctctactttacttaacagatccggcaagtttgattcagtgacaagaaagcatgagtaactctgtagtgcataacttacttaaccggggtttgattcgtcctcttaactttgaacatcaaaacaagctcaactcctctgtgtaccaaacttcaacagcaaatccggctcttggcaagattggcagatcaaaactttacgggaaaggtcttaagcaggcaggacgcagtctggtcactgaaacaggaggaagacctctctcatttgttccacgagctgtccttgccatggatcctcaggttattttcttatggatttacttttcaccactattgacattgtttggaatgtgatattttggttccaactactcaatgtatgttagacgtttcatgtccaaaactttttcattgacctgaatcatatgcattgttcttccaattgaatgcataagatagttattttatcgacatgtgtgctaaaaagtttcatcctttaacaggcagccgagaaatttagtcttgacggaaatatcgatttactggtaagtatatccttacaaataatggaaatttctatcttgttggcatttgtagacttaatggtaggttttatgaatgtaattgaataggttgaagtcacttctacaactgtaagagaagtaaatatccagatagcttatacaagtgacacattgttcctacactggggtgcaattcttgacaacaaagagtatgtccttgtctagtgatgttcaactttcctaggtaatagcttgttatggcacatggtatagttaactatctttcttattttccatgtcagaaattgggttctaccttctcgctctccggatagaactcaaaacttcaagaacagtgcgcttagaactccatttgtgaaagtaagctttgaattcattcttcgacgtacattacagcgctacttgtgatggtatgatttccagctgataccagtacaacttaagatttccaaatgatgctttgagttcttatctgcagtccggtggcaattctcaccttaaactagagatagatgatcctgccatacacgctattgagttccttatatttgacgaaagtcggaacaaatggttagcttgttttcgcttcttcttacttactaagcctgagcagagaacctaattctgtttacaatttttgtcgtttctcataatctaaaacatatgcaggtataaaaataatggtcagaattttcatataaacttaccaacggaaaggaatgtgaaacaaaatgtttctgttcctgaagatcttgtacagatccaagcatatcttagatgggaacgtaagggtaaacaaatgtacaaccctgagaaagagaaggtcagtcagacgttgtacctatacaagcatatcttcaaggattatttttcttcatatatttttaaattcttcaccttttatgttgttctacaattcacataaagaggaatcatgattctcaccagccatttagttgattccatcaccagtacaaatttccaacaattttgatttagatgcagattctggtatattggactgatcagcaaattgatgataggttagctaagttgaaaatgctcttgattgattttttggtaatagcgttttagttggctctggtggctcttgaaaatatatttgttgctttatctgatgaacctgtatatatctcagttgcatcaatatcaagttctctgcatttttgtgtaaatccattattttatagctaagcagaataatttgtctctgatcaataggaggagtatgaagccgcccggacggagctacgggaggaaatgatgcgaggtgcttcagtggaagatctcagagcaaagctgttgaagaaagataacagtaatgaatccccaaaatctaatgggacatcatccagtggacgggaggaaaagaaaaaagtttccaagcaaccagagcgtaaaaaaaattataacactgacaagatccagcgcaagggaagggacctgactaagcttatctataagcatgttgctgattttgttgaaccagaatccaaatcctcatctgaaccacggtccttaacaactctggagatatacgccaaagcaaaggaggaacaagaaaccactccagtctttagcaagaaaacattcaagcttgaaggcagtgcgattttggtcagttgatagcatcactatcttgctctcttttttatttctattccggttagatatacatccatcagtatcttctaatgccaagttattactccctctaaataggtgtttgttactaaactttccggaaagacgaaaattcatgtggcaactgattttaaagagccggttacccttcactgggctttgtctcaaaagggtggagaatggttggtaagataattcttctttatttcttaaacaagaacatactttaacatcagctccttctcaatcggatgtctggtctggtctcatttggtctgagtttgtgagtcattgacactgcaggacccaccttcagatatactgccaccaaactctttgccagtacgtggtgctgttgatacaaaactgaccatcacttcaacagatcttcctagtccggtatgacaagtcgaatctattaatactactataagtctactagcatttggattcagagatggtatgtaaaagctctcatgttaaccaaaaatgtaggttcaaacttttgagctggaaatagaaggtgacagctacaagggcatgccgtttgtactcaatgctggtgaaaggtggattaaaaataatgacagtgacttttatgtggactttgctaaagaagaaaaacatgttcagaaggtttctcttccttcttggtcttttaaaattcgctttcaattgcatcttattgtcccctagaggctgaatctttaattgttccttttgaaaggattatggcgatggaaagggtacagccaagcatttactggacaaaatcgcagatttggagagtgaggcccagaagtctttcatgcatcggtcagttttatgctcaatcatcctggttcttagttcatgtttcagacttcgagaagcttaatccatatatgatgatcacttatacaaattagagtcattcatccatatttaatacattgattgatccatgttctgtgatcaccaaatttatattcccagtgatacatctcttttgtgcatgagttgatttacaacttccggaactctgatatctgaaggggtggatcttgccattttttttcttttctagattcaacattgcagcagatcttgtggacgaggcaaaaagtgctggtcaactgggctttgcagggatcctagtctggatgaggtttatggctacaagacagcttgtgtggaacaaaaactataatgttaagccaaggtacagttcaaataatgtgacattaattggaagtttagactctgtccacctttcttattcggccccaagggaaatattagcaaaccttatgggagtcttataatatgttttgacatctgaaaatgatatttaaataaatatacagcatcgtttcagtaattttcacaccaatttactgcagggagataagcaaagcgcaggatagactgactgaccttctccaggacgtttatgcaagttatccagagtacagagaacttttgcggatgataatgtctactgtaggtcgaggaggtgaaggagatgtcgggcaacgaatccgtgacgaaattctagtcatccaggttggtctttagatttcttattatctgtaaaagattttacttccgaatgaacaatgaaggaaataagaagagaagctctacatgaagaaattctaaaattccagggttggaactctatttcttgaactttctgggactgggtccctattactcctactgtcccacacctctttaaaataaagcagagttgtggccgtgttggtcatgtccctcatttgcctgcgacttctatattcatttgaaatatgatgagtgaacttcttgcttgcagcggaaaaatgactgcaagggtggaattatggaggaatggcatcagaagttgcataacaacactagtccagatgatgttgtcatctgtcaggtatttgaaattttacccttctggtaccaaactaccaatcttaatctttctctgacacttttcttattgtaggcattgatggattatatcaaaagtgactttgacttaagtgtttactggaagaccttgaacgataatggcataaccaaagagcgactcttaagttatgatcgtgctatacattctgaaccaaattttagaggagaacaaaaagacggtcttttgcgtgatcttggacactacatgaggactttaaaggttacttccccaagtttatgctagccccttttatgagtctagctacatctttctttggcaaagttggtctgatttcctctttctccttttcttactaagagaaatcatttaacttgtggccttctttattttgtctaggctgttcattcaggggcagaccttgagtcggctatacaaaattgcatgggctaccaagatgacgtaatgccgatatactgaaaagttacagttatttcttcttcttggaattggcaactgaacatttgtgttgtccttcagggtgaaggtttcatggttggggtgcagataaatcctgtatcaggattgccttctggatatccagtaacttttctctcaacttccctactcatctcaagaatttaatacacctgttaaatcagtccaacttaaactgtgttggcacttccctcaacaggacttgcttcgtttcgtcctagaacatgttgaagaaaagaatgtagagccacttcttgaggtgaaatgttttcataattactaggtcgattttatttgtactgttaatttgacttctgtgaatcgtagacttaccatgggaaggaatattgatgtagggtttgcttgaagctcgtcaagagctaaggccacttctgctgaagtcccatgaccgcctcaaggatctgttattcttggacctcgctcttgattctactgtcagaacagcgattgaaagaggatatgagcaattgaatgatgctggacctgaggttagtagatttattcatcggcatgatagattgttcctgaacatcatgtgtcaacagttccatattctcttttgttcttggcttttcatttgttgttccagatattattctcctagtcgtatttaatgttttcttgttgcagaaaatcatgtacttcatcagcctagttcttgaaaatcttgccctctcttcagatgacaatgaagaccttatatactgcttgaaggtgaattgaatatcagtcaatttcctatgtttgctttagaacattatttcatcaaggtttattagcattcttggcttccttcaatgggtctaacttagctttgccactcgcatagctaggtttaatacagaatttagatccctctactctgtcctaatggctggtccatggcctaacacttgaagaatttcgagaagatgcatgatgctattctactgctttttcagggatggcaatttgccctcgacatgtgcaagagcaaaaaagatcactgggctctgtatgcaaaatctgttcttgacagaagccgactagcactggcaagcaaagctgagaggtaccttgaaattctgcaaccatcggctgaatatcttggatcttgtcttggagtcgatcagtcggctgtaagttacatttcctgtgactgaacccgtcctcttttttcatccataacttattaatgtccctggttttgatatttcattaaaactctttaccaggttagtatatttactgaagagatcattcgagctggatctgcagcagcattgtcgtcacttgttaaccgacttgacccagttcttaggaagactgctaacttgggaaggttagatagctaagcaattgtctgtgactgattgacatgttctgtagcaagttgtatctattgacgcatggtagttacacattagaaaatctaatgttgcttctctttctcttgatcagttggcaggttattagtcctgtagaggtcgtcggatatgtcattgttgtggacgaattgctcactgtacagaataaaacctacgatagacctacaattatagttgcaaacagagtgagaggagaggaggaaatccctgatggtgcagttgcggtactgacacctgacatgccggatgtactatctcatgtttctgttcgagcaagaaatggaaaggtaaaaactttcattctggtgcaaaacgttgctgaacgctcatggcctgttcattcacttttttttctggcttttcacttgcagatctgctttgccacatgttttgattctggtatcttatctgacctccaaggaaaagatggaaaactgttgagcctacaaccaacctctgcagatgtagtctataagtaatcatcctttttacctatatttcgggaattcgagctgagatcttctctccttttgtgctagacagattataaagtagaattcacttaattcatgttgagaagattatttggacaaaattatgttcttacttaattttctctttcatgtagagaggtaaacgatagtgagctttcgagtccaagttcagacaacctggaagatgcccctccaagtatttctttggtcaagaaacagtttgcgggtagatatgctatatcatctgaggagttcacaagtgacttggttagtgtgtaatgttattggattcttactttcccgtatttatctgttttagtagttttctttcttctgtttgtaactttgcatcaaataacatagttcttaaattatatatgaatttcctcatgtttgaataactgacttcacgggtttgggtaatacaaccctatttgttttttctaggttggtgctaaatcaagaaatatcgggtatctgaaaggaaaagttccttcttgggttggtatcccaacttcagttgcgttgccatttggtgtttttgagaaggttatctccgaaaaggcgaatcaggtatcttagacactctcaactcattctggctcaaaaaaatttgaagctactttgctgaatttttgctacctctatgtttatctgttctttactggtggtattagtctggggatattagagtagagatagttcctatgcttcttaggattttatgtggaattgcttagaacatatctttcgtgaggtctcttcataagcacgggtgtgcatgactatcatgctgtcaaaaccgatataatctctttagacttaactttttgatgattaagttcacccaacctcacttcccactcactttctctccctctggatgtggcaggcggtgaacgataaattgctagtattgaagaaaactcttgatgagggagaccaaggtgctctgaaggaaatccggcagacactgttggggctagttgcacccccagaactggtatgttcatattgttttgtcgtgagaaccttgagacacaatcatctgttgttgttcctgcatatttcgaatctgggctgcggttgttcttttttacaacacatgatactaaaccacattaaatttcacattcggaccctaaagctctgttctttgacctgattccctaccaccaaaccattttgcttttagtttatgcatattcctgatgctgtcgattagcttgatgcctataattcttataaaagtttatatattgggaaaagctcacattccctcggtggaaattgagtgaaatgtagagatattctaagagaagtgccactgttatggttttggtctcaggttgaagaactgaaaagtactatgaaaagttctgacatgccatggccgggtgatgaaggtgaacagagatgggagcaagcttgggcagccattaaaaaggtaaaatcttgaagtaaggggaattgctgcttaacatgaagatgtcaaatctcactaaccggctatgtaaatctcaggtctgggcttcgaaatggaacgagagagcatacttcagcacgaggaaagtaaaactggatcatgactatctctgcatggctgttttggtccaagaagtcatcaatgcggattacgcattcgtcattcacacaactaatccatcttctggagattcatcagagatttatgccgaggtaaaagatccttgttcctaaccccgtatgaacctctgcttcttccaacttcacctgactgttgtgttttggtttcaggtggtcaaaggccttggggaaactcttgtaggagcatatcccggtcggtctctgagtttcatctgcaagaaaaacaaccttgattcgcctctggtactaaagctaaccactggtgttttatgagtaaaaagttcgaatatgatattgtcaactctgtttaactcatgaatgctgatgaaatttaaaacaccattcaggtgttgggctacccaagcaaaccgattgggctgttcataagacgttcaatcatcttcagatctgattccaatggagaagatcttgaaggttatgcaggtgcaggcctctacgacaggtaatgtgaacataaatcaaaaacttatcgtcattgtcttgatctcatcatcttaacaacactggagcaaccatgaaatttttccttccgttttcttgcagtgtaccaatggacgaggaagaccaagtcgtgctcgattacacaacagatcctctgatcactgacttgagcttccagaaaaaggttctctcagacattgcacgcgctggagatgccattgagaaactctatggaactgcacaggacattgaaggtgtgatcagagacgggaagctctatgtcgtccagacacgaccacaagtgtgatcaaattctctgaccacttcttaatgtgtacgttacgttttctgtccagtaaactccttatttgctctataagcaaagagtataatacagcataagcatatagtggattacaaaatgtgtagtacaaagacatttggcattaccattaagatataaataaaaaaactgtttattggagttggaagtttctccagcttttgcttcttgaagttgagtgcaactgaaaactgcttgtcgtttcactggtcgagcgatatgactacttagtgtttggcttttgtgaattagtgactcaactgtattcccaattcaaattagggtctaaattgtaataaaatatagataatgtttccttttttcctgaataattttcttttaagctttgacacacgaccgcaattgaaggcgattctttttttgtttctagattaagttagctgccaaatgatacatgccatgccgcttcatccacctctttctttgatcttttctacatttcttcacaattttttagtttgtactaatttaatatttgtattggaatctcgcgaatggccttctctaaagccaaccaccaccacatcagtagttcagttaatagatatgcatatctacggacatttaaagctcacaaaatcaaatgtgtgtatgtttgtagatatcacaatgattcataaaaattacacaaccagtttgaccatatgatccaacaatgcaataatgcaaaatcacacaaccagcttgacctcaccatatgattcacaaccgatctcgtattcatagtatggcgtatatatgcatgcacaataaaaaattatcatatacgtgaaaaattgtgctatccacgataaatatatcgcaatgagtttgttttgacatttacgcaaaagtaaactaggattagaatgtataatcgattttggtgctcaatgcttaactaacaagtttaaggttgtttaattttttcttctctcttaagaatccactaatggtggaaatgtggaaggaagaatatggatttttttataatatgattaggatcttgaacctcacaagttatgcaacatatattatagatgctgaatctcaatttttgaaggtttacattgcatattatttacaagccatgacgacaagtatcaaatttatgtttgccacatattaaatttttaacatgcccatgtccaaatggttgtaactatgaagcagaaaacaatatacataccaataccatttgtaaatactagcatataactctgtacgtattcaaattacattatttctgttcttatcctgtataggttttaaatattgaaaaatataccatgcataatcaagggataggtaatgataattggtgggaataaattaaggatggcatgcatggatgggtccccaacataagcactcgagcatgcattgctaatactcagcctcgcgtgccaacactcccatgtccctaacacaaactacttagtaaattaaaatgatctaatctattatttacaattaattagtactaaactttgttatactcttccactaccacagttatactcttcacgtagttgttcatttatatgtatatttttcaagtagaagttaaaatcttatgaagatataatgctctcgaaaaaatgttgtaaaagaaaaagaaaaaagagagagagtagctgacagaaggaacatatagggaagagagtaaagagaaaaagcgaacttcaagaatcaacaataagaaaaagtaaattatttgcaaattcctctttttgtctcttaaaagatacaaaaaatgtttttttttttaaacacacagagaatgcaaactaacacaagataaaacaagaagaagaaacacagaattttgactgtcattatcataagaaacatagcaaccacaagactttcctttatatttggctatatacatttattcaaacaaacataatatgtttcaggctttgtattgctaattgggaacatttcccctcccccaactttttttttctcttttgaccaacttagcttatattaatttgatttcacttataactacatgttgcatacaatttttgcatattcttatctgctaataagtaaaactatgtgatagtcaagatagcatcaaacctacgggtccaaactaaggtttcaggtctaatattaggtatgggatccatctacactttttgttttttttactgagatagaatttacttattagcagatttcattttaggataaattccgataccaggtaaaatacaaacacaatttgaaaaggaatgattattgtttttaaagagattattcattaacacatgagacatttagactaaacaattactccacctctgttttagctagccatatctatataataggttctaataggtgatttaaggaggaagtgtgcatactcatattcttaagccatggaccaacaaagaaagagagaaaagcattgtagttagattttgcttagtcactttatgtcagtggtcttttatgattttgtcatttttatttcatttttggttcctctgtattcttggaggttaaaaaaaaaggaaaggcatgaatgatttcatcactatccaagccaagtacttataaaacacatataaacatttagactattactttaagacaccataattccataaaccccttttgaaactttctctcgtctctctctctctctttcttgttagcataaggccccaagaagacataagagtgttttcatgattctttatttgggttttgttatgaaaaaatttagcttctatagctttggaaatggtgagagcttgagaggattataaaaatcaagggtttttgtcttcttttgctcacttgctcattctttaatatcgagaaaacgttttgggctttgatgggaggtgtgttcgtgttgaggaaacccagaaacggcaataaatgccgtcgtttcgatcgatgcattacaatgagacaaacggaaacagagttgttctcagaagaaacaagaatgagaacaagagaaacaagacgaagaagaagaagcttcttcttagatatgatccttctgtttcgtacttgttcctccaacattcttttcctctctcttcttctcttgtcttcttctttttcctctgtcttgtccgagaatctctcacctagaaaccaaactctcaggccactcgatgagcttaataagctcaaagccattaatcaacatctcaggaagatcaataaaccttcaattaagacaattcatgtaagtttgaattagtattatcgtacgcgatcttctttttgcgttctttttcataaacacaatcttcttcttcctctgtctcagaaaaacaaaaaaaagcacttcctttctctgttcttgattctttatgctctgtttcaagaagtcgctctgttttttttttggtgtaaatgttaaataacaagtcgctctgtttttttattgtttcaagaacatactctgttttattgttgcagagccccgatggagacatcatagactgtgttttattacatcaccaaccagcatttgatcatcccagcttaagaggacagaagccactggtacacataccatatgttaatcttaataaacacagtcattagacccgttaatgataaactaatcaaaatgtgaacttaaatactgaaggatcctccagagaggccaagagggcataacaggagaggattgagaccgaagagcttccagttatggggaatggagggggagacatgtcctgagggaacagtccctatcagaagaacaaaagaagaagacattctcagagcaaactctgtttctagctttggcaagaaactcagacattacagaagagacactagcagtaatgggcatgaagtaagattttcatcttctcctctttttttttcttaatgtgaacattagtcatatgggtccaatttgaaaacctaaaaatatatttttaccaagaaaattaaaatctagacccaaaagaaaaagagatagatctttggtccacctatactataagcaaaattctaaagagaaagattttttgtccggagtgtttataaattcgaaattcgaatttttggtatgaaaatgtaaggttttaaaatatatggaatttttatttatttactatatttgcctctttagaggagaagataaaagtggtcaacgaaattggcaagtgttttcacttcttctattggttttgaaatttcatcttttgagaattgtataacaaagaaagatagacaagcttgtcggtaaaaaacaaaagaaagaggagaaagtatttttttttttaacttatttgagtaatgattaattcctcttctacattctgtcagcaattatattgttttcccaaataatatcacatattttatataactttataataaaataaaatccttagttatctagatttggaaaacacaaactctcacgaagatatagctctgccaagttaatttgttattgacacaacttgcataaacatgaaataatgcttttgattatacacttatcttacttttgaagggataataaattaatgttcggttgtgttaattatactgagtatagcacgcggtgggatacgtgagcggagagaaatactatggtgctaaagcaagcatcaatgtttgggctccacaagttcagaaccaatacgaatttagtttatctcagatttggattatctctggttcctttggcaatgatctcaacaccattgaagctggttggcaggtaacaattttcttcatatatttatttcaaagattatatcacatcaatagcttaaaactatagatgcttagcttctaactgttgataattatttgccattaggtgagtccagagctctatggagataattacccaagattctttacttactggactgtaagtagttcctcctatgctaagcctttcatttttataaataataattatgctttttgtatgtaaattctatatagttttaagttttctataattaattagttcttatgttttggcaacagaacgatgcatatcaagcaacaggttgctacaatctcttgtgttccggttttgtccaaaccaatagtgagattgcgattggagctgccatctctccctcgtcttcatacaagggtggacaattcgatattactctgcttatttggaaggtacaatataactgaactatctaatttataatcaaaatattatctcctctagtcacactttaactacaatattcattgatttctacctttgaaaattgggtatacagtacaaaaaaaaaaacaatccgatcaattgcatatgctttaattagaagatgctctatcttttctctttttatcatttttaagaaaaagagaagtatacttgagtatcataccacttattacaactcttctttacttttgttctaagttgttctttttcattctttgatacacttgtccccaaatagttcaacatacaactctcaaagcaaagctaggagcatggctcataagttatcaaattaatagtactatttattttctatagctagcctcacatgggtcataattaaaggcatccttagttctatttttatacaggacaaacaacacacagattaaaccatctattctttattgttaggtgcattaaaattcatataagttaatgtaattgttcgatgcaaattagataaactacgattgccggtcatacactgtaactaaagtatggtttgatataaagtaaatttgttttttcagagaaataaaatgttaagagttactatgtctgtttaatataaaataaactaaattaaattaaatttcaggatccgaagcatgggaattggtggctggaattcgggtcgggtattctagtcgggtattggccatcgttcttgttcacacacctgaaggagcacgcaagcatggtccaatacggtggcgaaatcgtaaattcgagtccttttggagcccatacttcaacacagatgggaagtgggcattttgcagaggaagggtttacaaaatcttcttatttcagaaacatccaagtagttgattgggataacaatttggtcccttctcctaatcttcgagtacttgcggatcatccgaattgttacgatattcaaggtgggtctaatagggcttgggggagttatttttattacggaggaccagggaaaaatcctaaatgcccttaaagaaaaaattaattagggtttagggattcatattttctcgtgaaaaaattctttaggttatatctgcaggtttataagggctactttcatcatttattagtttttttttacaacaatctttgttcatttatgtgtaaatgtgaaaagtaaattggagaaaatgtaaaaatactatcgacaagaattcatccataagcgactattaatttcttacattctttagtagttatagttatccaggcttaactaattcgtatatgtgaaaattaggtaaagtggtacaattaggcattgtaagaatgcttgaatagaaaagtctgaaatttgaacaagtaagttgttgtacgtatcagtttattaatggttttagaggaggacaatgggtgttgcaatagtgttggtcttcccagcaaagatctggctttgacccgcagcaataacagtctttttttaaaacatggtcgcagctgtcacggaaacatggaggtatatagattttgttcgaccttcctatctcttttaccttcatcctcacacctacacattgattttgaaacacacatcaaaacaatttaaagagatagttttgatatgtatatgatatacatacattgatgtagagcgacgagagagagcatgagtatgcatatgagagatgtatgtgatgatttcatggtctggatgtctcaatggatattgtatggtgtttttttgaattatctctttatctgagttgttgtaacttgtaaacacacaaaacacatgtttccacaattttgggattggttcgtccaaaatcgacttaaagttgagaatttgtagcttattgtttcattaattttcttaactttatgtcatttctttttatctggttaacgtagtagtttgtatcaattctttagtaaatgcatgcaatcaaattcagattatatagagaattaagctaattataatgaataacgttcttatttgaactgaagcatctagtaataattaaaaagataagtagtacaattaagcattaattataagaatgcttcatcgcgcgcgcaccggtctaaaaaggttttcaacatgtaccgacattttttcatatcaattgtgaccctaattttagttttaaaagaaactgttattgctgcggaataaacataaatcaatgctgggacgaccaagactcttgcaacacccaatggtttggatatctcgaaggatattgtatgatgcctttctagttatctatttgagttgttgttaattacaaagattaatcaatcttgatataaacaagaaatagagaagctaaaatagacaagtcgatatttcgaaaagaatattagcctaaacaattttatgattttttctcttgttttattgtctaattttctatacattaaaatctattaccaaacatgaaaatatatatcaacttatttgtatatatggagtaaattatcgaccaaaaatgattttatttaacctataaatgtttaggtataattttatacatatttttattattgtagatttacatactgagaaaagtatttttcaagattacgaaacaaattcatttccatatgagggaaaaatattcattcctttataaaaatcaataaataaatgaaaaaaacaaatatgcaatcttttctgggatgaaaatgataattagaattgatcttaaaagatgataataagaattaactaattttatatgctgattttttacactgataaattttatattaactataccaatatgcacctattcattttagcttctttggtttcttaaaaataattttaatcaaggtcgtacattgccaggtagtgtagtcaggttatatagagcgttcttacattgagtaaaacattataaagttgtaaatttcatagcagtacattaattttcaaaaagtttaaaactttaaaggaggacaacggggattggattcacattctttttgggttttcgaacacatactttgatctctaaaacaacaccaacaatcccgtttgaaaaaactaactgaacattgggcagggacacactttccaatagagatcttgttcgagccctctatttctccaacatccatctgcatgcctacacattttgaaactacacgatcactaaccaaacatcaacaataacgaaaacaaagggagagcagtttttatatatataaatatgtgaaaaaaactctttacatacactgatgtagagcaaagaaagagaagatgaatatggagatgagaactgtttgtgatttcatcttttgtttgtcgtaggcaattttattgtttatttcaaccaacagtatgtgacttttaatgtcatagtgaaatctatatatagactgtaatattgaaataaaaggtatatatagtagtatatattagttatcattattatttaaattagtcagcagatattactttaccaaaatggtgtatatatatcctctatataccatatataattaattaaggaaacaaaaatatgacttttatattggtaaaattttacaaatttggaagatgcaactaccaaatagtaaaaaatggtaggaatggtggtaatcaatctggtagattatgaaagagtcaacagtaataacttttcaaagtaaatactcttgttccttgccaattagagtagtcaacgtctctggattttccaaattgtgaaactttcttttgaccatactttaaggttaatatttattaaatacccttaaatgattgtggccagtagctaaaatattaaaaacgttatttatttagacccattagttttattatttcggtcttggaatcggagataaaagtccataagctggcattagatctttcatgcacttgacaggtgttgcaatatctcaagatttatctatacgatagattaaaacttgggttgtccgaaaaaaagaagaagatgaaaatacaaatgattttccgaatattatatcaagaacaatactccacggctctgctgcctgcatcacattactgtattctgaatctcataattttcttgcacgccaattgtttcttgcctaaaatggaaattattattttttggatctgttaccgatacctttaccaactagccatatttggtaatttaaatttggaagttccagttagcaactactatattataaatttataaaaaaaaacctcggaaatattaagcagtccatgtgcacgagttcccccactaattaattccacaatacacaaaaccttctccagcgccaatagagtccaaattatctttaacctccacatgaggctgcatttcttttctcttttggtctgcatatctttcacgcaactatgataatattaccttttaaagttaaaatatgaataactttgttgccagaatttgccaattgacgattcctcatgtatgaaaagaatcataaatcttaatttatttgtagttcattttgaacatctcaaaattccgtattaactattagcagcacaagatggttgtcattaagagtgtttgacaaccatggacgaacgtaactgatctacctttatctcgaaattatgccaaatataactaaattatatacttcgaaatcacaagttttactaatacgtggtcttatagtaaaacctgtgattttgaagtacatttgattaacttggttatatcaaacatatacgattatgttatgtgattaagcatatgaatttaaaaaagtttatgctaacaaacatgtgtcaaccccaaagtcttaccattcataaacagaaatccacttacttatccatattccacataatttgcctaccgataatgtactaattagcaacaagtggaaacgaaaataagtgtgattaaacattacaactatgattaaaatggataaggttacagaagacagttagggaattggtcggattctatgaacgaaccttccagcgccgatccagcccacttcaccgtttctctcaaccaatcacacagtttccctcaattattttaataataatcatctctaaggtattcattattttattaacaaaatattcccccaaaaatttagtggagacattacaatattattattattgcggaaactcggagttttgagggagaggtcaccaccgttacacatggcatgattcagcttcaaagattgtcaatttttgaaaactcattttgttttctagttttggtgagaggtgggcagatacaagtggataacaaagttttttgttggatgataaaagagacagagagagacgacgcattttcctttattttctcggggaaattcaaagttttcgaattttcttcctttctgggttttcgtcaaaggagcatcttctttatgttcttttgaaagaaggctctcttctctatttctctcccctcttccggggagtttttgattttttaggataaaggagattcctttacctcgattttttgcttttcatttttattaaatctccgatttttgatttttgggggaagaagtagaagaagaagatgattaagttgtggatgatgacttctctccaactcgcggagctcttcgtgagctctattgtgcatttgctttatgggttttatatatttagctccgccgttgccggagatatctctcagacgttgaatgattacttgtttaagtccaatgtcgctttcggagaaaccggtcaaaatcaaaccaatgttgagggtttgcctcctattgtattggttcatggcatctttggatttggcaaaggggtaatgcaaaaacaaacccctcaaatttggttcttttgattatttgattgtggttttgaggtttgatcttattgctttgattgagcagagattaggaggcttatcttactttggcggtgctgagaagaaagatgagagggttcttgttcctgatttgggttccttaacaagcatctatgacaggtattggattcattttttgcacctcctaggattttgttgttttgatctagatcttgatataccatgtgtgcattgtggtgatgataacattggtttccagggcaagggaattgttctattatttgaaaggaggggtagttgattttggcgaagagcatagcgaggcttgtggacattctcggtttggaagaagatacgaacaaggttagattttgatatgaatgctcattggaagagactactaatataccccaaatgtttcatgttgaatgcaagtctgattttggtatgtgttttagggcaataccctgaatgggatgaggatcatcctattcattttgtggggcattcagcgggtgcgcaagttgtgcgtgtattgcagcaaatgcttgcagatcaggtttgtgtcgaatccttcttttaatggaagcatatcttctggtttaaaagctatgtttgatgaatgatgcgaaaccatgatgtttaggcatttgaagggtttgaagaaacgaatgagaattgggttctgagtgtgacatcgttatccggggcattcaatggaactaccaggacctacttagatggcatgcggttagttttcattctgacattttcaattcttttcggtatttacatggatctttacaattgattggaatgttcctgtttcttcattttgaaataaggtttgatctttgaagcaattgtatgttcctgtattagaaaaccaagatcttttatcctaattgttgattcttattgttgctgttacaggacagatgatggagtgagcatgaaaccgatatgtttgttgcagctgtgtcgtataggcgtgataatgtacgattggttggacatttcatggctaaagacttattacaatttcgggttcgatcacttcaacatttcttggaagaagaccggtgtgagaggtctcgttgattgcctaatgggaaacgcaggtccttttgcttctggcgattggatcttacctgatctcacaatccaaggctcaacaagtattaactccaatctccagacgttcccaaacacttactacttcagctacgcgactaaacgcacccgcagagtcatgggtatgacaatcccttcaggtgttcttggaatccacccgatgctcttcctccgcgtctttcagatgagccaatggaaattcccacaagatgtctctcctccttataaaggctacaggtactcaaaaacactcaaaaatttaacattgatttttgaagcccttgctgcattggtctaagaaaacatgtttgaatgaagggatgaggactggcaagagaacgacggggcattgaacacaatatcaatgacacatccgaggctacctgttgagcatccgagccggttcataaggagcgattcggaatgtcaaacattacaacccgggatctggtaagtgaatcatatatgacctaatgacgttgatggattgagaaaatctgaataccttgttgttgcaggtattataagatagtggaagcagatcacataatgttcatagtgaacagagagagagctggtgttcagtttgatctgatatacgacagcatcttccaacgttgcaggaaacatgtttttagaaagattcctcagactctccccaatcaatctccttcttctcctcgttcatcatcatcacccagaataaacaactttgtacattgatcacatgcaaaaaaaaaatgttttagggttgttacgttgagggcttaagtttttgtttaggctatttactactaatacagattattcattgttcttcttgttctcctctcgatttgttgtactgtaaaatatatatcttccattttgaaaattataatatttgttagttcgtcatgttgctctactgcctcatcaaagttatttatatagtgaactcttacaaaattagcggacgtttaaggaaaaccattattggtgtagtcacccagactgcatgcattttccatcggtaaacgaactgaaagaaccccaaataaaactcgatgtttaacaattgtaacccaatatatatataactgtcgtatatagttttacagaaaaaaaaaaaaaaaaaagagaacgccatgaaacaattcacaagaaaatggcttctaaaacaaccttcaccgcaaattctatcagctaatatatttcaatctttttccttttctcattgatcttcctctgctttgtgtcgttgacaatggcttaaataatagtaaaaacaaaaaaacgatctcattttacatgagtctcagttcgtactcaccagccatggttatatatctcacccatggatgtgcctggtacccactcttctcaatgatcttcaggtatcgaacctgcaatacccataattaacacacatcaggtttgtttgccttcagatttcaatgcagtaatataaaaagaatgtgatctatatgataataacgtatcattgtgagtaataccaacctgtattcctgaaactatgaattttgggatctcaaatttgacacggattggagcttttcgctcaggcgttgcttcctctgcggctatacttggaagatggaaatctgctttcaatgtatgctcctacattgtttcaaaacttaatgtaagcattcgactttacatggtcaagtgttacattaaactataagaacttaccttgttcccatagaaatattgtatcttccagaccagtgcatctttctcaggagcatatgcggccgacccgagagatgttcttacatcggggttatacgcatcagttggtacaggtaactcaatctcaacacttgttgcatagctgcagaaaaaaggaactcttatcaaaacgcgttaaaggattccagtatttcagtatttcaggtaatggttaaacgtgttaagtaacatttgttacttaccttctgtccttgaattggcttctagcttttactagcatctcaacacgacttctggaatgcctctctatatgcgcttccacccatataagaggctttacctgaacaagtattatgcgaaaataagatatatcatgatataattcgtttaagaaggggacaaaaccatttctgcaatattacacattctaaaacctgagtactgagtctatacgtcataagatcaaaagatccatcaggtggtatgaatgatattgtcctgtcgttctcaaaacgggctaatcgaacacacctacattttgaagaaagagacgtgtaaaaactcaagtattcaataatttttcgagttagtaaaaaaattggcctcgatagagtgactgtcaaagaatgtttaaagttgcaagagattaacgtactgatgaaatttgatgtcctccaaatcaatggcttttccttttattgctcgtccctgtgcctccaacaatattctgtcattcaagcctagcttacactctggcattccactgtaataacatggataaagaagcagagagtcaaagaggagggacttttgattttaaatgcgttggttaactagggacactagagaacgcacctcaagtatgttcgcatcttcaaagctccaacgacatcagacctgacaatttgcccattactgttcacaaggatatttacactctctatcacatccaagaaaacctggaaaacaaaacatcagtctgcaaacattagaaaacctaaaacaattgaaaagtaaaatgttgagcacctacttcgtttttcttaaactttaacccctcactcctccatgagacagaattagtgacagccattggaggtctctgtgtaacttccattctatatgcatcagtcttgatgaattcactaaggattcttgcctcagtaaactgagggtaaccaaagtccatcatctcgtcaagtaactcatactgccagtaacataagtaaatgtttttagaaataactttcgcccacacatatccacctcatgcaagagggaaaacagttataagaagagatgtgagaagcattatcttaccactaccacaaagttatctctcaaagattcttcctctaactcctcgaagtaatgcttgaagacctacgatcagtataagactgtaacatatgaaacagtgccgttcttttttcttcaaattcagaaaacagatggaaatgcaaaaaactgaatcactagggatgcttacatcgactacacgatgcaagaagaagagaagactggcagcattacagttctgtctggacgctatcatgaggtaaatgttactatgctgtacaaacatgtaggtcacgccattatcataagcaaccggatcatttgactgtgaatcaccctgaacatattagacgaaagtaagcaaacccgcagagaaaacactagtcatttagtcataagtataacgattctgatcaaattgaatccttttaagcactgatcaagcttgttcattagttccaaatgttaaaacttcacctctgtctcgatgagtttggtgaagaaacgctcagcttgagcagcggtgacatcgccacggtaatcgcgccacacgagaacacgacctttgatatcgagcagaaacagcgctgaggccgcccctgccatgttcttcttcttcttccctccttgttttctcaaggatttgccgaatcagatcgatcaaacagacggattattaattccagagagatctgaagaattttacgcttcgccggagctaaacgatcatttgctgcagctgagtggtggttcgtcgataaagtcacttattcacgacctgacgaattggttctgacataaaaaacgacgggagactcgagaaagaaagaaaagtgcagcttattaaattgggttcagctttgcattattctgcgaaacgacatcgtattaccaatcttacttggtttttctttctttctctgtattagggaagcaatcttacttacgaagattttagattaatttttataaatcttaaactaataataccaaattaaaaaaaaaaaatgaaaatttgaattgaataacatcagattctatataatatttttaaatcactaaaactctatataaatcacaaaccaataacaccccttaattattaacaaagtactagcattttgacaaatgttatacatttcaacatagatttgttttttagttaagtcataggagttattttgttaattgatgatagctcctcctggttgttcccattttcatacatacaaatcctcaacataagcaataaaatcccatatgattttccaatccaataatgattctaacagtttgttacacttgaattcacttgcgccattctctatcaatttcttttaagttccacgcgaatgaaatagtgcttttcaatatttcattacatttggcgagagagaacattacaatgaaattgcagtgtcaaagtaaatcttctgtacatgtttcaatcaaaacctttttctttctttcttccttctctttgagagcaaacatcataaatccacaaaacaatcaaactcacccaaaagacttccacgatttgactcagcacacagtacttatgttcaattctattgattcgatctcgtgaggcagggcaaagcaacaagccagatgatgtttcatgttcctttttggtctgtgccctttgatgtaatcttagacttgagtgctaagctacttatatcgtcgtctccttcaagatcactgaaagaaacatcatcctcattcactgtaaacattggagcccaagaattagcagaatcttcttcttctggccaatcatcatcatcatcatcaacaacatctttagatgtttggctaaggcttgcactatttttgtcgttcttctggattggtttttcctcaataacagctttatcgatgaactgagcgttttcaaacccgtgttcaaaatcgcgatacataatcgaaggaggttcaaaagcatatattcttggagaaagaaactcaggaggagcatggttgtagtaattagaagttgatggtgtaatatcttcttcctcaagaatcatatctctactttcttttgaagaatgtgtctgattctgaagctctttcatccacaatgctctagcttccatcacctgcaaaagcaaaaggattttgttgaataaacaacagcaacaacaaagaatcattttgactcaagaagagattgagattcaggtttttttaacctgtggagaagacaaaagatgagcatcgtgtttattgagccttgaaagaagaagaacaaaatagactttccagaagtaaccaacactcatatgacatggacaaagctctattctcaatgcagctaacctcggagcaagacgctcaatagctaaagcatgacctctttgagcatcactcatttccaaatctacattagataaaagttgaaataatcaaacttttgatatgcctataagtcaaatcaatgaagactaatagcgaaagacttgactcaatgtatacgttaccatcaagatcttcgtcaggatcaagaggaaaatccaaccaagtttctggatgcattgctatgttcctcgcaaatgctagcacttcgtctgtaagagcaaccgcagcgatctcttcttcttcttcttcttcttcatctgtttcctcttcttcttcttcctcatcctccggatcattgccttctgccaatttttcttctaaatcccagctcctaaacctaattccagtctccggcgtatcacttccaacacacgattcgtcccgatctgaagaacgcgattgattcaatccaggatctgaagaccgagattggttaaacctgggatggttcgatagatcggaggaagaagaagaagatccatcaggtaacggagcgagaaagttagccacaccacgaaattgacgcgtgagggtatgaccaagttccgtcaaatcatctttaaccccacgcgcttgagcctcctcttccggtgacaaacgaacggcgtttctcgagaaatcgtgtctttccgttgaggctttcggggttttctcgtcgttgttgttgtcttcgtcgtcgtcggcggcgtcatcgtctccgattccatcgtataagctttccaaaaaattcgaaaacattatgattgatttcttttttcttttctttttctcaattaatctattgatccatttggttgactcaaaaactaaaactatgcaaattattttatcttttcctaacaaaccccatccaaattaaatatcatatacttgtaatttagttttaaattccatattttttggtggcaactgtaattggattatctaacacctataaaatatatatttttatttagaaatgtaattggttgatattcagtgaatttaaattatagaaaataagaatatcgtaacattaatgtaaaggaatccactaaaatcgaaataaatgtcataaaaaaccttaaatcgaatatgcaacatacatatttagatttatcaacgttttttaaaaaaatctgcttcgaaatgacagaatccataaaaattattcaagagggggacaattggcgaaacaaagctccttagcgttgggaaattctttttctttccaacaacgagcttgtttagttttaagtcgcaagcagcaccaacaatcatttttcagtgagaaaccaccggagcaagtctcatgcatacacgctggtaaaatgattttgctcgatctccctatctctttcacctccatcttctcacctacacattgatttgaacatacacacaaaaccaaatttaacaatggaaagaaaaagagaaaaaaggtaattgatacgagaagaaacaaaattatgtacgtacattcatgcagagcaaagagggagagcatgattatacagattaaagttgtatgtgatgatttcatggtttgagtgtctcaaacaattgtgttgtgagttttatttgtcttctcgagttgttgtggaattatgtaaatacaaaaacttttagaatatataaacaagtagagaaaattaaattaggatacaccttaagtttctttcaaggaaaaaaacaagatataaccttttatttcaggatttttatccatattcaacgtctctgttaagtaattcataattgttattgaatctattttttgttaatgtattaaattttattttgagtgtgtttacttattatggaatgatcaaactattatttatcaggtcaaacccaaaataaggttataatcttatttataacttagagctgtcaaaacatattgtagaatcttatcaccttcttaaactcgtctagataactatacagaatacaaactgaagtattgaaatacaaaatttaaaatattgtaatagaaggatctcgattttagtattaaaatcttgtgtgcgaaagggaaatcaaagatctctcggctaattgcttttatggacgaaaataaagttaactagtagacgaaaattttattttctaatctcaaaacacctttaaaataattagaacatctttgaaatttattaaaatcccatctaatctaaaaaccccaccgaaacaaattaaaattcatactccaatagatttcccctcaaatctttcttgtacatgttttcatacaaagctctttggcgtcgggaaaatctttttctagccaacaccaatcttttttagttccagctgcgagacaacaccaacaatcatctttaaatgggtggatgcaattgttgtgaaaacacaatggtatatagattttgctcgatctccctatcgtgctacctacacatcgatctgaaacacataattcaaaattttaattactatggaaagaaaagaaagagacatttgatatatctgtgagaaaaatttatactaacattcatgcatggagaagaaggagagcatgattatgcagattatagctatatgcgatttcatgttttggctgtctcaaaggactttgttatgagtttttttcttgttttgtagaattgttctagtttgtaatacaaaacttaatcagtatatactatttatatatggatatagagaaattttaattaggaaagacctcactcgagagaatatacagctagaaatttcggttgatttccaaatatcttattttcgattcatttcggatatatctagtttataaccatattctctaaattcgaaactggaagttctcgaatttcactgtttgcaaattattaaacatattccctaaaatcaaaacaggaagttcttgaatttagtttccaaaaccattgtgacttcaaaaattatggtctcattcctacctcccctgtttacagatcattgcaggcagtcgaaattttcatatcatttttatcaaaaatgaaaaggaaatgtaatatagcaaaatctaagaaaatcttcgtataatatatgagtattgtggaagctaataaacacatgctttcaccataaggtgaaactcaaggcaaatcaaaaatcttctcggctaattgttggacgaaaatagagcaaattgatacatttgtccgcagttgaaacaaaataaaatacaaactacatttgtcctccaccaatgttggtttgctccttttaatctcaattgttttaagcaatatatgaacaaaagactcaaaatggataataagattgatacctagtaaatatgtttatgataaatcaggtaatccagttacctccaatttcgtcgataattctctctactttctgcagcatatctggataacgagaaaaccacttgttagaaagacttattaagtgaagtttgaagcttgaatgtgaagttggaatctatatgggtcaatattgtttgtgtgtgtgtgtaatggggagaatgttcaccttgaaatgaagaatcttccatgtacttctgccaaaaacaaaaagttggagatatcatttgaattgtattgatgtgttgaaagagaaaagaaactcgggtttgtttatactgtaccagtatctgcgactttagatcaggattctgcttcacagttgtttggcctgcatctatagtagtaggttcaatagagaggaaatgtgtgaaagagggtgatatgtctcaaactccaaataagtaaagatacaatgaaaaatgtacctagagtggagtcggggaagcagccagagagtaaggttgtgaaactcggaggaagacttgggatttgatttagcgtggattgtgatgggtataaggcttgtccagcttcatactcaggtcttggtagcacttcaggaacagaactatcaaaaaatctaaccatatttggctcttcctcagtggctctgcagagaagaatttaccatgtctaaatggttggctcaagcacttgtataaattcacaacactgtaaatgtgatctaacctggggaaaatctcaattgaagggttgtaatctgactggaaagaaacctcggacctagtttcacttttctggtactgagcttcatacacaattcttggtagcatttcaggaacataactattaagaggtctaaccatatttggctctttctgagtggctctgcaaaaaggaatttacaatatctaaatttttgactagagaactagtacaaattcacaacactctaatgtgatctaacctggggataatcgcatctgaagggttgtaatctgactggaaagaaacatcacacctagttttatttttctggttctgagtcgaagcttcctttaaacccttaatcttctcctgcaaacagaaaaaaacaggaatccttggctcaagatttgaagaaaatagcttataaaactgaattcaaggttaatgaaacatcgtctccatctgatcaacatataataaggaaactctttgcaataatagctaaccttaagagcttccacaaactccaacgctgcatcacaagtggaaaaccttaaagcaaatttctggatctggagaacaacaacaagcacaaacaaaccacatgatttcaatcacaaatctgaagtatcaactaactcatgaacagtaaatcaaattcatcactagtaagtaaatagtaagcttatttatatcttaattccataaaatccaaaagagattcaagtgttaagagcttgcctggttagcagaatccatataggtaacgaaaatcgctcgactaccacgagatggaaacccagaaacgcatgacatctgaggccatgtgaagttcagctttgaaatgtagtgttcttcctgtagatattgaacaattaaacaccatgacgtttaatcaaaaatgtatagatcccgatttcaaaatttgattaagcttaaaccatcgcgaaacaccaacctaaacatccgatctatagaactatatataataaagagagagagagagagagtaaaaatccaactcacaaggactttctggccgagtttgacggatagaatcacatcggatcggttcaattcgtcgacaatgtggagagaaaccgtcgaagaagacgccgacagccaggttccgtggggcgaatgatactgctctctctttccgagaggtttcagaactggatgcggagaaggagaagatggatagtgaacaaaccgagcaaaaccgatcgtccaccggtaaatttctgaagaatcctccgcgtttctacggcggtttgatgctgttagagatcccgccatcttccaaagatatttttctccttttcgaaattttcttttttcttcgttgtctttctgttacgaatgaaatttgaaaagcgtgctgtacggaatttatatttccatagtcgctctctgctcagattaaaaatattcatttgggcccaaattcccaagcccaataatctgtcttcaaagtttagtttggtataattgtggttctattggggcccaaatgaacatattattgggcttatttaaattagatttgagcccagtatattttgattaaaattagatttgagtttgggacaaatgaattgtgatcttcatgaaactgtcacgtctattttttttcaaactcctgcatgatgcaagtctttttcgtatgggaggatgaagatagacaaaaagtcaaatacaattctctttggcctcaatatgacaacaactctcctctagctactcgtataaaaatcttctacttagcttccaagttccaacatgttgaaagtggttataatattttatttttaatcaaatatatttaacttgaaataagtatttttaatttatattataaatatttttttactcagaattttttttattgttaatttctagaagtcgtaattttaaaattaacaaactattgtcactttcttttgttaatatatatcttctgtaatcatgtattgttaatttatatttctaataaaatgtttgtaatattttgacccaaaaaaaaactaacacattatattgaaagtgccatattgaaattaccatttctttagtcaaaagtgtatgtttgaaataatttgaccaaagcaaacatatatgtttagcaaaaacgtctatttattttattaaacaaaatagtaaataaagagaagtcgtacaaacaaacgtcatgaaactacttgaaaaagtttgaaaattgcgaataagcagcagcattatattattttatcaaaatttaaaatttataagttacattgctggttgcaatagtcgcgaccagtactgcctgaccaacagcattgcggcctgataccacgtaaatgttcgcagcaccaacaatgaggtaccaaaggatgacatgggccagggacacacgcttcattaaccttttgggagtgtctctgacctccttgctcacacctacatgattcatttgattttaaactttgagaatgaataaaaaatctaaaagaaattctaatttatgtgtagatatatattataagaaaagtttatacttacattcatgcagagcgaagagagaaagcacgactatacagagcaaagctatatgtgatgatttcatggttttggctatctcaaagaaatgtgttgtgttaaaattcttgttttgaaagaaaaaaagtgttgtaagttcttgttgtcttattgagttgttgtaatttgtacacacaaaactcaatcaatatataacagcgataaattttagtcaggaaagaaataatctctcttgatttacaagaattaatattcacatatctcggtcaatatttcaatatctctattaagtattcgcgaatctgtgagtgttccaactatcataatatcatatattggatccaagaaaagagttattcaacagaaatattaatatgcaaagatttggatagagcgtgactgaaaaaggttgtatgatctttccacagccactaaatgctcctagatacgtatcaatcaaactttacaaagcaaattcaaagttaaaccagaaaacaagagaattcagctatgattttttgggctatggtttttttttttttgggctgttaatgcctagagctgcgatagtgatatagaattcatgataattgataaatcattagtaaatgtttttattccaattagaaaaaatttaggagacgcttaaaagaaactttattttccaaaggaattttctgtctatcaacaagtataaaagaagtgaaatgaaacattgttttttttttctctctttgacagaagaaacattattacattattggattttcctacagaacattaacaacaaataacctcttccgtggaaaatgctttgatcgagaactatacaccaaagtttataaatcagatttgttcaaacccaaaaattacttgcggctggatttcttctcgaatcacataagcttaaacttgaagagcagaagctatggagccagccaggctaagaacttcaaaaggaggtttattcatcacctctttcacagtcatcccacacgagtctgtgatccagaaatagctcagaccttccgcgggatcacctgcatcacggaaagaaaagaaaaccaagattttagccacatcgcaaagaaactggcatgactctgtttagactgattcaaaacatttgtatagtggttgtagtaacctttggtgtcaagcttgaaacgtttccatgaactcctggggaagatcccgtgtgttacatatgcgcttatcttcgctgctccatgtgcagctaagactttctgaagggaacaagaattagtggttagttatgaagaagtgagtacagagttacacttttgagagttgaatctgagtacagaacctggcattcgattaatgtgccacccgactgaaccaaatcatcaacaatcacgacgtgccttccttcagcgtctccctctttgatacgcactattcgtttgtctcccattcttactttgttgcaaacaatctgaacgttaagtaggattacttggtaagtcaaaaggttaatgtacagattttctgtacaagattggatgatgcaatgcttcttttggagttagatctaatgtaagcttgaagaacaagctcctgaattaaatccagcttactaaatcctaaaacgatccacatgggttcactgtaagatgctaatgagatgtgcaaaggcgatatcgtctaggtatgagaaaatatagtaccgttggataatgttggagttgcttgtggaaacgcttccatgctccatcatctgggaatgcaatagatatctgaagcaaatgaagatcagtaaccaaaatgaattgaatcttgttgataatctactcaacatgatagaaatgtgacaaaaagagggaaagagacttacgttatcagaatcaggtagactctggagtctgctcttgagcaatggtataccactttcaaagcatggaagtatagtatcaccaaagtagaatctttcctacaatccaaacgaagacaaggcagaatctagataaaaccatcaactcaaagaacaaaaagagaggtgaccagggttgtagataaagacctgcaaggcatgtatatcgaaggtcactaggctagtcggtcctcctctcgaagtcggaatattagagagtatcctagcgagagtaaaagcagtggccacatctccttcgtcttccattctctcagaagttccagtaggaaagaatggaagaacaagtgtaaacgaagaaacaaaaagcttaggcagagcataaataaccgaaagctgctcgaagatcacagcaggtgaactgaatgaagccaagaaagcaacatgctgcccacgaatgccttgagcattttgtatgaacaaattagggaatccatcatcaaatttcctaaaaacaagaacaacggttgtaaattactttgtgatcaagaacctaaacctcttccaaccattatacacatcaaacaaacccaatttgactctgcttaaaagcctaaatgcaaaattccttacggtgacttagagctatctcatctcaaggttctcgaatttgagcaacagaataagagcattgaccaaaaacacatacgaaactcatctgaaagttcaaatttttaagcaaaagacatcaaattgatagagagattgatgggttattacttccaattgatgcttcgtagctcaatgcaatcagattttgcgacgattctctcggcgagatctctagtctcgtcgctgtggaagagacagacgcgcttagagctcttcgaaccggattccgacgtcgccgcggccatggttataggagacgatgaattcggattaattaggctgatcggatccccattggataagaaatcgaggctccggtgaccagagtggttctctaagcttctgactccgcacttgatgcagcgattactgactgaagcagttttgaaattaagaaacgatggagacgaagaagaagataacgaggaagaagttgagctaaattgaggcagggagagtgaagcagcggtggttgcattcgccggagaaatagccgccatttccgaagacgaagggtcaaatttacgaattttccggcggatatcttcaaattaaatataccgaatttttttcgtttataaaacaaatctgacatgtggcggagactccgaaatgacgtaaatgcccctatctgtcaaatgagacacgttatgaagatgttggatagtttcggtttaattggctaagtagctaaccatcggttcaagtttaatttgtccgaataccaaaaacgaatagcagcactctgaaactaatttgttcaagacttgctcgaaatgaaacggtttgtctcggtttagttagaatgtggatagggaaattcggttagtttccggtttaaagggacaaaattgggaaggtatacgcgcctactatgtggaaagatgatgtgttagttgaaagttgaaactagaatacattagaatgtagaaaatttcaagctaacaatattattcttagcttgagtattccaatggtaaacaaaaggctgctccaatatattagatccaataaatcagaagaagccataagttttagaaaacgtttacatatttaaataagaatttgtgtttaaggattatgacattttctgttaaataaatatctaacaaatagtaacgttaccaaaatgatattgcaccataatttatgtatgtgcactaagataatggtttagggaaactgcaattcagaaaactactaaacaaaggtcattctagctagataagaggcaaacacgagtttattgttgaagaaactaagaaatcacatatttgtcgttgccggcaaacaccgaccaaaaacctctatatatgttttcacagggtgcaaaaaacttgagcatcggcgatggaatctctacaaaatatgttgaccggtgataattagaaagtcaaaaataggaccgccaactgaagtgtgaatctcaacgactctttccatctcgttactccatttattacttgcatctaaagggtatttttatctctttatatttaatacatagaagttgatacaaatactatatatatttgtgtaaataaaaacacaccctatgaatataaaaataagttatttttataatttacgtagcttaggtcacgcgtttcctcgggttccctattctcatttaaaactcattttgtatatccgttcacgggctctctcttttcatatcaactcttctctcagccagattagatatactccatttcgttttcaatgactatgtcgtcgttttacaattgtccacattagttaacagtatatattacctattaattagtactactatagaatcattttacaatacacaaaatatctttgatgagtttttttgcaggatttgaccacatgatatattattatatttggtggcgtatgtatttcaccggataagattatggttcacgtttgttaatgggcgtgtatttacactaagtacaaatatgcttgaagcaagcaatactgagagaaaatagagaaaagtagttttttttttttccgtgagtttgttaatgggcggcattgtcatagtgttattatacattaaagagttttctatgatttttatatctacatatacatttttgatagactttttggtcaaaaatcccttaactatttactaataacatttaggtccttaccagttatatttcaaccaaatattctattactaaaaatttataatttgttagtttgcattaaatacttaaattaactcttttctatattacatatttagcctctacaaaatctatctaaaacaaatatgtgtctaaatccttaattaaatcttatcattattgaactacaatcaattaattacgaattttctaaaatttctctatctacattaaatataaatatatgctttttctttcactttttgttgttcttatatctaatttatttgattttatataaaatatatatagtttataaaatattagattttttctgcatatgatgtaattcaaatttttgtaaacagacatatattactctatgtataaagaaaaaagtaagtgtgaaagatcccacattacttaagaaattgggcaatgctttagagtcttattataaaaagaaccaaaataattttgaataacaatgaactggaagtttgatttatcaggcatccaaaaataaaaatgttatccggtttactctgaatctctattttaaagaactgaatctttaaaaatttcaaaatattataaatatttaaagtttcttaaaagttaaatatcaaaaaatttaaaacttttaaaaagttatactttattaaaatatatatatatatattaatatgagacaatatatattacgggtgaaatcctatatataacaattaaaatacaattataaagtttggatcaatatatatatatatatatatatattttaatttcaataccataaatatttaaattttagaaaaataacaaaatgatgtttaatttcacatgacggggttatacggtaggacgcgtttgagttgatattaatatggaattatatatactacggatgaaatcatataattaacaatcgaaatataattatacaattttgaaaacaaaaccaaagtaacaatatatatatatatataacttaaaattttaaattttttagttctaaaattgtaccaaggtgtattatacgttaaaaaaataacatatgtctatatatcatcttaaaaacaaaattacttttttttatataaaaatatacatatgtgctatacctcttaatatgtcatatatataatattaattagaataaaatcgttaaatttctaatgaatatcaacgggtcaaacaaatcaacattaatcctataagaatcgacttcatgtattttgtaattttgtttcgaagacatgcatccataaactattcatgactttgatatcattttcatagtttataatattcaaagattttttttttctttttttttttgttaaaaagattcaaaagatttggtttcactataagataaaaatctcaaatgcgattaaatttacctgcaggctgcatgatctaaaataaaataaaaatgacctagaaatttaaattttgaaatgtaggaattgttgctacttctctcatgctcctttattccctccactctgccctcagcctcaggcatcagtaacgaataaatatgaatatttaaaaaaaacgtacaactctatctcactgtctttctataattaaatttgatttttttttttataaaaagaaaacttacaataattttattcagcaaaatcagtagaaattaccgaactgaatcgacaccgatctaacgtaattaatactctgttgactataaaaccgtcctctaagaaaaaatgtccccttcacttcacattcgctcgccaccaaagttaaccacaaaaaaaaagtatccaagagagagagaacaaaacgtctcattcgttccccacacatcaatcccaaaaacctaaagcaaacctttgattctttcatcttcatcatcaaccataacaacaaaactcctctgtttttttttcactttctctgtttcctcttcattcacattcgagagaagtcatgggatattccggcaaacctcaccaccaactcgacggcgagatacgagaatccaccgacggtaaaaaatgggtcatcgccggaattccctcacgttcccctctcaagcagattaacctatctcccggcgtcacagttaccgaaacagaggagcaagatcagtgtcctacgacccctacggcggtttccgtcagaattccaagggtcccgccgtgtccagcggcgccaaagaagcgtaaaccgtcgttgaagtgcagttacgtcaccgtcactagagattacttctctccgccggacctagaaaccgttttcattcaaagagctagttattaactctgttttcacgactctgatccctctctctctctttataaccttcttttagggttagttttcttcatctagtcgtaatcctcgaatctggtttagtactcttcagtcttagattctgaacttaactaaatttactctatttgtttctcagttgtattaacgttaggacactaatcaaggttagtgaatatgaagtgtttgtttcatgtttatgtatatttctatttccccctgttttgagtataattgatgtatatgatttcttagctttattcatttacaaattttctgtcttttgcattcatactcagtgaatttggttgatcataaaaatcatttatcctcaaaatagtttttttttccttggaagtttgaaatgaaattaacaaccctaacaaatgtggttcacagatcaaaagtcttacactttatctacctttttggtttacttttatctccatctatattttttttaactatacaaaagaaaaggaatctttcttctttgcctaaaaactaaaagaatcttttttgttcttttctaaatggttgaaaaattgaatgaatgcagaaatctctccccctttataattatatcacaagaacaatagtgtcttctttctcgttattagtctcaacaatctcttccttttatcgcaacatttcttcatcatttattgtttagatcattctcataattggacatagttggtgaatttcttcacttatagcatgcaatgaaatgtcatgttatatctgacataccaaagaatttttcttttgttatacattaaaaattcaacctggtggcatctaatttgtttttaccccaaattttttttggtttttcattcaaatatattactatcctacttcacaatagttaaatgaaataatttaaattgattgtctgattgatatgttacatagtcatgacgtttgtctacgaaatattttattatttaactgtgtgcacaaaaatatatgcaactacgtcggtagtttttttttcggtaaaggattttaatatacatcaaacatcattcgaagatcagtgacagccaccgacgcaagtggaatccgagaaaagaatacgccaaaaagttttagtcctcattgcatcaaaatttccaagattttggaagttttcgagtttatactgatattctttttcgtcaaagatttattgtacaatacttttataatattttttttagtttttaaaatttatcaatttcttgtggggttttaattaatttctcttgtgtcttataattatattatttttgtttctccttagttagtaacgtgattgtacatagctttagtttgaatgtaaccaataactatacccatttatcgggttatacacttctaccacattataatcattttttttgtcatactttaacagggatcaaaatatcctatttgcggaatcttattatggcgagtatatgcttacaaagattaagaaaattataagtagtaaactattcttgttaaaagaaaaaggcttctctcgcgagtggataacagaaagcaaatgctatagcctatatatgtgaggctttagttgaagaaactcagatgttttgaagatcactcgtatacgtaaagctgattgaaaaaagttttttttttttaatttttaattataggttgcaaattatttaataatctcatcaaactcattaaatatgattggaataagactcttattaaaacgacgtcaaaagaagaagaagtctcaccaaaacgacgtcaaagaaagaatacatcaacttttgtatattaccttgttgactgaacaaatactatatatcctcactaccatcaattggttgaaggttgcgtctccttcatttgtctaacctttgttttacattttataagaaaagaatatttgaaaaatcacattgaaaagctgctaattattggactccacatggttagagatcccataatttggtgatcccggtgcgttgtacttgggagggccgataatccttaatttagtcttatccttcaaattttgaatgtattaagttagttaattgcgagatttatatagaaagcaagaaagaaattaaaatgaataatgtcgttggatcctggaaataaattgatcagtatattaatgggtgaagtgaagatattgaaatgcattgacacttggtatgtgttgctagacacgtggtttacccaacttctgtagttcatcatgtttggataatgcaacgttatccataaaagaatcattaatagcgacgtgaaacaaaataaaaaaatatctgaccaaaaatgtagaagaatttttatttacaaaatttccattcgtcttgaattaaggtaaaattgccttttcttttacaacgtgcaacatattcatttttttgcataattttttcttacttttttaaagcgtcatatttgaattcttagtttatattatagtttacataggttctgttcgttttcttatcgctggatccagcaacagcgactagcgacagcaaccagcgacaacatacattgttcgtttgtctgtcgctggactcagcaaccaattacagcgacaatcgctaataaatgtcgctgtgttgttcgtttgaatgtcgttataaacagtcgctatattttttttttaaattaattatttttggtgttaatttatattttaaatttaaaatgtaaatcatatatatcatacaccatgagaaaaataaattaatatatttatttattttagttttatcaaatataatttgactataattagtttatgttatttgaatttaatttattttaacttaatttaataagaattaatttaattaaactagaactcaaacccttcgtgatatcgcagagaaaaatattataaatttgtttatataataatttctttaaaacaaatgtaactccaaatgatgcatattataaatttcgtaattattcaatagtatatatataactaaccagaaaaaataaccgtaaatattttgacagaaaattacaatataggaaagttgcaataaaagacacaagcgagaaaaaacaaccgtcaatattttttacagaaagttgcgattaaaagacacaaccgttcaaagtgcaaaagacatttatttaagtttaatttaatttaattctgtttaatttaattatttttaattattctttaatttttattttttgatcgcaaagttgttcgtttgcatgtcgctggatccagcgaccaaaagcagcaactaatcgctgaaaccaacgactgatcgctaaaaatttcagcgactaaaaattgcagtcgctggcgactgtcgctaatttttgtcgctgaatcagcgataggcaaacaaacaacttttggtcgctgtcgctggtttcagttaccagcgacaagcaaacgaacatggccataatatagcattttcccagaaaagaaaaacagatatgcaacggcacataaataataaaaaaatctccctagagtgaacagttgtgtattcagctaatacgagcaactgtgtttttgaaataaataaaagtaataactagaaaaggtcaaggcccaaaataataagtccagcgaaatagttaaacgcaagtcctttcataaatttgtttgttaaggaaaacgaaattgttgaactatcgtttcagaagtcatttcacaaaagttctattaaaacgatgtggccttcaagaataataaaaaccacattatacgttgcatatcatttctattttataatttaaaatatatataattatcatcaagtttctttttaatgccattgactttgtacgatctctccagtccattgtactactttttcatgcatttttggaattttaaaaaactatatacagtatatagcaataatataagatactgaaaaagccattggaagataaataaataaccagagtgcatagacatgaaaaatgtggaaacatacaaggaacgcacaattgcataaagaaagaacaacgtagcatgcacttgtggagtgagcatttgtttcttccagtagaaatttctaaaatgttcctttcttttgttaaataagtttctaaaacaaatgtattcttttttttcgttaagggtatatattgctgattttaatgtttcctctactttgaccaaaaaacatgcagaaattttgctataatcggcgttgcgtataatccgtttactaaaagtctaaaactcattttgacatttaagagcatctctattggtgataaatggagatgtcttcctagttttttaatatttaattaaagacacaaatgaagaaagagaaacgaaaatgtctttaaccaaacattgaagacatctttgaagaccctcttgaactatgtgtaatattctgattggttctaatttttttagtttaatatttaatgactaaaattaattaaaagcatatcagatgaagttgtgcaatgaggatgatcttaaatagatacacttgcatgaaagggcaaaactgtcattcacaacaaacatgagaatctaccacctttatttcccacgaatgcgatgatgcagcaccaaacttttaaggactaaactgaatatttttttagaagaaaagaagaaagtgggaaactttgagttgaactatgactaggaccaatcatagaatgtgatattattatctaatagttatctccccactttcagaaaaataatcagcctccttctatctacacatctctctctatatattagcttctttagatagagatttcacccacaaatctctaaattcaaaaccttgaaccaaataattcataaaaaaaatcttcaagggaatgaaaccggcagaaaaaatgcagacaaagccatttaaggaagagacagaggaacctcagtttggaaaatctccccaacagtttgtttagcttggccatgagaagcaaggaggagacaaaacggcaagtcatatatcggcatcaggctcgtgtttttcgagttctattgatttgattttggtggtatagtggatcttgaaatgtttaagattcagttgctaccgaaagaatcatctttaaataatagtatgtacaatgggaagaaaattatattttagatcgtcttcatgtgtgttttctttccggtttttgggaattaaattggactatgtttgctcatgtgtctattattaagtttcatgtgtgatgtgtctaatgtctatgtttgtgaatttataataaaaaatattagaaatctgtttttcatttcctcgtgtatctgaaaatcttgaccgtccataaactgtttgttctatggaaattttatattagtgccaatttaccatcacccaatcatttatatatgacatcaaagctt

SEQ ID NO: 32 - DNA, 115641 bp, Arabidopsis thaliana
aagcttgaaggacttgagctctaggggaggcacagatgcatctactaacacatgtatgcttccttggcaatatagtttgcagaaaccgttgcttggggtcagttatttaaacagtgacggtagttctcagtcgacacctcatggtagcaatgggttagttaagagaggggcaacatacattgtctcagatgatcttactatttgcgtaaagaagaagtttgatgtgaacttggacgatatttttgagcatgaaatcaacattggcaaaacacatgtatatctatattactattctttcctgatatttttttttgaatctgacactaatccaggccataggtttactaagagcctcattcgtgacatccactgccttgactacggctttcgggagctttctttcagagaaacgactctaaagcatcaatcacatgccctctgtggagcagattgatttgaagtttaggttttgttgtctacagtgctagttgaacaagttaccttctcttttacactactgttaagtacaaccttttgttcttgaattttaatgtcttttgattcaaaaaatgtttatccttttcagaaaatagaatctaaatacatgatcaggttggtgaataatgtttgagccggtaatgggattggggttacataatgatgatcccatagctcatttcatacagccaacaacatacataaagtgttattataatacaaaagaaatactttcattcatcaaaggacaaagaacaagaatctgacaataaactattgcttctgcgtcttagtccaaggttgtgtatcttagatcatatgttgaagatcttggactatttctgatatcggcggtctaaatcctggttccatctacagacaaagataagcatgcacagaagtcaaaagggttagttaatattctgatgtcacgtgtttgacattgctttctcatctagttaagtgatgaatgaagttaagtttacctgcagtgaacgtgatatgatatctgcaaaacgtgacaatgatttcattggatacgctccgtgtaatgacggatcaaccattcttgtcaacgcatcgatgtcatgaagccgaggaatcgcccactgagctagtgtttgatgtcccctcggccttgtcctgcaaaaaaaaacagggttttgtcttgagatagtgtagtacagtgattttgcataagaaacataagtgaacatgttgacttttgagttcagactcttttatggcttctattagttgtctctttagagtagctaacctgtcaaatggtctgcgtccagtgagcagttctaacattacaaccccaaggctaaatacgtcgctctgacaagtgtagcttccatactcaacctcaggagcggcataacccgccatctacaattttataagcaaacatcatatcctttacaacactcactcttatgtttgggatcttcaaaataagatgacaaatttacctgactcgttgggcgtggtggtaacatataagccaaaccgctgtctgcaacacgtactgagagctttccatcaagaagaaccttggaagacttgaaattctggtgaacaaccggcggttgacatacctcatgaagaaacctgaaaccaaactctaagatcctatatgttccaaatatagattggcgtaacatgttgaggttctttaacttactgcaatgcctttgaagctcctaatgcaatatttatacgtacattccaagtgagcttcttgtgcaacttgcgatccaaatgtagtgcatcttgaagtgatccattaggacagtactcatacacaagtaacctttgaccaaactcgttacagtaaccaagaagctccaatatatgaccgcgtttaagcttcaacacattggagactagattgaggaattcgccgtcactctgtgttctgttgatggtattgctcagcttcttcaccgcaagaaactatagatcacaacgtgtcaagacgtaaataagaatgcacagcataaaatactgtaagaccaaatgacaaataagaggaaagtgtcacacctttccatgacgaagctcagctctgtagacattaccaatcgacccttccccgattatattctcttctgagaaattatttgtgtattgctgaagtgaagcaatggtgaaaacagtagcagaagatgaggaattcaagcccggggggaaatgagccgctctctttgaagcagtatcattggactggaactgcctcggtggttgttgcagcggcttttgaggtgtattaacatccttattataatatgaagtaggaggcattgctctccggctctcttcagcccgctgtggcattggatacccatatttcctgtctccagctccatatccatcgaaaggcttaaccataggctcccgagaaactgcaacaaaagaaaacaccacagcagtttgccgttaggtaatgagccaaagcacaagtttcttttcttttcttggaaggaaaagaatcagtgtaccttttcccatagtgggggttggttgagatggaggcttattgaagtatggtcgttgtaaatctttacgagctccactgtaatatcggttatatattttacttctgcaacatctccaaagtgtaacacacaaaccggatacaagaacaattatggccactgaagaaactactagaatgattctttgagtggaccagaattttcctgatcctgaacctgaaggaggtgatatttgcaaggtaggttgccctgacacagagttccagggatctcctcctccattatcagaagaaggtggtgaccagaccagaggtggtgatggtggtggatgttgttgtggttgcagtggagcaaaaggagcaaaaggtgctgggggaacaccagaaacaggagggatacggggaacaggaggagcacggtgagtagcgggaggaggatcaaccacaggcggaggcggtggtgttataatcgatgtattgaacggagttccatcttttctgcggttataatgacaatgtaacatgaatggctaaagaaaaggaaaaaaaaaacattcaagttttcttttagtaatacttacttgaagtttggaattttcaatagatttggcggtataggtcccgagaataagttgttttctacattcctgaatcaaaaatatgaaaagccatagtgagatactgaagttggcttaatggttggagagtcaagaacaaagagtatgcaaggtgaaaaacgattacaaatcggttaagaaaagatcctctataacatcaagtgttcctgtgagcttgttgtcctgcaaatacctacagtccgaccacatcacatataaaagcaatgataacaatgtttgtatacggtttcatatatgtgcacttacaatatcttaagagaagctaagtctcccatggaagaaggtaaatgcccctccagtatgttagacgataagtccctgcattagaaacttaatgtataaatgaaagacgctgatgggaggatacaaaatgagacttagtgaggaggaaatatacagttttgtcagttttgatagctgctgaaagtaatctggtatctctcctgatagaagattgcttcccaatgacctgaagggaaaagaaagagtctgcttcaaacagaggaaaaaccgcagatgcaagaaacggtatctacattaataaagacttacagttcagacaaatcggatagaaaggacaatgtaaagggaatgttcccagtgaagcgattgcttgagagagatctgaaacaagaaaatgaaaccaaacatgaagtgtcttttaactgttggaaacataagtattgccatacacatagtcaattctcaaacgcacaggtttcggatggaagaaggcaaagcctgcggaattgtccctgaaatatgattgctactgaagtccctgtccactcaaacaaagaagagagaaaaagtatcacaaagcaattcaagattataaccaaaccttatagtcaatggtaacaacatcttgcatgttcttcacatagcaagaagcctcatacaaaagatgaagatgaaagaaaacaagacaagaagctttgcttacatgacttggatagatgaaaaatcagccagagtatcacttaagcctccacctaccttcatgccaggtatccttctgcagccaacaacaataattcacgtggttagaacctgaattggtgactcaaagcaaaccataacaaagagttacaagagcagaagaggaagtatacatttctgtgatgtttgaggagtcacacaccacaccttgccacttttctccacaagggtctcctccaaaagcaagccaatgatgtagagatggtgctcccaaagtgatatacaagttattaatcgccgaaactgcagaagttattaaacaacagacaaacacatcaaaaagtaaaatttctagagattaaagaatctttcttatgataaccatttaatgaagaacaataagaacaaatttcttggtcttgaactaaaaccctaacaagagcttatgtgtcaaaaacctaaactttttagggtttttgaggtagcctcaaaatcatagaactttgccaatctggagcttcccaaacagctatattgcttacctagtttaccctaaaactgatgtaagtcattttcactagacacaagtctaaaaaaaatctagagtgttcactaaaccaaaagaaggagagtcaaagcaaaatccaaataaaaaaaactttgcagagaaagattattaccatctcgtagattagtaactccagctgagaaaggcattgtcaaggctaaaacagagagaccaaagaacacttcccatcttgtaaagctcataacttcagccactgaagatgagaaaacccttgaacttggattagattgtttctttccaataaaaaacgaagattcagagggaatgttatggaaaaaaaacacgaggaagaagaagaagaagaagaagaagaagggtgaaacagggatattcctgattaaaaggtaaagtgaatcataatttcgtcggatttttaggagagagagaaagaagaaaagagatgaagagtgagtgagagagaaagagtgtagtgtgttttgtctcgaagaacgagcggcttacaaaagccaacggctttgtttttctcagttttaagcctttaaggtttcgtctccaaagtgtgaaacagagaaaacttgccaagacttgtctctctttatgtcttttaattgtcgcttctatgcttcatctaattactatagtttcctttcatgtaataattggatttttctaatgccataaggtagagagatagaagtgaatattattttgatgtagattacatattccgttacttcacctattaaaatccaaataatgtaacaggcagagtttatcacacttatttcagtgagatgggccaagaaaacagttgaagtaagaaaagctctgagaattctttaatggaagaagagagtgagagaccctacaacaaggtcaaaaaaaatatcatcatattcatcccacgtccatttttgctcttttggtgataaaaatgtgtgaattagttttagtaacaaactaatagcaacaaactatttgagaaaactagtacttttacatggtttggaaattgatttcaattatacatcttagtgaatcctaatatatgtttttaaacaattagagccaataaagggttttttcttacgactttaaattgaatatacttagtaattatacaataattatcttttcaatatattctaaaaataactaactaatgttatatgtatgattgcacggtgcattttggttaccattcgaaacctttgtttttctattaataattaagaattctggttttgtgtttacagttacaactaacaatcactatttatcaatttctttggaatatattcttaatttgtattattctttgtttgttggttgatgtgatggaggatttgtgtacaattcaatagtagtaatttaatggaatgccatcattgcataatttgagatgagagtaacttcgatattcatatgtgattacttctcaagttccttttttggtaggagttacttctgaagttctgatattcacataaattatttgcaacccgaataataacagcaaacatacattgtatgatcaataaagaataaaacatgcttggtgagcttatgtgttgatattagatttttattttgtcgagatcaattaattatcaatcgatttttttggcttgtcaaaatcaatcaagttcacaccatacacgataataagttgcgactagttaaaaaaaaaaaaccacattcttatgggctattcaaaccaaatgtggcccaaacttggtcaatagtgtaatggtaaagcccacttgaaagaagatacctctcgtaggcctaataatgcaatgagattgcaacggttactttcaatctttgaagaaaagtagaaaactatcgtacatgatgcttttttgcacccaaaaaaaatcgtacatgataacatttttttttttcaaaaccaatatgccaagtgccaaccataataaaccgaaccaaaatcaaataaataataccgaatcaaatttttgtttcgaccgaactcgacccaaaactacaccaatcaggttggattcattttgattcttgtacttcaaaaaatcagaaaccccatataataatgattgtagcacttatacatgcataccaaattagttatgagattggaagatgcatgataatgaattcaaactattggtctcttaaaaaagagtgtcgaggaaaaaatacagatattgtaaagttaggctttattttataatatggtctctcattacgcaaaaggcgaaacaaaattaaagaatgcaacactactttatggtcacccgttagccagaggatccaaggcacataacgaatgttttatttatttaaatcaaatctagttacgtatctacacgaattttggttcaagttttggttttacatcaccctagctttttccgccctaccattttacatcaagaagcttcaaagaaaaagttctatagattatgaaaagtcaaaaaaagaacttaaaagaatttgttagacgatacttggatacaatttgctgttatgcacttgatcgttttgaaaatattaaattgatcagaactattgaattgtctcgttccattttcattttccaatatacacaagtatgatacactcaaactttctaaattagtttgaagtatgatacagaactattgaagcctgtttttttttctctcggcggaaattattcaacattcatccaataaattagttaacgtgtgatgtggggtgcaaaaggacaaacaagaaagcgttaagaaaagcataatctttacaatgctctctccaaaagatgagcctataaaagtaaaaagaataataataaaattgctatcaaaaaaaaagaaaaaacgtttgaatgatttactaatagacaaaccacaaaatcgaatttttgtactttttaaacaacacctaaatacttttacttccatacctatggtaaccaaaaaggaaggatcccagttttgttttacacgattgaatataaactaagatagttaagtaaggctgtagaacaaataaactattttatacacaaactagaacctactaatggttcatgtaaaactaaataactattttgtttttacactatgaatcaagtcttaaaccaattataaatgaactacattttgatgtaaaaaaaaaaaaagaactacattttgattgaaataaagaagagtattggtttattaatataggaaaaaactaaaccaatacacttatgttaactaagtattttctttgattttataagtcacacagcatattcaaatcgtggattagttctagacgataatacaataaataaattactaataagtttagcctatttgagtataaaagatgaagactcaaatattcatgatacattatttgaaatttgttggttcggacgatcatagtgaattgaatttagtgtatgatggtaactttctttttggggtcaaagttacgtgactttgcttgcgtctgattttgactgtcagaaaatatataataattggtgtcacggaagcaaatcttttgccaccctactcacacatcatacaatttaatttctcattttttataatcaaaaacagaaaaacattttagtatttttcaaaatccacaaccaaacagattctgaactggcgaagcatgtgaaaactgattaagatcaaataacttcgaaattgtaaattccggcgataattcggtaataagatacattatctcataggaagatgaaacactctaatgaaacaagagggttctcaaacgagtcgttaggggcagaattgtaatttccaatagaacccggccacttgtgatgattacactcttgatccgacccgttcatattcggattgagtctgacccgacccggagactggctttgtctcctcattgctccacaactgtctgtactctgttgactccgagttgggcccatcatgacggacctgttcatcgccggcgatctagaccttctctcggatctttcagtcgagtctctcgtacccgtagccgacggaaccagcctcaccgagccagcttcttcttcgttgtttctcttacgtggagacatatcggttctccggtttggataactaaccatgacccggttccgagatttcgccggagatctctgtctcactacatgagatttcatctgcttcacttcttcctcgtcgtacttattcacgatcgaaagcaaactctcgcttaaactacaattctccgaaacctccgatcctttttccggttcaaccaaactgggcttggtcaaaaccggttcttgagcaacgtcgacaacaatcccgggtttcttctcctcttcttcttgaatctttgtcaacgtagtcttctccaccgtcgaattgtcgttagaggaagtgagcaatgtggtttcggacaagacttctttgactactgtctcttcatcgataacagatggaggccgtgcggtgttcttgccggagacaggatcatctttcttgtcggcggtggcggagctgaggcaacaacccataacagagaacggtgtcgttaagtggatagcagataactctttttggtgctgtgtgattgcagcagagtgaatatgatgagagagtttttgggtatttattggcaatattttggattgctctagactagtgagaaactaattactttcaccaaaattttatatttatttatctataacagtgaaaccaaaaacgttttatgacgaagaaatagttgtaacctgaaaaagcagaccaaaatctagctatgtctctagcatatgtaaattagtcgatttttttacatttaaaatgtcttattgagaaaaagctaacagtaaagagttaagtttttttttacataatttgttgaaccaatgcgtttagtcgttaactacacaactacagtcgaagtaaattaagaaacatgaccagtataattgttatgcacaaaaatactgcttccgtgtgatttgcatggtctaaagattttcttatgatttgtgtgattttgaacgtgtaaaacagtacaagttaatatttcatatagttgtacatatgacatttgacaaaaagtacaatttcatcagtgaatgactgaatgtgatttcgagtcaatccaaaggtgaaatctcgactctgatactggttcccctggtaaactcgttcatcaaattatgatttctatttccattattgtgacgcaaatgtatgtacactctcgaattcacacatgccaaacactagtatgagtcaacttctcctaaatatcattctagtacaacatatgacacaagtaccattcacatgactagacgaaaagaaaactgtatataccatttaccttagtaacataacagtgaaatccacattgattggtgactgcacatcaaaagagttatgtctgcattccaaaatcccaacacgtttcagactcttcactcactaacatgaagatctctagtccattgaaaacctaatccactaatcatatctcgatccaaaactaccactggcagaaaaaatagcatgagtttccaataaataaaatcgtctgcatcttcttacatatagttttacaatttcccgatattgagatttataaccaagttcttgtttaaacgtactataaatcagctccacatgacctcaggttcagagttatgtaacttacagaaagttccatatcttagagagaaaaaaataacacactctctcttttcttctctgcaaccaagtcatcatactaaatagcaaatagcagagaaacaaaataaacccaagtcaaatcttgaatatacgcttaaggctataagctaaaagggcataaaccagtttttgatcctaatgctatttacacaaaatgcagataaataatctccccgaacccaatccatgtagcgaaatcatcaggagagaaaaaaaaacagaacaatacaagaaaacaaaaacatctgatgccaaactcaactcaaactaaatgtggttggtcgctcaaatgttaaataagccaaatggtgaatggtgatggagataaataaacaatcttcaacattcttgaatggagtttgagctggaggaatcctttgatgagccatgttgatgctgagactgtgagatgttttgaggaggacaaggcacgggagctggatgagcaatgaacgtagggatatcatctcctggcatcaatacagataccccgtttgagtaaacagtcatctgcaaaacaaagaaaaaaaaatcacataaataacaacacaacatatattcaacacatagaagaagcagagattctctcaaagaattttgattgatgaggtagataacaaatcataagcaaatgagagttttgagtgggagaagacaatgacagatcaaaacatgtgtcattgttccccaacagcaactcaggttagaatgaagaaaagggcgaaacacacttggtcttaagtttaccatttatgggtcctcacatgtttttgaatggttctatctactctttcaacacatggtttgttccatatccatctcatatcaatctataattgtcaatcagtcttttaattaaatttactgtatctaacacaacataaggtgtaagtgtgtaacaagagcctctcatcaataatcaatatccggaaaaagaactaaatccaagtttaataccatttcttagaacacattcaagtttttatcttgagtgggattcaatagacatgagtaccaaagtcaagctaaaccttacaactaaggatataagaaacaaagaactctccaagaaactattaccctcaagattatgacaatgaataattcactctttaaaatgttaaacgaaaaagaaaacacaattctgttattaccttcaagttcacatatagattgaaatatcatcagtctcaacaaataaggctatcaactctgtcctacttctagtcttctatgaggttagagtcaagcaaacactacaactaacatgaaactatgtaacctttactcaagaagatgaaaaacaagaataaagactctaaaataggagcaatgttaggtttcaagaaaacttgtggggccatttgtgttcctaggaaatatcaggcacacatggtttcagacattgacgtttagacctcatattccatctacaacacgcatagttagtattatacgcgtcgacatcaatacttacaaacgaatcaatcctcaacaaacgaaactttattacacctctttgttgtctcctacgtcattcattaataggaaggacaaaagaaaaacagagaaattctaaaatgacgaaagagatcaatgaatgcatcaccatttatacatacatacatatatatacacaatcaacagtgtctgcatgtgtgagtaaggaagcttatgagacatctttaattttgatgatgtataagcatgtgcaatgttgggtctctttcaatactcaaatagtacacagaatcaacactttttgatgttttctccttctgcttttggtatgaagtgttcacatcaaatcaaaaattactccataattaaaattgcaacctttagccataattaatcaaaaagactcgagcttttttcttctttaaccaacatttgcttcactaaatacaaatttcgaagctattaaggaaaaacaataattttaacatctaaaaccaaagtttaacatctaagtgtcaaaatcagattagccaaaaatgtgtcaacatttaattaacagtaagtagacaataatgcgacaattaaggaatttgtgtgttacgaactttattctatgaattatttttagagaagaataaagtgaaaaagtacttgccttgggagattgataaccgagtttagtagcagcaccgttaaacccgacccgagaatccatacccggaaggacccgacttgaagaggaatctgagttagtagttgaagtagtggttgtacgaatgagtctctcgaagatagccatgacgaggaacatagagatgagaatagccgttgcgacgaatccaaaggagacagcgttaactgagtcatcgaactgagatttccacggctcttctcgccggagattcatcggagctccgataggtggccattgatggttgaggttcgtctttaagtgctcaaggtctctcatttatgtgtgagaaagtaaagaagcttcaatgttcttcgtttttgggttgatacagagaagagagagagatgagggaagaagatgaagaaggagaaggaagagaggaagcaagtggggttaatatgtgagaaagtgaaagttttgggatttaaagagaaattaaaaaagaaaggaaaaaaattgtaacttttcggggacacacatgttgtcctttattgctcagcttttctcgaaaaacttacaaagagaggagaatagtgaatttttgtttactaaagtaattaagaaaatatatgcagaatctttgagccacgatcaacactttgttacctattaaagacaggcgtgattcgatcattatttttaattagtacagtaattagttaatcctaaagtatacactaacactgcatgtctaagcataaaaaagtgattacgttgagttctttttttccaccaatcaaagccaaaattaaaaccagaataagacaggaaacaatattcctctcaatttggtttaatctctcctcgtatttgatgatagatatacgagctaagtggtctctaatgttggtattaattaggttaatgtatgttttctctgattgtttgattaattctcatcaagtgttgttggtgttggatcttgcacaagaaatcttagtacaggcccatttacatgaaatattattgaaaaaagtctcgtcgagctgaataaacaattgtgaagtaaccaaagtccatttcaaacctcaacatttcacaagttctcattgaattcaaactctggtatcaaaacatgcaaatatcgacaataaatgttgaggtaaaagagcaaaactcgagtaaaaactttacaaaacacgtatttatgatggaacggcgctataaacacagaagtaaaggttgacatggaatgactaattcatttcccacattacctacaactttagttttttttttttgttattcaacgaaaggtttaatctccgattctttcatcttcgatttaaaattaccacacggaatttgagatccacataatgacatattgtttggatagttgctatgagatttttatctaatagtcacttaatgcacttgtacagtcttaagtctcgacaagtacagtattaagccctaatcctacttttaaacatttgtattgaccaaaaactacaacacaatcaatcactcttttactatttgacattttttttttaaaatctcaaaataaacaagtaaaatttagcattattattcctagaaacagtaaaaacaaaaacaaaatctcaacaaccaacgaaattgtagtatatccgattttatttgtcaaatttttgattttcttagataaattcatttcaaaatctctaaaggtttttgaatttatttatatttttgaagtatataaaaaaaagaatgttaattgtaagaaagaaaaaaaggaatattgattcgttaagatagtaggagacaaagaccaaacagttgaacaataaaataaaaaaagaaacagagtatccgaaaatgatgttttaggcactctgcccaaagtttcttcttcttcctcttcctctgttatatctctttctcgtgaccccctatgtaaattcctcacacgaattcaactcccatttttaaaaaagctgctaactttttccttcattcctcctcctctctttcttctgctccaaaaagatcaaaactttcatccattttcaaaagacccttttacgcttaattccagaaactgaattttctgagtaaaaatgagattagaggatagattcgaggcggtgaatcagtaccggaaaaagatgttccggaggatgaaggctgcggtgaagaagacgaagaagaagaagcaaactatgtttcagtatgatccttggagttatgctttaaacttcgacgacggagtagagaatcctcagagattctccggcgactgtaactgtaaactccacagaatcactttgatttatgttgtttctgtcaaattttgaccatgtcaaatctctttctttctcttatttctttacagtcacacttgtttcagtttctctctctctcttctttgtgttatttaccatcaaatttgttgtttcttttagagatttattcgtcaaaacttgaatcttttgtttcaatgtacttcaaatggttgtaagcaattatctcgacaagtcatcgatcattctaatttcgaatcaagcttctaattatcgattttatttttggtaacaattgaaatcgtgaacacactttaaagtatcactttgtgcatattccaatgcagatgccgaaattacttattgaccactttgaaaacaaacgagaaatggttgtttaaaagttgaaactataaacacattttttgcgtactaatctctgtgtaagttccaacgttaatttttttttttttatatggtttgaccattttgctaaacaactaaaattggaatttttttgagtttaagtttaataatgtggaaaaaaatgcgtttattttcgttagatgactgaatgttactataagtctataattcgttaagatttagtatatttatccactaatcaatttcgaatcagttaatcacttacttgaactagaaactaggaacaccattgactcgcacctaacattcttataaaacatgctatatttattccggacatattagtttttgcaacgatcttcttaggtgagagaggtagagataagcaaagcagagattataaagtacattgaagaacagtgcatgcaataaggagacaaagaagcaacttttttagttggtcaaacactcaacaaacttaaaaaccaattcaataccaacttcacaagtagctctctaggaatcgtaccatgttggagaataaaagcctaaccagtaaccaacctctcttgtttactgctaccaccaagtggtccaatattttttccatcagaaagcaaatgactttatcataaatgtaaggccaaaacacttcatgtcaatcaaaatatacaatgcgaagcaatggtcttctcatgttcttgtaactgatcaggttaaaatttcactatatatgttccctttggcagagcctttagttgctgaaagaggtgaagaatcattctgatggccatggcgggtttatgactgtgagctggccagtgggcaaaacactcatgcgtgggtactctactttttcatccagttggttctgagtccaagtcaacatcttcaacaagtctagaagtttgggacctgttaagtcacaaacataagatcatcatcgacttagtatattgacaaagtttcaagaggaaatcttgatgacacatgtgggaaactacggaatgtaaaaatagctgtctcactgtaattataacagtttttggcatcataaccgattgatcctatatattgtttgcatatgaactgtgctggaggtttaagctcattgttttacttgctatcttaagccataactagtaagaaagttgatcacttacattttagaccagtctggctagtaagaatcgctgcatttacttcggcagctgtcttaaaccaccgtgagttgtcaagaagctctctctctgcctccgggatgtcagggagatctctaaaacggagtatagccatagttttttccaattcttccagaaacgccagctgcataagttgtggaaagttttatgaccgtgatgtttcagtatactctaataggatcaaagatcagtggcatttgtggactcagcaagcaagatatagattcattacacatagacaacatcatctttaagcgttattgaaacctaagtaaactattagtatgatgacataacataaattgattaaagtcccataagagatgaatcgaagacatgagatacgtactaacaggacacaaagtgattcaacggttaaaaagacttacgttctgttctaccaatggtttaagctctttctcagcaaaattaaaggtctccttaattgtcacccctatgcggattcgttctatgaacctctgctgattaagagaaaaattcgtcttcagtatctgcaaataccacaatctctcatatggttagaaactgtgacctgttaggaatagaaaagcaacatcacatatgtccacgccaatgatcagtttgcatgaaaatgtgaggcattgtacctcaggatttatagcattcaacttctcaacagcatcctcaagatctccgctttcgatatcccttttaacagccaatctgtcactgatgctcgcaacacctacttctgctgtttcttgttaaggaaataacagagaccagataacacaccaagcactagaaagaatctgagaaagttcttccacaagttgaaagaggatacgcttagttccagattccttttgaaatttctccacagcttctagatatccttcaaccacaagaaagttcatcacgagcctgttcatgtcttctttccgaatttccgcagttgtcagatactgctcccaaacatcactcatgatcagtttcttcggttgttcctgaatcacaaattcttcgttctctgatatctgagcttcttcgttctctgcttccacctgattttcttcgtccgcttcctccactatatactgattttcttcgtctacttggttcacttcattctgattagaaaaaaaggtcgtaaatacaaagaaacacaattggtgaagatcgatgaatacattaccatatcatcatcatcttcaatctctataatctgaataagaaaagaagccaaaaacagtagcattcgaaatcataacattccgattcaaaaaaaaaaaccgatgaagatgaatatatttaccagattcccttcgttatctgccatctgattacgaaaagaagagtgacattagaacactactacgtactctgtttcgcatgatgaatctttatccaatcaacacaagtattacctgttcttgagacgaaacgatcgcatgatcgaatttttcgcatgaggttccgttcctgcaaaaagcctgcgaaatttcaatcctaaacccatatttataaacattattaaaccggcctttagccgaaccgttaataaaccgacgcggttgaaatcgtaacaagattggtttaggtgtaatttccccaaaaatggtataattttaatttctatgttttcagtaagtgtcatttttggtaggaaacataaaggttaaaatttctgatatgatttaatgatctatataggaacattttacttatacattaattaatataagaaaaaattggtaaatcttttgttttggaaaaagattcactaatctaatgtttttggtcaaacctgtaaacaataaggaaaaatatgagtatagaaaacgttggaaataattaatgcttttctcttaagcaatatatttctacttttgtgtttttgtcgtcagcaaattaactatactttgttgcagaaaacattaattaaaaattaagatataacggcgcatgattactaataaaaaaattgaccaatacaaaaatacaaagaaaacaaagccaacttcgtgttaaaaaaaaaaaaaaaaaaacaaagccaacttcttcgaccgtttcttatttaaatctgcgtctctttctcttaccttttcccatttcagagagaagaaaaaaacctcaccggcactataaaagtcgcctggatcatccccaactactactctagaaccttcttctcaaattaaaattcgtcgtttccaaaaacctactcgcaagttttttttcccccaaatcgcgaagtctttgtatccacttcgtcggcgatttcgtgtttgactagttctccgggagaaacttcttctctgagtgtcggttttttgtgctggattttttcgagttagggttttagattccttattctcagacttagggtttgggttcgtcatgagtaagaaggattcagtatttcagtcgcaagcggatgatttctctggtggctttgaatttggagccgacgacgaggattttatgattgacatagaggcgatttatcggattctggatgaaagccctgtttctatggaggtatggtttcgccaattgaaaaactgatgttgttcaaatgcttaatttctggactataatgattctcgtctgatcgaaactgaacttttgagtgattacttccaggttagtcaagaaataatgtctccggttggttcatctgtggtagagtctggcgagtttaggaacacactgatgcaaagtggttagtagacctagaggactcttttgtttactgtcacatttcttttgattactctgcctggaattgaagtgtggaattaatttcaatggtttgatttattggaccacgtaatccattaggatcatcttggtaactgtttaatgtttgtaagtatatatgtttcttgcttaggatctcaggccactggttggtttccttaccgggatttgtatggtcttggagcctcacaaagtgaaatagcagagccaagttcattttctgaccctgagaatggacgattgggactaagtgcgacttgttattctgactacggtggcaatgtggtctcctttcctgtaaattgtgaagatggcactgtatccatcctggatgacatgagaattgaatccaaatgtatgaaccttctctatgaagttttcaggttttattctcttaaaattttcatgttccttatcatttggagctaaaattgagagattttctcactgattgttatatcatgttgcagttacaccttgcagtcccactacgatgactacctatctcaataacatgcctggaaatgactcaggaattggagccacgcaaaattcttccctgatgtctcatttctcccctaattccagttctattgtggactgtgcctcctctgaaccatatggccaccatacaatggatgcacccttatcagaagtttctcccaatttggttcctggttacgcatttcagttctttcccaagaaagaagaactgctaaatgacttgaagaatgagtttatccactgtcagtcggatggtgcaagccgaatggtttttgatagacatgtaggattcgataacggaacttcagagaggaattctgggcctgatgtaagcagtgaaagagaactcagcctcaaatgtgaaatcattccttcagtttcccctgtctgtgtcaaaccatacaacagttctgatggtcatcaagttgaaaaggagcttgagcagcctgataattgttcaagcagttttcaggagaatagagcagtccatatgaaggttaaaccagagcttgcgttggagaacacggtttacagttcaattcctgggaactatagtagatgtagtgatgttcatacagttggaggaacgacactgccatggtctggtgtctctaattgcgcaatctcctatcagacagatgtcgggaaagaatacccttttatcccacctcagactgctttccctggtcaagatattgacggcaggagcttctatagttgttttgattcagatgactgttttcaaaacgtaacagatcctgacccagaaacatcacgcactgagtctttggattatctggtaggagacgaggaccatgaatatattaagaggacatgctttaatctttctagtttcagctctggaacagttgaaagtctttcatcaaaacgaatacccgaacgagaagatgattctgaaatccataaaatagaatcctatggtgaatttgttaatccacaccaatatctacctgtgcagagaccagtgttttcttcagaacattctacaggtagtcaaactcttaataattgtggaggcttgaagtttgagtcaaacaagggaaacatgaattttcatgcagacttgcaggttggtggtgtttaggcgtgtaagccttcttcttaattgcccttaaaatgtctgttcttttttataccattctcgcctggacacacatactttcacttttttctctttgatgttttcttgataaccggatgcatattataatgattcaaagtctgttcttgtgttctgtgcatgaggtatttgtttaagtcttctgatgttggatgcatgtgtgatataaggccaaactgcaatgagttttgtcccatattatccctttctcttgattttgattcaatttcattaagtctaacgacattgcttgaaataacaggatctttctcagcatagttctgaagcaagtcctcctgacggtgtcttggcagtgtcgcttcttagacatcaggtttgtattttattagaaaagtgataacatccctgtagatgtttaaagggacgggctgtagaactttagattttgcgtgtctatttttaaagtgtccttctgtttgcttaactaagatgatttaggccttaatattattcaattgatatggttttccaaatagatggtgggtttttgttagaatatttagtgttaatcgacactgaccatacattacacatgaacagcgtattgcattgtcgtggatgtcccaaaaggagacaagcgggaacccctgttttgggggcattcttgctgatgatcaggttaatttctactgttgtaatctatataatattaccatttactatacgttcagcacaacaaatatatatgttataaaatttccttgtgtaattatctttttctgcagggacttggaaaaacagtttccacaatagcgcttatactgacagaacggtctacaccttatctaccatgtgaagaagattcaaagaatggaggatgcaatcaatctgatcactctcaagtggttttcaatgaaaacaaagttgtcgaagatagtttatgcaagatgaggggaaggccagctgccggaactcttattgtctgtcccactagtttgatgagacaatgggctgatgaattacgcaagaaggttactcttgaagcacatctctctgtgctggtataccacggttgcagcagaacaaaggatcctcacgagctagctaaatatgatgtcgtcattaccacatattcccttgtgagcgtggaagttccaaaacagcctcgtgatagagctgatgaggagaagggtggcatacatgatggtggagttgaatctgttggttttggctcaaacaaaaaagatctcccaaattctcaaaagaagggcacaaagaagaggaaacatatggattgtgaacctgttgagtttctgtctggccctctcgcgcaagtttcatggtttagagttgttctagatgaagctcagagcattaagaattacaaaacccaagcttcaatagcatgttcaggccttcatgctaagcgtaggtggtgtttgtctggcactcctatccagaattcaattgctgacctctacagctacttcagatttcttaagtatgatccttattctagctaccaaacgttttgtgaaacgattaagaaccccatcagtagctacccgggggaaggatataaaacgttgcaggctatcctgaaaaaagtaatgcttagacgaactaaaggtcagtcttcttattatgaagctaaatttcggtagatgttacatcaaagttttctatgggttctaactagtaaaatcattagatacacttctcgatggaaaacccgtgatctctttacctccgaagtccatcgagttgaggagagtggactttaccaaggaagaacgtgatttctactcaaaactagagtgcgactctcgtgaccaattcaaggtatgattatggacgcatatagaacgtgtagacacatttgcttctttttctataatgatattgaaggttgattctttgtttatacgtacttgaattgccaggaatatgcagaagctggaacggtgaagcaaaattatgtaaatattttgttgatgctgctgcgtcttcgtcaagcttgtggccaccctcttctagtatccagtttgtcatggtcatcctcagctgaaatggttaagaagcttccatatgagaagctaacctttcttctgcatcgcttagaagcttcactggcaatttgtggtatctgcaatgtaagactctctactcgtgaataatccttcaaactccaaggctctgctttggatctttgagttgttatctctcgcatttggatgtcaaactctcttatgttcaccatgagtttcttattgtgtcccttcttcatttataggttgcacctaaagatgctgttgtttcactctgtggtcacgttttctgtaatcagtgcatttgcgaatgtcttactcgcgataataatcaatgcccactgtcatactgcaaagtcggacttgaaatttcatcattattttccagagaaacactggaaaatgctatgcttgacttgcataaacttgatgccccatgtgatcgtaccacttcagatcctgttgggagtggtgagccttgtgaaaatttaccatgtggttcatccaaaatcaaggctgctctagatatcttgcaatcactgagcagaccacagagtcccgcgacagtaatgaatgatgtgaatcagagctccgaaaatggagagaataatcagcagcttgacaagtcattcagtttacctgcaactccagcgaagagtagtgtgggtggtgtggttaatgtagctggagaaaaagccattgtgtttacccaatggacaaagatgctggacctccttgaagctggtcttaagagttcaggtattcagtatagaaggtttgatggaaaaatgacagtaccagctcgagatgcagcagtacaagattttaatactctccctgatgtatgcagcttaagatcatttgtttttctttttgcctctgcggccattatgttacacatgatgatagatatactgatgattggctttcttgctgttacttcaggtttctgtaatgataatgtctctcaaagctgctagtcttgggctaaatatggtggcagcttgtcatgttatcatgctggacttatggtggaacccgactacagaagatcaggcaattgacagagcacaccgtattggacagacacgaccagtaaaggtggtgcgcttcacagtaaaagatacagttgaagatcgcatattggccctccaggtctcacatcatttctgcaatgttttattttatttttccactatagtctctattagctaagttactcacaaaacatacattgaactgcacagcaaaagaagagaaagatggtggcttctgcattcggagaacatgaaaacggtagtcgagaatcgcatctctctgtggaggatttgaattatctgttcatggcatgagagctcgatccaattgaagctcttctgacaaactcaggtacatatatataggattttccgggtttgtgcagtttattagcagaagaaatcttttgaaccaatacaagtttatgcaaagaaggaactagaaaaagattagctttgctctgtgtatatagaatgaaactgaatattatcaagaaaaacctgcaagaacaatgtgtacatcaatttctagtcacttaatccaaacatttttccatgataaaatatgactatacaaaccttacagcaccaatgagagagaatcagacaaacaatgaattcaaacctgggttttggttttgtctccaccacatctatcattcaaccagctaacaatatctttacgaacaatctcaatgttgtcgtcgggttcaccgaacaacatcgaatgcatcatcccgtcatagatcttcaatgtcttatctttgctcttagcatgttcgtacaactctctgctcacttcaggatcagtcacagcatctgcacttccgtgcacaataatgaagggaatgctaacatcttttagcttcttccctaagtaatcagtaaccctaagtagctccatcactgtacctaaccgcggtttctcattgtacctcatcggattcctcttggcaatcggtttcttctcttcaactttgatcgacttctccaacagatcttccgtcggaacaatcgcccaagtcggcaagaatcttgagatcataatcagaaactgatcaaccggccatttaggtctcaccttgtccgagattttacacatgggagcaaccaaaaccgctccatcaaaccctaacggatcagcgaattggatcaaaagacaaatcgcaccgcccattgattctccgaagagaaaccgaggtaagccttgaaatttagggttttgcttaatcgaattaaagaaagagatgatgtcatcgacgactagatctacggagggaacataggcgcggacaccgtcagatcggccatgaccttcgatgtcgagagcaaagcaagcgaaacccatctgagcaagaaaaatgggagtggactggaaagtccagctgacgtcattgccgtagccatggaccatgaagatgagaccacgtggcggagaagaggaagagggaagccatgaacgagtgaagaggttgagacctcgaggggaagtgaagaaagatttggagccgatgatgcctttgagattaaagtaatcttcttctgaagtctctccccagaagttgatctctgtttcaagctgttgatcagacatcgaggagtggtttttttttttctgagatgttgtattgttgtgttctgttggttttgatgaaaatgtttgtggcgtactggcgttactcactgtgctgctttttcgtttgcttttggaaacgtcaaaaagttttttattagagattttttttttttttttgtcggctgtttatcagagattttgtttctgtttcacgaatagtgtgggcctgtgggggggggggggaatttgcaagaaatatattgaaaacaaaaagtctttcaatccagaagaaagaaaattttgggcttcgaaggaaaaaacaacttaggccttcgacaaatataaagcccaacgacaagtttcagacagtgttacgacaagggaaaaagactgaagacaaagtgtcttcatcaacaacttcaagctccgaacgaacgcgtgtattgtacacgcgaatagcccaacttcaatcgcgtgaatgatatgcagagaagaagaggaacgacgattctctgaaccaagatataaagcttggatcaaaataataatagtactacgactactactatcccaaaatataaatgatcaaatctctttactgttataagtgccaaaatgaacatgcctatatatttttattcttattataataactaaaacaattatagaactagataaattcaaatatgttttatgtagttagggttgatgatagatatatgttgaaggttcattttgatatattaattttcttgtcaactatctacgcaaatattatatttcaaattaacgaaaaaagtgcttactaaagagattccataacctataaaatctcgtgtttatttgtgggagagtggatatagtcaaaaagctttcaaatgaaacttatgttatgcgcactttcaatctttggatggataagaatcactggtaaaagtgagattactagcaatactttgaccattctagtgaagttggaattcatctaatccatgtcccatccaatgtttttgttatatgacaactcatcttattatcgtgcaatgttatcttttagtacgtgttatgtaaatatatctgtttattgactcacacaaaaacaaaaaaaactatgtttgtttgcatggagactacacaatctttgaacttcacgagcttcctttggctgacaaccgtgccaatcggagccgagtccgaatgtgtcaggtaaaatcaaatccgaaacattgaatggtttttaatacaaaaagaaaaaaaaatgtgatgagtaagagaatacgaataaatatatcgacgaataaatgtaagaaatccgagttatgtcatggaattggctaaggaatgtagcatagaacctaagaatttcttgatgggaccaagtgatgaggattaaaactctcgtatagggctctctagtagactagcagtactgtgtttagattccatatgctcttataatccttcaagtactcattgttaaaggtggaacttataccttctatctataatagtgatgagtgatgacgatcaaacatttcatcttctctctctctcttttagtgcgcattatatatatatacaaacatttgcattaataatctcatttctctgtttatgttccgttgtcaatggataatctttttttcattcagtaagtaatctatagataatcttacagttgagcttgagcttgatatttttataagaggtgttttatacaacataatcgtgagctcaaactcaagtgatacaagaagatatgaatgatttacgctaaatacaagaaaaataacaatttaacaattttatccataacatcaatattaataatgattaataaactattacatatttagattacaaataataatcaataaggaaactatgtggtatagtaatttaaaaagtcagccaatatttaatcttaatttcaaagatatgtacatcccacctaactttttttttccaaagtattttttacaatttcttcacgaagtcacccgcataagaatcaatcaatctacttatgcgatttcttatgttagttaacaacgagtcttataagtcatcaactagtaggtgacttggttgtggaatctctaattggrtggtaatatatcaactctctaatcgttttcttaatacattttccttatcagattatccatcaataacatctcaacgcgtgtcttattgtgggatgtctttgtcctagaattaaagaatacattgactgattcacaatttttctagaaacgtatccccaaaatcttttggccaataaggttattacaattccacatttaattgatattcatagttaagtgggtatccatagttctgagaatcatataagtggacatccattggccaatatggactcatggagtctggtctaacagttaagaggtccccatattgaacacaaaatttaattttataatcttctatttgcgctaagagatacaaaataatgtaaattacgtacaaaacaactaaaatagcaacacaactatttgaaggtgattagataaatcattatctcctattatagtagtacaaactacaatataacttataagtttcaagctagtggccattcaccgattcaagggatacaagtaggaaagatttactaatagatctatctaaaatttaagtttattcaaccatatttttttgttatacatcaaaataatatgaactgtcttatttttcatatagtattttagttattaaataaaatatcaatatagcaaccctttttttagaaatgaagctccaaaattaaatgtttatgtaaaatgctctatattcacgtagcaaataaacagccggaaagctatccatgaactgtttcttgacatatataaaaataaattaatgttcattgagcatgcaattcttgcactaaatgcccaattcttctattaacacttttatatacatagagacattaccttcccaagaaaaagacaaaaaaaaatgaacagttaaatgcaaaaaattaagtatatccatgatgaaacgtaacataaataatccggacatgatttccctctcattccttagcaaagaaagttgaattccatgtcataaccattcaacaaaacacttttcttttgcttcgtaagttttctctagtcttctaaacatgtatttaaactatttcgagacgtacacaacttgtccatttgaattatggaagtaaaatcgtatccacacttaccattatcaagctagcgacctatttttcttggccaaagccattattatgtgaactatataacggtcaagtgtataaatcagtttgtttaccccaaaaaaaaaggtgtataaatcagtttaaaatccgttttagttttgaccaaaatgattacacaactgatctattatacaatcatttaatatactccatgtgtagtggcatagtggatgtgtgctaataacgttcgcagactccgtggttcgattcctctcgtccaactagtttagtggtgagaaaaaaggcctatatttgatttattttctatatgatttagatattcaccattaaattaattagctattgtttgaccaaaaaaaaaaaaaaaaaaaaaattaattagctatcttgaaacaattagtacattgaattgaattcaagaatcccaacgcataaggttcgccacaaaactgcgtcattcgactttctagtttctaatgatgaggttcccttgaatttatttaactctttttttgcatatacattagaaaaaaatcactataaaataaaaattaaagggcaccatcaatttggaatatatcctccatttgcctttctctcaagtctcaacactcaacagtctgctcaaagatgttgcaacgtgacatgtctattttcttgttgttttaatgaaataaatcatcttttttcttaggaatatccgcaccatatataacctgtgagtctatgacgttagctatagttgtgagaagtattcgttagtttcatcaattttaatgatgctatattggttcgtataactttatcttatgatcttttctataatcttattgatatagttcctttataactgattacgctctgcaaaattgatggacaacatgtatttgacttcgattttagtgggcgatacattattaaagagaccatgtgcataacaattaaggagtacgagtgagctttttactaataaatataaagtacgtacatagcaaaaatcatatattcgaaagtttttaaatttatagttcaaattttttgaatacataattagcagctgatagtattgatttgtgtatccacaatacataaaataatcttcatcagtcggtaaacactaaacataccactcctaaacctggtttggtactgcaaaatctatataccctagctactttgacttcggaatcgtgcgtatttaaagtttgataaatgtttatgcattatatatctatattccaatttcccaaattatatatttcctcactagttaagcttatgctattgtggggtcgattaatccgccaattttcttaggttaataggattgtatattagttatatttatattacttttggccatgacgtggttcaaacccatataaaagaaagtgcttcatccactctatttaagtcaagtatacgaattctctcgaatttgtgcctataaatcttagtttttaagatggaattattcgaccaaatgaacaaattaaagccaccaattgccacctaggactattcttccatatccacttaattaaacttttaagaaaaaggaaaagaaattaaacaaaagcaaacaaagatctcatgatctttgcttataaatagaagtccaagtcttagatctttcttatcatctcactacaattcttgatcttcttcttaacttatacctcaaataatggataattatcagaccaagaatatatctaatctattaacttctttgtgttttaccactctcttaatattagctccggtggttatatgcactagacaacaccggttcgatagcccgaaaagaagcttgttggccaacgagcaagatttagtgacaggtttgcctggacagcctgatgtgagtttcagacattatgccggatatgtccctgtcgatgaatccaacggaagagctatgttttactggttctttgaggccatggatctcccgaaagagaaacctctagtcctctggcttaatggaggtaactcaatctttttgaattattcatgcttgcatcagcaactcactattttcattctgattgataacatgtaaattctacatatttctttataacgttagataatttgcatgaaacatgatttatgcctatttcaccataccaacgtcaagtataaagatatattgtcattaattatgtcttcaactattctgcatattttattttactacgattttttccttccactaatagctcttacacaataaaacctagtgttgatttgctgtgtttttaaatatggtctcatgggagaacacattttgaatttaagcatctgaataatgtgtatatataggtccaggttgttcttctgtgggatatggggcaacacaagaaattggtccttttctcgtggacaccaacggaaacggacttaactttaatccatacgcatggaataaaggtaattatttttttgtttttatatagttttcttagcgtcacaatatttagatgtaaatgaaaatgacattaaatgatgtaaaaaggttgatttgctgatgcagaggccaacatgctgtttttagaatctcccgtcggtgttggcttttcgtattcaaacacaagtagcgattatcaaaaacttggagatgactttacaggtaggtccattatttttatttttatcttttcacaagtccattattattataatacatagatatattatctatagtctttgtcttttctatcagcaagagacgcatacacttttctttgcaactggttcgagaaattcccagagcacaaagaaaatacgttctatatcgcgggtgaaagttatgcaggtaacaaaataaataaaatcatttggatttagtattgcacgcccttttatttacttcaagtgtggtaacgcattttcatcgattttcgtcgcgaatttatttttctgtgaatgtaaaataaatatacttgcaggaaaatacgtacctgagctagcagaggttgtatacgataacaataacaataacaagaagaatggttcatcgtttcacatcaatcttaagggtattttggtacgtgtactaaatcttaagggtgaaattctcatcattaacccaaaaatatcatacatactttatcatgcatctactataaactttgcatgttgcatgtcatgcatgtgatcataagtataaattccgcttagaagacccggtacatttttttttttttttttttttttgctacatagttggggaatcctgagacatcagatgcagaagattggagaggttgggtggattatgcatggagccatgcagtaatatcagatgagactcataggatcataaccaggacgtgcaatttcagcagcgataatacttggagcaacgatgagtgcaatgaggccgtagcagaagttctcaagcagtatcacgagatagatatctatagcatctatacctcagtttgcataggagattctgcgcgatcgtcttactttgattcagcgcaattcaaaacaaattctcgcattagctccaagagggtatgtgcatgtgtataacataaaagcctataatttactttgaaactaacaaatatcttttattttgttgggatgccttagatgccaccgaggctcatgggtggatatgatccatgcttagatgattacgcgagagtattttacaacagagcagatgttcagaagtctcttcatgcgagtgatggagttaatctcaagaactggagcatttgcaagtactctccccaatatcctttatggttttttttttgtgtaatatttgaaggaatttgtctgaatgttctttggtattctaacttcagcatggagatctttaataattggactggttcaaacccgtcggttttgcctatttacgagaaactcatcgccggaggattaagaatatgggtttacaggtaaattaaattacgttcacgaaaaccaactaaattcctaattaatttcactctgacgaaaagtagttgactacaacacaaattaaaaacttcgatcactgaaactaaaaaaacagagtatacaattaggtggcttcctacgcaagtaaccactacatactttagcttcttctactttggttggttaataacaatatgaaagaaagtttattctccaatttttctaagccgttggtttttggtttctttttgtgatggatccagtggtgacacagacggaagagttccagtacttgcgactcgttatagcttaaacgcactcgaattacccatcaagacagcttggaggccatggtaccatgaaaaacaggtacccgtggacctaattcaccagttatatgaaattcttgatttgagtattgttagaccggttaaattcttgatgatgctataacaggtaagtgggtggcttcaagaatacgaaggtttaacgtttgctacgttcagaggagctggacatgcggtgccttgcttcaaaccaagcagctctctcgcctttttctcggcgtttctcagcggagttcctcctccgccatcgcggtagagaagaaattcaatgattaaaaagatgatttagtacgtaatctaattatgagtatttttgaaagatttttgggttttgtttcgttaacttgtcagacacacgagataggggaaaacaaggattgtaacttgtaagagagaatatgtgatttatgttacgttttatgtcatgatcataatgatcaaaagaaaaccttcaccgctttgagattatgatcaaatgaaaaataaatagctttttggtgcaatgtcattataatgaaatccaaattggaaccccagactagtttggcgcacacatttttttggtggtttttgttaattctcccttttatataattcattagtaaccgtagatttttgctacttaaatcgatggtcaaatataataaagttatgtatacggtatatgataatctctcttttgggtaagaatggaacattcatgcattaatcatcagaaaatctcttcccaaataagatagtaggatttcattcttaccaaccatatttacttttgtattagcattatattattattattcccatttgttatcttagagataagtttgaaccattgacccatcaaattattattttttcattcagaaatataaatatattatcttctttcttttgccatctttcccattatggattaggaacattttacattgtgaaagaaagaaagcgttacactttttttttttttttgttacagtactctgatttcaagtaaaataataataataatactacacatacttattttttatacttggagcctaaaatttacggccgcacgaacggagtgcacgtttgcttctgtcacatgtttgtttgtccgagtttttgctcttgcatactgccgttgtaaaaagttggaaagaaaataatcttaacttttcaatttcaaattagaaatgaaatcaaagaaattggagcttgacttgtctttttatagatatcctccttttacctattttactatactcaattcttctatttttaggatccttctgaaaattaaattaatttttccatttatgtttgtagtttcttatttctgacaaaacaaatgttggaaaaaatctatccttagatgccacgtgtagctattcgataagtgataagattcagtattatctggagcgttagcgttaaataacactcttaagcttcacatgttttatcgcttacactcaaattaagtctatgtaattacaaaattacaacactctctccatctctttgttttctccgcagatgatgagtgtgaaaacctgtaaagttgaggtaaagcaatttatcggtttcgcttttaaattgtttgttatcgaaaacttgttttgatatctcttatggcttttcttatttatgtgttgtttgttataaactttgttacagcctttaaaagggcaaacaccacttagaagtagcaagaccaaacaggatgctaaaccttattcgtgttcttcaccaccatccatcaaggcgtatacatctccattcgtaagccaaaagacttcaagacgtgttgctttgtctgctgaagatatcaagaatgctcatagagaagcgacaaagatctcgagttcgagctgtggatcaagcaaatggacaggaaatttcattctcatggtggagcttcgaagaaagattatcaattttagaaccatcattgatcttcctcctctgacctattatctctctatatccaatgtacgttacctcttccctacgttttctttctttcagataatcgtatctttgacctaataaactcacagactaatcacaatgagaattttcttttagtttctgaggtgaaaagtaatgtgaattttccattaacaaaatcgaaaaaatgttatttgcataatgaataaagaatgtgaagaagttgtaactagctatatctcatcgtagcaattacaaaaaaaaaagatatcccagttcataagcagtgatcaaataggtaaatccagtgaaaatcgattccttggttaaaaaaaaaaacgcaccacttgatttgtgtgttagatatgactgatttgtggcgttgttgtttgttttctggatcaatggtagatggtgatgcgtacgatgaaagatctccataagctctgtcctgagatcattgacagctcccaaatcctcgaaatgagacgtgaagaagttgacaaggtttatacaaattcctctcataacttaaatccaaattgtgataatttgtttattctgatcaaaactattgcaaacagttgcttgacaatttctacaacgctttgaaatcaattggagattcatggatcgatgaccacgaatggatcatcaaatccaagtatagaagcagtaacataaggaagaatctgtctgatcgacttggtaacatatatcaaagtcttaatgattaatattaatattaaatattatatatcacaacattattgtaacaaaatctctatgcattgttcttgtagtggaaaaggtgttagctgcattagatggactgattaaggggatgaacgagaggcttaatacgacagagaacggcaatgtggaaatgaagaaaaaggttagtccgcggagtactaaaacatcaaatgaccgatcagaatcattggcgaagcaaccgatcaggccaaaaacggtgctgagtccaccgagtaaagtccatggagacttttcaatctctgtgtcaaatcttcctagaaatgtgagaatgcaagcgcttgtaaagctgagtcctatcgatgtaaagcgactcgctatccaaaattttagtcagaaagaagctctgagcaataatggtgatggtgatgatgagagtctcaaagtgaagaagagtgaaacagaggagaaagcaaaagaagctattcttgagaaacaagatagtgtgaagagtcagattgatgataaagattgctcaaaagtttcagtgaaatctgaaatggtttcaaaatcttttgctccgcctcctccaccacctccagggaatgcagcaatcccggtggaaccaccacttacaatgtctgctgaaaaagagtcgtatgctccgcttcctccacctcccggaagagcagcactaccaccgccaccgccacttccaatggctgtgagaaaaggagtggctgctccgcctcttccacctccagggactgcagcactacctccaccaccgccacttccaatggctgccggaaaaggagtggctgctccaccacctcctccacctggcgcaagaggaggcttgggagcgaagaaagtaactagtaaactgaagagatcaacccatttaggggccctatttagattcctcaaggggaaactagaagggaagaatccagaagtaagatctcgtggcgctggaggaggaagtaaaggcgcgactggaagcgctccagccagcggaaagcaaggaatggctgatgctcttgctgagataacaaagaagtaaatcacatctcacttcacttataaacaacaaaatggtcaaaactcatacttgcttaatggctacacaggtctccttattttcagaagatagaagaggatgttcgaatgtatatgacttcaatcaatgagcttaagacagatattacaaagttcaagaacaaggacattaccgagcttcaaaaatttcaccatcgtattgaatcagttcttgagaaactagaagatgaaacacaggttagtgataacaacataagtgatcaatgtcacaaaactttcttcatcatgttcggattttgtgatcacaataatgtttgaactgtgttaggttctagcaagatgtgaaggattcccgcataagaaactcgaagcaataagaatggctgctgcattatactcgaagctggagggtatgatcaaagagctaaagaactggaagatagagtctccggcgaaccaactttacgataagactgagcgttactttgcaaaggcaagtcatagaaatactgattttcgcttgtttcttcgcctttctttttttctggttatttcctctttcaggtagctgaattgatctgaggacaatgatataaataacagatcagaaaagagattgaaactctagaccagatcaaagcagaagaggaaaagaagttcaagagcaataacatccatttcgacttcaacatccttgttcagatcaaggaattaatggttgatatctcttcaggctgtatggaactggcattgaaggtagtaggactaacattttgcatacatctgatcactattttgaaacccttttaaccagagtctcttggttcaacctcacaggaaaagagagaagcaaagattgcatcgcaaactactgcagaatcactcgaggcaaagccaagcacgaagaataagactccaggatgggctaaaacgttgtggagggcatttcattttgcatacagagtttacacatttgctggtgggcacgacgatcgtgctgataagcttacaagagagttggctgaggagatcgagcagattcttggaaaccaatgacttgtgacttatgtctcggctgaaaatgtcacaaaggtattggagtctttatagaagacagttattaaagagaataagtgatttaggttaacatgttgtaatgtagttagttaccaaaaagctgttgtactctgataagtcttctcactgtatgactgcacctataaaaaagaaaatagcatatcaaggttaccaaaacatatcctagctatcgaatccagggaattaaacacttgaggacgacagatctcagtattgaaccgaggtaggaaaactgggaacttccgtgtgacaatatggcaagctctagccagagacagatgcagagctcgaggaatggcgacagtgagagaagaagccaagaggaaaggaaacagaacaaaccaagaacaagagaaaagacgagttttatctcagagagctaaaactatttaataaatttttgccgacttttccttacagcttcaatgatcatagatgcacatttcaaaactgtaatatgctgcgaaatatcataacgtaatgacaattatatataaactataacgatggaacagatttataaagaaaaagtggtagagcaaacttgtatatatgggattagtcaagaaaactacaaaaagaatggagtgtatgagtaaaactgtaaaggacaactaaacaaaacctaagccgagacaaacagtataactctaaaagagagaactaacgtactaatagcagccttataatcttatatcatacatcaatgcgatcaccagagttagtgatcaccccaaagcattccaagttcttttttcttttctattgcagaagctgtacagagaaattggagaatgaagaattaattgccctttttgatccctttctacggtgatttgcaggattcaatcactcccatcactgctttatgtgtctccggagggatcatgttcagagtcatgtgaaatgcctgaacatacaaaaaacacaatcactttttaggatcttgagatttcctactgaaaccgagcaacaataaggtgttaaagaggtgcataccacaaatctttccaaaaccggtacaagaattgccagattgcgtttcgggagatagtccttgatggagttgcgtatacttctactgctagtgagtccaagagcatgtttagtttcttagagtgttaaaatggatatgacatatatgataagattgaaaacgaaaagtacctttcagttgaaagaaaggcgagtagtagagcagagtatgcttctacaatcatcttttccgcttccttttcgccttctaaaacagcttcttcatcatcctgaatacaaaaaataaccagcacgtttaacaataaagccttttctgtggatctagaagttcgagtaaacaacaagtgatgctgctactcactaaggtgaaggtagttgtctcttctttggtctctgctgatccttgattggtgagaaagattgaacatagtaaaggaatcatttcctgttcactttcttgcaactcttctggttttgtaataggaacactcgctgaagcaagccgtgatctacgaaaatatcagttaactggttagaaaagaatcaccacccccgctgtagggttaaagacaaaagagtgtgactagtttaacttgtattgactcaaccacatgatggtattaattttttactgcaatacagcaaactcaaaagggttatcataaaagctgagatttgtttctaccaacctgttcactccgtctctttcaaccaaatttaccagcaaacccaagatggcaacaagaaaatctaactcctgatcggtaaggtatttgtctttcttctgatgggacgatcccgtcttttccatctcactgaaaagctgagatctggtgaaagacggaaagtgtctggcaattaattcagccatgctttccagccctctacacccaccaacttgtcgacatccgacaacgttatcatttgttaagttcatcaaaacctgcagagagatagataatcatgaactaaatttgtgctactccagctgagagaatttcaccgcagaccagtaaacaggtgataaaagactctaagaaaattacctttacggctgtcagaaggcaatcaaataaaagacagagacattcttcatcaatgtcatttgtacaatgagatggttgcagcgatgtactgcagtctctgttacttgattcttcttgggaattcaacctatggtttgatgactcttcttggcttgagaacagctgatacaaactttcatctttactttgtttgtagcatcctttcttcttttgagctctagacttcttttggtttacggacactactgcccacttggaaggtttataatcttctaaatcaaacgcaaaaggatcttcgctttcctcggggggtgcaaactctccaaattttttacagattggttctccagcttgagtagtccttaaagtagttctggcaatgtcactacccaatgacgctaatctccctgcaaatgagccagagatggtggaaccgactcttgtttttgacgtagtaggctcattccccgacacacttgattgagaacccgacattgatgttggcgagaaatctaaatggattatggattgacttctttgggatacactcccattcctcgtggagatagagccaacggtcgagtatgtatctgaactgattgtcacaacctcattggtaactgcaaaagatataagtggcttagcatagaaaaaacagagaccaaagggggaatacaaagagacagtgagaggagagggactcatttatggctagaagaataaattacctttcctatttgcttccaaaacagaatcatgattaccaccatttgaatagtgagaattcacattgttcgtgttaggacttgaaaaacctccacgtaggtgaagacctagccatcagtccaaccagtaatcagaataagagatgatagaacgagcggaagtcaaaatgtgtaacacttcagaacaagacatgctaacaattgcgaacctgaaagcatcttgatgacacttattgtgagctctgtgaaagacattcgggaatcatgagaacccaaacatttcttaaatccgagcaaatgattctgaaaagcaaaattagcgttacagttatattatatcagacactgagttatatatactgcaacttgataacacagctgattaacgtccgaatctccaggatattgtcatgaatctagaaaccaatatacataaaagatacctggttgtctgtgctgaggaatgtagcattctccatgattttcagacacttcagaagcaacattaaactctgtttatgcagattatctttcttttcctggacggaaagtgcgtcgtattccacccaacgctgcatatagaatttgtattagattctctcaatgaatataacataatgcaattgcaaaccgcccgcaattaagacaattaatgcacaaaggagagtatacatggggcagtagaagattctggaaataacctatatagtttatcaatagaagtgccttcacattgctaatttgtgtcaaaagagcttattctaagtataaacaaagtcatacaccactgtaaagaaagtcaacaagtaatctctctttcaatatacaaagaaagcaccttcacttaacccacgtttcagtaaattggattgcaaaaagaatagaccctgacaatacctaaacaatcacaaaagtagcaatctaagatgctttatacgagttatcaacctcctaggcaatcatagactacctttctatattacgaaagatatcagtgcagatgaaaaaaaaacatacagcttcacacctccataacagcgtgacaatccataacaacctcaaggactgcatcaagtcctcctagttctcgcagtttctccttgaaattccctccagtcttctttacagaaccagaagtatctggatgggggtaaacaaaagatcataatattatcaccttaattctatgctaaaataaacctagagaagcaaaataaatactggagagaacaggaacttttcatcatctataacctaatctaactgattctaagatgatctccgaaatagttagctagtcattacttccgggagaaaaggcaaaaagttctaataccatcaaaagaaattttggatacgcatgctctctccatggccaacaaagctacccattttgtacttagctcaggcctcgttgtttcagttatatagctatcattcagtctcatttctttgcaattaacaagaagttcctgaactcttgagaggatatcactggagctcggatcatccattttcactggatcccgtgctgcatcaacatccttaagtaatgataagagcttaaatcctatattgcgtggcttcccttcggtgctagtgacaatcacaggtttcaacaactttatcagaaacttgatgcacttgggtgactccataaagtgctcgtcttgaccctggagtcatgaaaatgaattggtaaagttatatacggaaaatgtgaaatggtgaataagaaaccaaaaaaacgtcaatgaatcaaagattaaacatcaaaaacatacataacagcatctgcaaatcacttacatcagcagttagcgcaaagaaaagggtggctgcggcaagattgcttggtatatcatcaaggctaagaaccaaaatcgcatcaattatggattgggaaatcctgaaacaataagctcccacaaaattaggtaacttttcctgagatttcatgatacttacgactcagcatccatctaggacttcttatcgactcaaccaacgaatcaattaatgggacaaacacaaaatctccagtccttgggagagaatcagacatagtcctaaaaccttacctcgcatgcatcatgatacaaaccctattcagtaatacaccattccaatccactacaaaccagattctctaaactgtcatgccctaatcctcttcagaagtccaaatccatcacaaatctgatttacaagaaccaaaaatacagagaagagaaaacgaaaccatagagtttgttggccctaatcgtgccctaatctagaagaccggaaaacaatgaaaacccacatgccaatttggaaaatttctcatgaattgaacaaaatcaaaccccaaagagaagggggaaatcgaaaaatctaagaaaaaagagtaaagcttcttacccttgagccctcaaggagcgacgctggtgttgagatgcacaaatcgacaatagagaggacaagctagctcttctgatcctgagctggtgtcctttcctcaacccatcaagcgcaaagttaacctcatcctcatgctccatcagctcaccaaactcctgagcctcaagcaaagtggaagtaaaagcagcagcctcagcaccgttcctgactcttttcgccctccgtacaacacctccgttctgtggataatcctctctgaaatttgacctggaagaagaatgccagagagaggaagactcttgactggagaaaggaaggagagagtaatcaatgggctcgatgtccggcgacgaagaggaagagagatactcagtctgagaaacagagtcgtttagagagtccgatagggtcctcggaatccccggcttacggcggccgtaggttcgttccatcatcgccgagacgagtcgttgaatttgcaaatttttggggaagagttttaggtgagaaaatcgaaacaagggtatttcgggaagaaagacaaatatataaaagtgctcgtaagatctgcgtagctgaagaagagagcagcaaatgcgattggccgttagttttacaattatcattaaattttgttgttaccacagtaataactaatactaagtgagtaaccagaatgttttaaattactaactaactttagcaattaaaagttaaaaagagcacacaaattttcacagtctgatttttggggtttcaagttgtgtctgaattacaactaaacatttatttgttattgatttttttttttgagtattaccaatgctggaaagttttaaatttatgctagtttgagcattttatattcaactgattcaggaaattgtgtaatgtactgtatactgtaaaatatagaatttaccagatataaaattaatagtaaaatatgtatctgatttttttctgttgaaaatgctttgacaaatcattatgtatcaaactatgtaatttcttgttgacaaaaaaaaaaaatatgtaatttcttcttatttatatacatataaattttgcaacggacaaaaataaacacaaatttgaatggttgcagaattttacatggtggctgaggcgagaggaccattagtgtcaagatggtgcaggactgtgaaccactgcaccaaatgtgagtgccttaataacttttgcacttgtaccggaaggcttccaccagctaccgccctcacccccgcatctcagccttcgcctctactttgatttagaatataatcctacaatgaactatatgttttccctacttatgatatactacaacattctgaaattgttttacatgatgtaatcaaaagacgtgatcgttgctttcaaatatttacaaaataaaatctcacatgagcctagttttttcatctgagcatatctccggaatgtatttgtagtccgctaagcgcaggcgatattgtgaatccgtttccgtccatacggtacgaaggatgcgcgagcgggactggtcggtccggaataggaggaacctcgatgtctccttcaagcattttcaatgcatctaatattgttggccttaaagcaaccaatacatgggcacacaatatcccaacttgcaagaatctctccattatccctttcggattcgagagccctgagccttcctctctcaacaaagactgctcaagagcttcctctgttttccctgcttttaccaatgaccaagcccaatctgtgatcagaaaagtgtttggtgatccagaagtagacagatcaagagctttccttccacacatgatctccaatataacaaccccgaagctatacacatcgcttttctcggttaattgaccatagagggcatactctggagccaagtaaccgtgtgttcccgcaactctggtagtgagatgagactctccttctctactctgtttagctaaaccgaaatccgcaactctcgctctcatatcgacatctaacaatatgttcgtacctttaatatcccggtgataaatagcgggtttcacaccgtaatgcaaataagccaaccctttagccacatccaaaatgatgctctttctctgaggccagctcaatggcatcttcgtagtctcacctcgaggaaacaagtgatcatcgagatttccattagacatgtaatcataaacaagatatctctgactctcactatcatcatccaccatactacaacctctaagcggaacaagattcctatgtttcaaattgctaatgatctcaacctcattacgaaactctgcatccccttgaaactcagactctatcaccttcttaaccgcgataaccgatccatctggtaaaacccctttgtaaacaaaaccaaacccgcctcgaccgatgaaattcttctgcgagaagttattcgtagctttctctagttcctcgattttgaaccagatagagccagtgtttggtctccatttcggtctagacccttgatcctcccaaccaacctctcctcctttaacagctttaccaaaccggaaatacaaacaaatcaaaccggcaataaccagagccccgaaaatagctccggttatccctaaagcaagagccaccgtgtgtcttttcttctttgagttcaatggagatctcaaactcaaagagaagagacaagacaaagcatcatcactctcaggtcctttcttgttaacaataccagcagcgtaagtaaccacaaaatggtaacaataaacaccgtgagagctattaccgtccaaagtgatgagctgtttttgaaccctaaacccagccgccacgcaagcgtcgcatcgcgttagatcagtgagaccactgctacaggcggagtcaagcgccgtagatggaccgagacgagatacccaatcttgagtcgtttggattccagcacaggtttcgttattgatgacgaactgattcggatcgaaacagagagaggtgagattcgaagatagagagagtgaactaagcttcgtttggagattgttgagacaagagattgaagtagcgagatttgggagacggaaattggaagtttgtttgagacgatgagctagagggattccgattagagttaaaagagattggcaacaactgttcttgctatcggctgatttgtcggacttttgacaatctgttgtgttccatgggattgttaggacatgagagaaatctaaaggacaagtttgtgatggagattgagcaacgcagtttgtgagatacaggaatgaaagaagaagaaagagaatcgagttaggcatgtttatgttggattatggtgaaatcgaagatatgggtttggagaatctgaggttttttggtggtggaaagtgagtgattgattttggcggccatgaaagttgaggaaaaaagttggattcttttggtcaaagaggctgctttgatctgtttgactttggaagcaacatggaaatgcagcttgtccccacctgcaactgccaacactaacgatgaatgaaacatattccatagtggctacgtttcactttcgtttttaatgttaaatgtgggaaaattgaaaaagcaaaattaatagatagtactaggattataaaattttgacaaaattaatgggacaaaaattcagacggtaagacaaaagagaaaactgaataaaggtcaactagagatatcattttaaacagtcgactaaattatcaaattagactctttacgtgtagagttgttattattgcttgctgatgggaatggggatccactattgcggataaaaataacttatgcaacatacaaaactaccaaagattgtgctacaaccgaaacggatcattcgttattctcatgtcagtatgctcatgcactttcgataaactatacaagtctacaaatgtaccgctggtaaatgtatcttttgagtgtatccataatctcatgataagtacaatactttggttctgattattctctctcaaaccgggtcgatgcatgctcatccaattcctagtaaaaagttatcaaaggggaattaaataagaaaagcctataaattttcttaagaaaatatttttatttcggaaaacaaaaaaacagaaatttcctaataaaagctctcccaaacaactcggctcttcgtctgtctgataatctaattcatccctacacacgacaacgacaagtttcctcatctttctctctgttttctctttccgctaatttcttgatcatcttcttcttgttctgtatgcaatggggactcctcgttcgccggctacagatttctttggaatttccaagacagcatgcaaagcctacaagtccctcgtcaccaaattgcaccctctttcttctcatcgcaaatccgaatcccattccgatgccgattccgtacgtttaattaacatcttctcttattgtgacgaacgctattttctgatcatcatttcatttacgttttcacatttgagcaatgatttttgctatggaataacgtagaaatagataaattgttcccaacaatgatcaaacggcgaaatattcgatttatatcattatggatttccgtttctttcttctttttatctcttcgaggattgtttgtgaaaacctctgtttcgtaaaataaaaaaatcatttttcaatccagagatcgtgagaacagagtaaaataatatttttgtttgtaaaaattgataggcaatccaccggagatatttggaggagaaatttgcggaggaggatgatctcattgctgctcggagaggtctccggctacagagcatggacgatagtagcgtcttcaaacgtcgttcttctctgttatcaaactcaagtagccgccgtagccacacgccgcaagctagaccaacgtacctctcttcctccgcttcttccaaccgccgttctgctttctcaagaagcacaagccgtagagacgaaggcagcagccacagcggagtgagaagccacggtttgaaatcacgtcccatctcaaacaacaccagtccgatgacgtcacctttcacgagtcctagaggaaaagatcaaaccttaggtgatttattcggatctgtaaagaaactttcgtctcctacaagcaatagtccgataaacggcgtcaaacaatcttctccttcgtcgatttcgaagagtgctagcaagagagataaggatgaaagaggctctacgagctcggcgacatcgacctctctgccatattcaaagagtaagagcacgagggatacggctggatcaattgcaaagagtataagccggagaagcacaacgccgatagtgttttcgcagtctacaccgccgaaaaaaccaccagctgtggagaaaaagcttgagtgtacgttagaagaactctgccatggtggagtcaagaacatcaagatcaaaagagacattattaccgatgaagggtttgtttcttggctctcacgttctcttattttactcaatgagtcattcattatgttctgtttttttgtaacagattgattatgcaacaagaagaaatgttaagagtgaatatccaaccgggatggaagaaagggacgaagatcacattcgaaggagtagggaacgaaaaaccgggctatctacctgaagatattacatttgtggttgaagaaaagagacaccctttgttcaaaagacgtggagacgacttagagattgcggtagagattcctcttttaaaggctttaacaggatgcaaactctcggtgccactattgagcggagagtcaatgtcgataaccgtgggagatgtgatcttccacggatttgagaaggcgataaaaggtcaaggtatgccaaatgctaaagaagaaggtaagcgaggggatttgagaataacgtttttagtgaatttcccggagaagttgagtgaagaacaacgatcaatggcctatgaggtgttgaaagattgttcttgggcataaaggtttataatatgcatatgtgtttcttcatgcctttcacttccttcattgtatatatgtttcctactagtcgagtgggcttgatgcgttaaagttgtgattcgttgacattaggcttatttttatatattttcctttatatatacattttgttttcttagattgagctgttttttctatgattctttcttgctgtgaatgatacaattgtcttcttgtagttaacattgatcagtatatcgacaaagataactatctgaaaaaattgacaatcaacttagctttagtaatgcttacgacttttacgagttctttggagtgaatccaaaagaaaacgatgatattatatactataatctgcactagcatactaaatgaccgcatagcgcagtggattagcgcgtctgacttcggatcagaaggtcgtgggttcgactcccactgtggtcgtatttttgttatatttttaggttttcgggggtttgtaggaaatttaagctgcaacgacgtacctatgctctccgttatcatctcactgctttcagaaactgtaactcaaaaaggaacacttttacactaatatcccttttctctggtgagagctttttgtgtgataactgaaacatcagtcggtatatagactctgtttgtagatttgggtctcaatatctttaatagtcactgaaaaaccagtagcattgcatcacctcataccataattataataaatatatataagacaaaatatccattaggtacttttcatcgcatgataaagaaaagaaagacactctgtgaacatatacgtatgaactcgtctctctcatgtgcccgaaactccttacaacctttatttgacagttaaaaaacacggtcacagaagtttcagcattttcagtcttccttcgtgctctgcatccagcttcgggggagtgtaacttccgtgaagatcctccacaatgtactcctttgtgagctctcgcttggtgagaatatggtaatgtctctgccatatcctttggatagccatagttgcagcaagaaacccatacgctaaaccaagaatggcaaagatgacgacaaaaacaacaacaagagcgaaacaagcttccattgaagcagggaaacaatccaagacaccccatccataacagcagttctggcatccagccatcctcgggtcattaccgttgagagcagagcaatgtagaatgattccaagaaatccagtcagcacaaagaaggatataacccctaagaattcatgacacaccaaatgttcaaacgcgtgtaaggcttctagatccgtggtatttgaaaggtatactagttacgcaataaaagggagatgaaagattcagtaaataccaatgcagtaataaaacgggatgggatgtttcgacaaaatacgatcccaatcatcgttgaaagagttgcgaaactctccgtctttgtccatcatatatgcgaatccggccatcacagcgataacctagagtttcaacaatcttcttattatcagacgtcaaaaagattcagacaatctctatgaaaaacaagcttcaaaaatggcaagtcacagtgagcaaaatgaacaatttgatagtcatcaacttccattgtcaatttcaagcacccaccatgtgtacgcagtaaccaggtcaagattcgaatctagttcactttgtgagccagattatgacatcatataaaatttatcctcagaatctcttaataaatgctttataatcctcacgaaaactatgaagagaagctgagagagagagatactcacagtctgcacagctaagaaaaccaaaagcacatctcttgcgacaaagagtctgaatttagcttttctacgccacgaattgttatcctcaaagggttcgactctcagatgaaactgtgctttgcaagtagtacagtgagagaaagcaaaaccttctttaaccgatcgccaatgatcgagacatgagcgatgcacgaattgttgagtgcctttacacatacaaggtgaaatcaattcatcgcctaacaattcactatcgtcctccaaacaaatacgacaacaaggagctgaagaagcatcgttctctaaatcttcttcagcctttatctcatcgctatttcctgccaccacagacgcagcagaaggagacgccgaagaagaattggtgtgatctcctaacaaaggagcggaatcacttagtttctgtgaatccggtggctgcaattgtacttcaccttgcatcattgatccaaaccttcgctaaccctaaatttcagacaagaaatctgtgggtggaaatcaatcggtgtgattagaggactaatgattcgaatcgagtcaaatacattagcgtctctgtgttcgttgatcggctagagaataatcgtgcggggatgtgagaagattatttacagaagtgggagagaggcaaaacataaaactggagaagaagggtcaatgcgagagagaaacgaaagcttctttattttgggaattgaaaattacagagaaaaagggaaatggggtgagagaggctcgaactctcgacctcaggatcactcaatagctatgagacctacgcgctagccaactgcgccaccaccccaatgttgggaatttgtacacgtgttaatttattatatcatattcatttattctcctggcaaaacagtgaccggtccaccacaaattgccaaatcctagtatcattagtcaaagctttgatgtactcgtaaacttctaatattaaccgccatttatcagtaaaatcggttgagttgttgctgctagattatgattagtagattgctgctataaattcggtttacaaaaattgtatgaaatggcgtaattttggtttttgtatctgattattgttcatttaattcggacagtgattgaatctctctcctaatttcaatgatacgtaaaccgattgagatatcatcaacccggctttgttattatcgactaatggttgtaccggtcggtaaagtccggctattaaattgcattattaaatttaggttctttaacgacatttagggggaagcacatgaatgctgcaataaatgaaagaagcaattgaataaagaaagagaagagagaagaccgttggagaagacgaggaagcaaccatgtgctttggtttctacttggtacagcattccatgagcttttttcttctctttgactagtatattttattgtagaaaattaaatggaggaaaaagctaaactttcttaatcacagatgcagattgattctccatttttctcgggagaaaagttcctcgccggagatggagcatatgatgaaagaaggaaggtctcttgcagagacgccgacttactctgttgcttcggttgttactgttttggtctttgtttgctttctcgttgaacgcgccatttacagatttggaaaggtgtgtttttgttttgtattttttcttcgtgtgtgtgcctactatatgtttgttgaaatgctcagctcaaaagaatgagtgtgaagaacgtattatgattttttttttttttctgcacacttgccacttgggttaactcttgctctccatgattcatgagctggaaatgttttatctaataatgggtgctagaaagtgagaatttttatggacgagatgtttcttcttggagatatgtgtttatgcttgctaaatgtcagtagaagtagtgttgatgttttcactctaagagaagtcattattacaggatgtgtctttcatgttagatatatatgaggagctaatttcatgttctgttttgttttcagtggttaaagaagactagaagaaaggcactttttacttcacttgagaaaatgaaagagggtatgtcaaataaacctgtgctgatgttgtggtgctttatactttctttctttttcgtttgattttgacttgttaaactttcttggtagagttgatgttgctgggacttatatcacttctgttgtcacaaagcgcgagatggatttcagaaatctgtgttaactcttcccttttcaatagtaaattctacatttgctctgaagaggactatggaatccataagaaagttcttctggaacacacctcttctacaaaccagagctccttacctcatcatggaatacatgaagcctctcatcaatgtggtcatgtaaatatttactttttctatcgacttaagagcctattttccttttgacttttaattatattactgaactggatgttggatccaatgccagggccgtgaaccatttgtgtcgtatgagggactcgagcaactcctaagattcttattcgtcctgggtatcactcatgttctatacagtggcattgccattggtttagccatgagcaaggtacacatcctagctcctaaatctacatatgagtgttaaatttgtattcttaagtatttctatgttgctccgaaaggaagagatgtattatacttgcaatcaactttatcctcatgtctagaggatgtagagaacctcatgatcaaataattagtggtcctaagtatatgtcaaatagaaattatcttcaatctgaaaattgagggaaaaccttcgatattatcatttatgtgcatagagtgttagtaagattaagcagacgaacatatcaataccatctgaaacagtgttgtctttttatcacgtaacacagatttacagttggagaaaatgggaagcccaagcgatcataatggctgaatcagatatccacggtaaatgacaagacttttctgtctctccttcaaattaaggcttgtatgtttttgatgggtctcatcttgagggcacatgaggaactgtgttatcttaggattaagaacagcatgaaactaggattctgttaagtatttaggttgttcattcatgaactcacttaagctgtggagaggcttttatgcagatttgcaaatttcgcttcatcttgactagcagatcaaatccagtataatcacttataaatactgatataggaaaaattcctttctgtcctagtataatcacttatacaggattgaaatgaactgtgtggaaaagagatgtatctctgtaattttagctttatcacaaacagctgattcattgttaaagatacttaatgcctaggatgctttagtttccagtcatatataccctagtcttcttgactttgttcaacagcaaagaagaccaaggtgatgaagcgtcagtctacatttgttttccatcatgcctctcatccttggagtaacaatcgttttctcatttggatggtaactccccatgcttttaccttaagctgtaattttttaaaaatttcatatctctagttaagaacactgttatatttttctccagaagctatttttacggcatttgtccagcaataaaatatatgtttgcattgcagctttgtttcctgcggcaatttagaggctccatacgaaagtctgactacttcgcacttcggttaggtttcctcactgtgagtaacttttttatttcgtttctcagtctttccttcaaatttaaaatataactttctagtaatttctcaagaattctcatctaatctggtagctgacatgattagttttctgaatccggtcttcattactttaaaatttcagaaacataatttgccatttacatacaacttccatatgtatatggtacggacgatggaagatgagtttcatggcattgttggaattaggtatgcgtttctgagaattgagatcttatcaaagactctttattcaactgttttcagaagatttcgtaagggagttacagaatgggactgatgaatgtttcttgatgaatcaacagctggccactttgggtttacgctatagtatgcatctgcataaatgttcatggtaacttatcggttcaataaatacaaactacattccatttctatctccacattaaagctttgtctttactaattcagtgatttccttgcaggcctgaatatgtacttttggatatcattcgttcctgccattgtaagtaaaagcaagattaagtaaaaagcttgaaattcataaggcagtactaacactcagagcatgtgtttgtatctgttttgttgtctaagcttgtcatgttggttggaaccaaacttgagcatgttgtctccaagcttgctctcgaggttaaggagcagcagacaggcacatctaatggggctcaagtcaaaccacgtgatgggctcttctggtttgggaaaccagaaattctgctacggttgatacaatttatcatttttcaggtaagcaaaaagacttttcctttctcaattcttcaagccatgatattactctattcacacagatgatccttatatatttcctgctaatgcagaatgcatttgaaatggcaacattcatctggttcttggtaaggccaccttataaaatgcatcaatacttaaatcagctatgcaaagtttttcagtttttgagaagatcatcaatttcatgtatcagtggggaatcaaggaaagatcttgcttcatgaagaaccatgtgatgatatcaagccggctaatttctgggtgcgtttcaaatacacaacaattcgcagcaacacactgtctcttaagattttttttttctttctggtgaatgcagggttctcgttcagttctggtgtagttatggcactgtgcctctcaatgtaatcgttactcaggttcgtcaaaacctttcatatatctacaattccacaatcttaagcctatccaagtctgtgactaaacatcgttcataaaaactctatggtttcacctgaatctgaacagatgggatctcggcataagaaagctgtgatagcagagagcgtaagagactcacttcacagttggtgcaagagagtgaaagagaggtctaagcacacgagatcagtgtgttcccttgacacagcaacaatagacgagagagacgagatgacagtggggacattgtctaggagctcatcgatgacttcactgaatcagattaccataaactccatagaccaagcagagtctatattcggagcagcagcttcatccagcagtcctcaagatggatacacgtcgagggtggaagaatatctgtctgaaacatacaataacatcggttcgataccgcctttaaacgatgagattgagattgagattgaaggtgaagaagataatggagggagaggaagtgggagtgatgagaataacggtgatgctggagaaacacttcttgagttgtttaggaggacttgatcttgtttctgcttttagaagcttggttcagttgtaattacttgacatccatacaagaataacaattaacaaagtaaatcttttgttggtccagtaaaaaaaagtattcaatgatcaaagtacatcttttgttggttcagaggtaaatttaaaatataatagcatggattggaacgagatattatggcattaggaaactttttgattatggcagtataaacaaagaccacaaattatggcagctatacatatattgatttcaaaacagagataaagacttgtcacctgtcatttgattatttatgaatttacctctgcagcattttccttcttctgtgcagtcacgcctaccgatggatttgattaatttcctgtcgattattactaagttgtatttctagtaaatacaacttaaaagtagttttgtactcggtcttaaaactagttttgtacatagtttttgagtaagatactttgttttttttgggacaaagagtaagttagtaatatcaaattttatcatagtgattgttaatttatgtcaactacgaaattaagaagttatcaaatctgatttgagttatgataacaatgtcattgatagactcggtcaattatggcattaagaaaatctaaggatttaagtaaccaggtatcaattattaccgccgttggtattgacttttaaataagacttgccagttgtcacacacatgtcataaacaattgtttttttcttcttcttttcattcaaatgataaaattaaacttgcactatacagtttctatagaatcatccatcactagatctggtctggcgatccccaaaagatcaagtcaaaaatgaataacagagaaatgaaacatggtaaaaaaaaagacgagaagatgccggttttagtgatgccaggtttcatagccggagcaacatttctggttatttggatcatacgacgtgagttccttttatcttacttttggtgtaacatagatttccttgcttctgtttatcttttgaataatccatatataggctatagaaagggctccaccaaaactaactcgccgccaccatccgcgcttccaaaggctcgagaatgtggtcctgtggcgtccactaaacctaacttaacacctgcgccgccgctaggtcagccacggctatacgctcaagaatctcaacagtacagtcttgtggcgtccaatgaacctgacttgacacctgcgctgctaggcccgccaccgctatacgctcaacagtctcaacagtttagtactattgtggtgtccagtgaaaccgacataccccagcttctggttcaatgttgtccgccagatggagaccgtggattaacaaatcaatactatgcgggacaagagttcgacttaggaggacacgacaaggacagcgattccgattaagagtagagtacttttttaaacaacttttgattatgaatttacctcatccaccatttttcttctctttatcttgtgtgcaccggcatctttagactataatatatgtcgtaagaagaagaagaagattataattggttgatttcagttattttattatcaaaaaggaaagagaggataatgtaatgttgtaatcttatatatatatatccgaatcagggcgtcatttcagtttactaaatcatttttatttatctaatttatgaaccatagatgcgttaaaacgtctacttaaccttttgtaaacttgagtgaattgatgaatggagtaaaatttcaagtttcatcgcattcgtttgtgttattaagttttgtgctgagagcaaatcttcttttagccaaacaatgggtgttgtggatttctagacttgattttattttctagcaaactaaataaagttttgggcccaatgggcctgactcattgaacaacaaactagccgttggtccgtgtttgtgcatagctcggagacgagaggttgtacgtgtacggaaagtaacagtacggagattagtcatgaaaaacaataaacatggtgcttttatgttttatatactccaaaaaggggtctgcgtgacagtgagatagacagagagagaagaaaaagaagcgagtgagcaaagtttctcaaaaatgacgaatctgtttctagggtttttggtgatttcgttttgcttacttgggaatttgattcacgcagctgacggctcgattcacgactacaacaacagcggaggcttcaccaaaatcgccaatgctcgctacttcgttggtggttctgaaggaatctatggttctgagtttctggatgttcatcatgcttcttctgatacacctctgctcaagggaaactccttcatcaggtacgcatttcgttttctcttctgactctgttcatttcctactgagttagggttttatgtgcgattttatagtgtgagcttgtagatttgggttttaccgcttcttaggtactggatttagcactttggtgtaaagtttccaaggaaattttaagagatatatgtatatgagcttatagatttgtattactgtttcttattggattttactatttgcatttctatggggatttttggtttcttatggatgttcatcttttatgtttttgtaggtttgatgatatcactttcgtaagaaccaaggaatctgctagcaagcagaattctactctggcagctgcaggcttggtggaagcgatactgtttgaggtgaagcagcgagatagagttggtggatcttttttcaaatctgaggacatgtgctgtacgccaaaacttgcggatgctggttcctgcaatcttggagaggttatgattagtgcagatcctaatgatcctgaatggcctaagcggattcccacttttttcaaaaggggtgaggaagaagtgaagatgtctccggaagctgtcattatcaagaaaactggattgtacactgtttacttcatgacatgtgatccggaattggatggcgcaacaatcagaggaagaacagtttggaagaacagaggtggctatttacagggagagaaagctcctttgaagaagttctacgcctccatgcttttggcttacgtggttcttggcctagtttggtttccacaagttgctcagtattggaaagatggaatccagttgcatagtcatatcaactttgtaattgcatttaccatgggtgaattggccttcctctaccttgacttcgtttatctcgactcagctggtacaagtcctatggaggttacagtatgggcaataaccctttcttccatgaggaaggcactctcccggcttctactgttggtcatatcttcagggtttgggatagtgagacctaccctaggtggcataacattgaagatgcttcttattggtgtcttatgctttgttataagtgaatccctcgggttggctatgcaatttgggaacatctctgaaaatggaatgaattacttaatgctctcttgggctatactggaaacttgctttatccagtggattttcagatccttgtcgaaaacgcttaagaagctcaaggtaagagaaacatacaatcctccttttcttttgattattgatataacaggttaggcacactgattgctacatgtttctaacatatcacttgtaaatatatctttcttgttaattgttgaaagttgcagaaaagccatttataaagatccatttcttcttagattattcatccctgctaatcccatatttttcttatgtagctgaataagaggaacattactaagctgcagctctacaagatgtttgcaactgtgcttgtaatcatggttgtgctcagttttgcctggatttatgtggaggtaacatctcaacagtctagtgataactctggggaatcacttgaaaaaagtcatatgattgtgtgactgaaattgttttctgaatcaggtatatctctacagctccttgagtcagttttggaaagtgaagtggattgttccaacactttggtacatcctttcttatgcaatgttggtactgatttgcctcttttggcctccatcggaaaaaccaatgaggtatggtatcaatctttctgtacttgccctttatcaatcgggtgcttatgtggcctgttttaagttccacactaagatcttgtctgttttgtactaacatgtttgaactttgtatatctgatcttctctgctgctagttacacatttttctgatgtatatatactggtttgaaattgcaggtacctatacgtagctgacatggaggaagagactgaagaagaagatgatctctccactgcagaaaccggtatgaacgcaacaaaggctgaatacgagaggagtgaaaggaagaccctgctggaagcattcatcctattgcttgggaatataccaggggagaagtgaaactccccatcttacaaagttaccgtccttttagcttaagctgcctacttctcatcctttttcagcttaagctactcctaatcatccttttaaacctacggctttaagtttttttttaactcatataatcttctgcagtagacttgacttaatcggattttctgtttcatgaacttgttggtagtgtggaacaaatgggaaaatgaatatttttggaacaaattgattttctgtttcatattaagttaaatcattctgtttccactgaaataaattgttttccaaaaatcactccgtttattatgtctttgtttttaagaaataaaagtgagaaaacagaataacgcgaaaatgtcgacatatttggctaagtatagacaagattgggaagctctgtttagttatgcgtcagtctctcatcagtgttcaactgccacggagcgaaccgattcctaattgcaacgtcccgagtccatagaatgtcgacactctttcactctttctccaagttgcctcctttgagtcctttctcatattttatagactcactttctgtttcttgatcccgaggaagaagaagaataaactcttgttcccatgatcttcgtcgatgttagtaccttgagattcgattcgtctctccgattctttataatcggaatttattggtttgtggaatctgattttgggttctcttctattgctcttataggttctttggaaattgtttcctctatactcgtttggatcaggaagagactctctctcaggtatttcatcgaacacttaccctacaatttagtgaaatttctgtgtgatgtagaattctctagattcttctaatcgagttttagctgagaaaattagtgaaatgaaatgagattttccattgattgctagattccaaaactttagcttgttgttctgaattgcacttatttgttgtgttgtatggaccatggaaacatccaaaagagtccattttgcagatcattcccgagacaatggcttcttctaccactaaaatcctctgtgatgctggcgaatcagacctctgtagagacgattctgctgcatttctccttaagtttgtagccattgcctccattctactagctggagctgctggtgtagccatacctctcattggcaggaaccgccggtttcttcaaaccgagggaaatctctttgtagctgctaaagcctttgcagctggtgtcatactcgccaccggctttgtccatatgcttgcaggtggcacagaagctctgagtaatccgtgtttaccggattttccgtggtctaagtttccctttcccgggttctttgcaatggttgctgctttagctactctgcttgttgatttcatggggacacagtactatgagaggaagcaagagaggaatcaggctgctactgaagccgctgctggtagtgaagagattgctgttgttcctgtggttggggaaagagtgaccgataataaagtgtttggtgaagaagacggtggcgggattcacattgtcggcattcgtgcacatgctgctcaccataggcatagtcactctaatagtcatggtacatgtgatggacatgctcatggacattcacacggacatatgcacgggaattcagatgttgaaaatggagctaggcatgttgttgtttctcaggtttaaatctcttatcccttgtcacaaactgtgatacatatatcaaagtagaagctagtgtgtgtgtgttgattacgcctacaaacacttgagaacctcaaaagctagcttctttaagtcctttactagtcctcctcctttgcagtgtgggatttatacatcatcttatcgattatctcacccaatttattgattttgcagatattggagctcgggattgtgtcgcactcaatcatcatcggtttatccctgggggtatcacagtctccatgcacgatcaggcctcttattgcagctctgtcatttcaccagttctttgaaggatttgcgctcggaggctgcatctctcaggcacagttcaggaacaaatcagcgaccataatggcttgcttctttgcgctaaccacaccattagggatcgggattggaactgcagtggcctcatctttcaactcgcatagccctggagctttggtcactgaggggatactggactcgctgtcagctggaatactggtgtacatggctctggtggacctcatcgcagctgattttctgagtaagaggatgagttgtaatttgaggcttcaagttgtgtcttatgtaatgttgttccttggagctggacttatgtctgctctcgccatttgggcttagctcttagattacatattatctactgtagaatcaaataatatactgctctcgcaacttcatatttttgccttgattcatatgaatataatagacaagggagcctattagaaataacgtgtggaaaataattgacattagatttcaaaaaaacaaccaaaatgaagaacaaaacattgaaatttgttattattgattgatcttataaaaggatgagccaaattagggcaacattagcgaagtaacaagagagatgacttaaacatcaagtaatttctcttttgatgaaattcatcaaaaagctttaaaattttacataatggcttcttctttgtgggtttcgatgacgacatcagaagtcggataagccacacaggtcaagacatagccctcactcatctgttcatcgtctaagaagctctggtccgactggtcaatagaaccagagacgactttcccggcgcaacttgagcaagaaccggcacggcatgagtagggcaagtcgagtccggcttcctcagcagcgtcgaggacgtagacatcttcttcgcattcgacctcttgttctccctcaggtgtgatgaacttgaccttgtaggtagccatggccgtgacgcggccgccgcgagcggtggaagatttgaggccgaagagagattgtgtgttggcaaacgggagggatctgaggctgattggtgtctgttgacggcggaggaaagaggtgcttacgattgcgctggagagagcagtggaagccattgttgaaagatgattctacagattttgtgagtgagttggtgtggctttgtgaaaatgtcgtagaaaccgtgagggagagaggattataaagaggtgaatctgccacgtggcgtacgatgtgtgggctcttgtgttatcttcttggtgattgtctctatgtctttgttttacattgtgccctctttcgttggtgagagtaatatgtggtttggacttgggacaagtctccatcagaatatgggactaggaagattctaggcttatttgggttctaaattgctatttatgaaaaagaattgctgatatgcttcaaattgttttgtgcaattttattgcttgcaggtcccactaaattttcagattgagccaatgcatgtaatttcccaacagacttgagtcagaattttcttagaaggacttcaccgtatataacccaataaactcaccccgtgaaaccaaattaacaccatgaacgagagttaacgactcccaaggcccaacacatgacaataattaaatgatccaattgctcctagatgacaccatattcaatgatctaagtgaagtgaagtaaatacgaccaaaaaaagatagggaaaaagattacaggtagtagtagtatagtacacccactcgattctaatctaaagagaacaattcacttaccaaaatgggaagaaaaaaaaaaaaaaaaaaagaagaagatgaagagacaaaaagcccccattgaagaatatattatgttccttcaatataatatataacctcgtaagagcttccttctaattggatttgttttctctttttttccgtttacctcttctagtcgcacttgatgtttctgtagatcctccttacaaacagatttgatcccaggtagccaacagctcctgcaaaattttcacataacgaaggtttagtcaaatcaataacaccactcgctagtttgaagagagtgaagagagtgagctcaccgcaaaggattccaaggccaagacagaacatcatggtgtatccaaagtagaagcttgtctggaagaatccggacatcttggtctttacgtagtagtaatagatggagtataagtacacatagacagccgtcgaagcagcagagaaaaatgaagtccactgccagtgatagttctctgcattcagcaggaaatatgtacccacgattgtcacacacaccgtcactatgacgagaatcacaaaaaccagtaacatgaatccatacacatagtagacctgtcgaacaaacaaaaacagacaactttcaaaaatagccactacaatttactttcgtcgttatatgattagcaaagacaaagttagtcctacttaaagaagtacagctgctcaaactttagctagaagtctactacaactagcgtaggtcttaatgtagctgttgtgattggttaatatgcattcagtgagggctggattacaaacgctggttaggcagattgctgaaggggggtagatttttaggggtttcgttgaaagttgagagtctctcactaatcaaatctctccggtttggccaattggaataagaatttgcaattccataactttgttcttattaagagaaactatatttaccttgtaattccagaaggatgtgaagacaaagtacatctcaatgaagatgcttccaaagggtagcaaaccccccatcagggagacgactgatggagtcaagtaccattttttctcagggattggacgtggaatagtcttcacacggcatggattgttaggagcaccgctccaatttcttccaacaaccgttccgaggagggctaaggggaaggaaatgaacccccaaattacaaacacaaccaccattgtcccaaaaggaatagccgcaagagatccatagaatatggcaattgtgtttaggagaaagccaattccgaagcacaaaaaggggaagagagaagccgtgaggaccatgcacttgatccaatgtttacctgaataaaccagcatttaaattacttgaatagttagagaggaaagtaacactggaggggtccgccaagtcgagtaagtcatacccccgcttcttgagtacattccaccgctcacataaccagagacaaaagaagtcagagcatagcacactatgaaagttgtgacgattgctcctctcctgaaataattagaataagaggtgagcaaaatccaatatacaagccaaccgcatgtagggaaaacaacaacacaaaattggtctcaagagaaaagaatagtgtaatacatacccaacgtagagagttcccacgatggccattaatatgacaagaagaaccagcaacgccaactgtgcacctgtaccaactaccgctgagagcagaactagactacttgctggcctgaacacatctccatgcacaagtttccaaccagattcttcacttacatcccgttcctgtgcccatcaatactcacgtcagaaatggctatgaagccttgcatttagaagtaaagaaagaagtgttggacagactgctagagagtattaacagctaaaaaaacaattgtgcaactaatgacaaataaaagttgaggaaacatcaccaagctctcaagatcatcatcttctctagcatacttcgcataatcatttctgagagtcctcatcaatatcattgagaccaaaccggtgaggaaaataaccatcatgaacgagttaaagatggagaaccagtggatctgcaaaaagaacaaactctcagaaggcttataaagcttgaacagaaatcttgaagagatggaatatagaactttggtagattcttggaagaataattatggcttgcacttatgaacaagcatgaaatggggtattcagtgtgatacattataaaccagtgaaccatttggaatcacagacagtagcagaagggtacaagactaattcatagcatgctaaaagttacctggtgttcaaagaacggataatccagatatacgtcaaagcggcgagcaaatgtgacatttgttggaatccattgcacagaatacgtcaggtccatttttttccctgcttccaatggccttgggttgtcttgagtgagattaacatgaatgatctattaaaatagatacataagatcacagatgtagttcacatgatatccatactattgcttaatggcgtggtaacaaccgacctggtctttgttgtatttgacaacaatgttcttatgtgtgtaaagaacatgcttgccgttttcactatttttgtcaggatgcagctcacccacaaagcctacaacagcaatgagacagtattaaaactatataaaacaaacaaagaacataataaattttggatgtttcaagtaaatatacaaagttcataccccacaaaggtagatcatctgaagttagaaccacccgatgaaagtccacgccaatcagatgccacagaaaaaggtgagaaataaggttagcaatccaaagaagttatgtaagattatatatcctacaacatccaatgccgtaaatgatattggtaatgcagtgaagttagatatcggaataatttagatttgcatgatgtaaaaatgaaccaaaggaaaactcagcagatacaaaatgtttccaaactttacatagtaggaaattgcaacatcatagataataaatcagcattattttcatgaatttcagtggtaatatgtacaacagacgtgaaacatacccataaaaaattcgaaccagtagctagattcaatggcatctttaaaatgcttgaccttagcttcatcgagttcaagcggacagatgacacttctctcgacattctctgtggaaaaaacagaaaaggtattgtaactagagaataagtacgaatgtacgataactgttaactagtatgaaaaagaagcttgtataagaattgaaacgtactcatgaattttatcgcaatctcactgtcaatcagctcatttccacctagaacttcaccaagaccaccccatttgtgaacattgtttccagatgggcggcaaaatggaagactgtaatagttgtatgtttcttgtggattgttatatgggccaactttgtttacccatagggtgacctgctcctcggcttgatactgaaaaaggtgaaggcaaaaaaaattgacttgacagaaaagcacagaaatgtaaaagtttatgggattaactagtaagagagagtaagaaccaaaattccattagagagaacagaacaaaatgtcaaacgtagacagacagatactgataaaggctacgttcaatatcatttcaaaaatcaggagttaaagtcttcacacaaatgatggttccatagaaataatggctcttgaataatgctaccagattgctcttgaataatgcataacccgcctttatctatcatctttcacgcagaaaatatatagttggaatcgactttaaatgtcacactacttgcgagcgtaagaaggcagaggagcaaaagcattaaagctagatctcatgatctccaatatcacaaaaggcaataacaattttgagctgaaactgaccatcagcaaaagaagccatgtgtgacactttcagtatcacattttagataccaattgaaaaaaatcatcaacccgacctcggaactataagatctacatctcgaagatgctaatacattaaatgccactcaattacaacacaactcagtgttgatccaagtatttgaacatcaaacaggctaccacgtgcagaaatcaacgagaatctcaaaccaacatcaaaatttcttattaaaatcgagattgtgaaaagcctaaatcacaatgaatagacaaaatacgcctagacttgcaacgaaaagatacgcctaaatcacaatgaatagaagctcgaggatcctagcaatccgtaaacgaacagatccatgaaaaaaaattcaatcgcaaacaccatgcaaatcacggatctacggacacagtgctcgatttcgagctgcattaaaagaaaagaaaaaacgactggagatccgagtcttaccttgtgatctgaatcggatgcgaacgtaggagtgagaagggaaacgagaagaaggaacacgaggacggcggcggaggaggaagacggcatcgtgaaaaccggcggacgatcagatctgaggaaggacggagcgagagataccaatcgagagagagcgagatcctcagctcagtgttttcactttgtagagattttgggtaatacaaaaacaacgataaggcttacaacttcttttttgctctattaattaattgggcttgtagtactaagaaacgtatattaagtttaaaacccatataaggtcttttaatgtttgctctattaattgattgggcctttcgttctaacaagtgtatattagtttagcggcccatataaggtctattaatgttttcatatacgcgcacgaactatgtcatttcaattaaaatatacactcacacatgggaacataacttcttctttttttgtatatatgttgaaaaatgttaaaagtagatgaaaatcatgacataaattcattaaaaggttacgtttgagtgacaatcttcatagagaaaaatgtgatttatggacaatgactctctctatatagaaccaaaagaatctaaggcgaatttgcttgctgctgaccactcgtgtcgtgtaaatagtgtatagttgaagtgttgaattagggagaaaaaaagcgcgttggtgacaaaaaaaaacgtagttatacactcgaatcagcaagggaaacaaacatgtatggatcgcatggaaacttgtgggtccctctttcttttaaaaaatctcgtattaattaaataaatggaaaaaaaaacatgatgggagtttgtttaggcaggggagattcttcttcattctcatcattatttctctattaatttcaccccaaaaaagaaaaaagaaaaattccaacaagaaaaaaaaaagaaaaagaaagttgattcttcgcttaggcttgaaatctctccaatccaaatctcaaattaaccttccatcgtcatctctttccctttttttttcccactttctttgcgaatcgcgagatctcggaatcgcatccttgattttgggatactgttttttttttttttaatcttgtttcattttcacgtgaaattcttagctgctagaactggacttgaatttcaacgagaattttggagattttttttttgtttgggtttttcctttctgttttgtgtgtttggaattagggttgtcgagcgagaatggacaagtacgagctggtgaaagacataggtgctgggaattttggagttgccaggctcatgaaggtcaaaaactctaaggaacttgttgccatgaagtacatcgagcgtggtcctaaggtatattcctctctgtttttgtgttttcattgctctccatgagctggtgatcctatacccagatatgcataattggaatgaattgctattaagcagaagagtcgatttttttttgtaaatttcttatcgttagctgattgggtgtttaacgtaacgttagttatcttgtagttgtaatatttttcctgaaaagatttgtacaatgagtatttgctttgtttgttttttttgatacagattgatgagaatgtggcaagagagatcattaatcacagatcacttcgccatccgaatataatccggttcaaggaggttagtgaatttcttgttgcttgacatgggtggtgttcttgctatgaaaaagtttgttgataatctcttatatctttcatcttgcattccttgttgggtttatggattttataggtggtgttgactccaacccatcttgccattgccatggaatatgctgctggtggtgaactattcgagcgtatatgcagtgctggaagatttagtgaggatgaggtgagcttgccatttgaaaaattgtgctgtgcttttgcgaatatgaaattactagtatttaggataatctgcatggtctttggaaagattaggaggaagggaacaagagaaaacatgtgaacctccttttatttagtatcaggcattaaacagttagggtctacgttctaatcctttctctcttttccaggcgagatatttcttccagcagcttatatcaggtgttagctattgccatgctatggtaatgtagagacaatgacttaagcaaaatttacttatccattggctgtttgaagtcgtttttttttaatcatgtgttgactattttgttgcagcaaatatgccatagagatctgaagctcgagaatacgctcttggatggaagtcctgctccacgtctgaaaatctgtgattttggttattccaaggtctgacactaaaaaaaaatccaagttccccccttgtcgacgagatcctcttttgtgatttgttattctcttttttttagtcctctctgctgcactctaggcccaaatcaacagttggaactccagcatatattgcacctgaggtcctttctcgaagagaatatgatggcaaggtaatcaagcatcatgcacaatgcaatgaacttccataaacccatgagtatttatgatattgtcatgctctttacatttttacttttgaatttaaaaagtcatctttgtggaagtcgctaagatttgaagcattttttcttctttcagatggctgatgtatggtcttgtggtgtgactctttatgtcatgctggttggagcatacccatttgaagaccaggaagaccccaagaacttcaggaaaacaatacaagtaggtttcttttttgaagccatgtatctgcatatctcgctttcgccacatcctattcgtcaatgtgtgatcttgttatacagaaaataatggctgtccagtacaagatcccggactacgtccatatctcacaggattgtaaaaatctcctttcccgtatatttgtcgccaattcactcaaggtatacatcaatcaactgaactaaatgttttcaaagatgccttttgatttttctgaacaattgagctacttgttgtttcgtagaggatcaccattgcagaaatcaagaaacattcatggttcctaaagaatttgccaagggaactcacagagacagctcaagctgcatatttcaagaaagagaacccaaccttctcccttcagaccgttgaagagatcatgaagatagtggctgacgccaaaacaccgcctcctgtttcccgatccatcggaggttttggctggggaggaaatggggatgcagatggaaaagaggaagatgcagaagacgtggaggaggaagaggaggaggtggaagaagaggaagacgatgaggatgaatacgataagactgtaaaggaagtacacgcaagtggagaagtgagaataagttgatattttggtttttggtctgtgtaagaaagaagtcgtcgttggtttgttgaaactgaaaagtctctgttctcgtgtttgcctttacaatgctttggctaaggttttggttctggttttggagatttgtaaaatttgcagtataagatgaacaaacagagaggttgatgatgagaatgagtcctttgctacgcatggtactatgaacattgtgacctccaataaatatttttgtaaattagattttattttccgaaaagattcatgtatttgatttttggatttcttatttttattttttttcgttccttatcatttttttgaaaatgcaaatctataaaatacaaatgtcaacaaaaaatcaaattgaaatgttcggaattcaaaaataattgttttcttttgtttttttgtttctgatgcgaaatgtgaatatattagagggaaaatatcccgccattaggaaaccggataatcttctacggccttgagctcaagtcggtggtggccattttatcctgtgcttcgtctcgccgacttccctgattgtttcgccgccggagtgttaaaagcaacgttacagaagcaagagactccactgaatcgaaaatgtatttcctggctttcgtttcaaagtcatttttagggttttcgttttgttctttctcacaccgattgcgtttcttcgtcctacgagtgttaatatttagttgtcgattagggatttcgtttcgcatgggtaaagattaatcctttagactcatgactgatcgattcacttcaatttcctgtttttttttttgggagtattttattgtcttccaagttctgaaataggtgggtaataactaaccgattcgttgtgtctcactggatttgataattgtgtatgtatagtctcagtgataatgtgcagttttttcctgttcgtgtttcattatcatcagcacccactaatctgaatgcaatttctttttttatttgtttgttaagtgactgaattgcggtgtcaaaggaagtaaaaattactggaacctcttcaacatgttagacccatgattaattcgaatcaaatgaggcaagaatagtcttttccttgtaacactctggtttattccaatatttctgccagtttcttcttttgtttgatcttcgttattcacttttacaatgcagtaggagtcacctccccgaagttcagaaacctagaggtcctcaaacgaattggtcagaacatgcaaaggcgctcgagagttcatcatcggtgactaagtttctgagctccaatgtcctttacgccctagaaagccaaaagcctagagatatggctgcaaggtattatggccatatgttccttctttcgacaacagtcatctccttctgtctattgtcatttactttggcccagtactctctgttgtttggatttgtagaagtagaacttttgaagatgaattatcaaacgaagtcagtgattgatggataggtttccaccacattgtgttatatcgcttttccagcatcacttggttctatgtgacaatgcgtgttttgtttccttatcaatagctttgtacaaactagaggcttcagcttttacatggctcgactttcataccaccaaactgctccaaataatattagatgatatgtgcatcatatgtctctttgatgtatctcactatggtagtgatggaaatcttgttatgttttgttctgtcttcttcttaaatatgtttacaactatgtgattcacaattatttgaaaagctttgttctctttctgcctaggtcaattgcgtttcccagtgtgaatgtgcatactttggcgcacccgcaaatttcaaaggtaatattttttgaagggatattgtggtggtaactatagttttcaattgtggtcataagcaggatcttcattacatgtttttctttctctttccatttctttcagtaaacaatttatctcatcgtagttcctattttctcctagtttctggttgacctttcccttgtatatagacctcttttcatgaactgtacatatatgttagttattggtatcctatgtgggcaggcttggcgtgctctttcaagtctttcagtaaataatacctacctaagacctggcgttactccccccattgatgttggcaccaatgactcttattctgcaagagagagatctaccgcaaaagttatatctagcactggtggttctgtttattcgagcactcgaccaaacctaagtgcaatgaatgtttcaggaactggaagatcctttcatagtttcccttcctctgtccctggtgatgataaaatagttgctgaaaagtttccacggggaaacaatgagatcagagaatcagaacccagttgcacgcatttaaatggtgtggagaagtcattcgggaattctgcattcccagctgagcagttcgaatctagaaaagcatgtcttgatgatatggatgatgatgacatacttgaggtaatgttgtcagcaaaagtagcacatcttttttccttatgttctcattcttgtatttgtagtatctttaagtttttagcacatttccatgacagaaaatattaaaatataaaaccacttaaagcttacactatggtatagactttcgtatatgcttatgcagaataatttttggtggtgaaacttgtcaattcaagcatgttaaaactttgtgatacagaatattgacgtcgaccaaatagtgatggaacactaccattcaacaagtaccccacagccatcagtgtctaatttttcgttgagaactccacctgtagatagaagtgcttccagattagaagaagagtgcaatctgcctcctgaattatgttccaactgtagtcatggaataaaggtatgagcaccgcttttctcttcttcttttttatgcttcaatggttttgaaacgcatcggttttctcattttgttggtatctactcagttggggctttgtccagaagcttcaacccatgtggagcagatgaaggacgtgttgcttgcaatatcaaatgaactccttgacgatgctactgacctgagtcctgatcgtgttggacagctccgtcaagagaggtctatatcccaatcagttttgttcccgttttctttgctgttaaagttggctcttttctataagagtaataatttggcttccttccggaggctagtggtatattattttagcaaaatttattgggaataatatagtgaaaattgattaggcttaaagaaataatagacaatgcatatgtttcttgagtttgagtatttgagggtatcacaactgtgagtatgtcttgacttttggtcagtttctaatgtaccacaactgtctgttgttgctaggttacggctgaagaaacaaattcagcagctcgagaaccatatccgagataaagaaagccaaaaatctcagtttttgtcatcgacagctactcgtattttccagtatgaaacacctaaatcaacaaattataaaatggatcaaccacaaactgattttcgagcacatgtaagtgaccaaggcagatatgcctgtgatagctggaacacgccaagagattcttccttttctgtagatagatatggtctttcatctgctcctgtagagagggaacaatatgttccaaagattattgacgtaacctacactgaaggttcaaacgacaaaaaatggagcagtcgtgaatttccctggacaaggaaattggaggtgatttgctgagtttctcttttctttgttcacttacgttcaatgtgctcatgtgtttccttgcaaagttcaggttaataacaaaaaagtgtttggaaatcattcgtttcgacctaaccagagagaaattatcaatgcaacaatgagtggctctgatgtttttgttttgatgccaactggaggagggaagagtttgacatatcaggtcactagacttaaacctgtacattataatttcactttgattcttcaatctaattcttgtttttcactgagatatttgtataatcctacatcaaaaatgatgaaagtttcaagttattttctcgaaactgttttctaacatctttctttggcagctccccgctctgatctgtggaggaataacattagtaatttctccacttgtgtctcttattcaagaccagataatgaacctattgcaggtgaacactgcagctacccccggcgattctatatatatcttctatttcatttataaattattctcagtggattcttttcatctcacacttggatatctgaatcatggttacaggccaatataccagctgcttccctaagtgccgggatggaatgggctgaacaactaaagatctttcaggagctgaattccgagcattctaagtacaagttgctatatgtcacacctgaaaaagtagcaaagtgagttgttatttttatataaaaactctctttctgttattttaaatttgttctgtattcctcatattactagcctcgggtaggatatattatggcctatggattatgcagtactaccagaggtttcttttaattctagattggtattagtcgtagatgtggacgattaatgcaaggctcaccacactgaaagatattacttgtaatacatagctaagaactatctatttttgaatacagaagcgattctcttttaaggcatctggaaaacttaaattctcgtggtttgcttgctcggtttgttattgatgaagctcattgtgtgagccaatggggacatgactttcgaccagactaccaggttaggccatcaaaagcttcatacaacataccctcttactttcgagaaacataattgtccttttttacgtaccaaatttttgtggaatacacagagtcttggtattctgaagcagaaatttcccaacattcccgtgttagctttaacagctacagcaacagccagtgtgaaagaagatgtggtacaagcccttggccttgttaactgtgtcgtgttccggcaaagttttaatcgtccaaatctatggtaatctacaactacctaaacccatatatgtttccagaatgctgcttaccaagaagtttgcaggtattctgttgttcccaagacaaaaaagtgtctggaagacatcgacaaatttattaaggaaaaccattttgatgagtgtggaattatatattgtctttcaagaatggactgcgaaaaagtctctgaacggttgcaggttggtcatttgtatattgaaccgttatcaagttctgtgcataccacaaatattatgttgaaccatagaattggatactattttcaggagtttggtcataaagcagcattctaccatggcagtatggagcctgagcaacgtgcctttatacagacacaatggagcaaggacgaaatcaatataatatgtgctactgtggcatttggaatgggtactggtttttgctaatgttgttttaattcattgaaaatgttgctgcccattaacattgcacatttcaggaatcaacaagcctgatgtccgctttgttattcatcactcgctcccaaagtctatagaaggctatcatcaggtatttttaattatacaatcaatcatgtaaatcttattaaactgattccacataaggctagatactgttatctcgtctagaaactcacataagctatattatttgtaatcaaggaatgcggtcgtgctggcagggatggccagcggtcatcttgtgttttatattacggttatggcgactatgtaagtgcatataaaccaacatattgtatttttcttatccgctttggtagcctggaacgatgaagttctttcatctttccgctcttgatcatgtttatgcatataaaatataatttcagatacgagttaagcatatgattagccaaggaggagttgaccaaagccccatggcaactgggtataatcgtgtagcaagttcagggaggttacttgaaacaaataccgaaaaccttctccgcatggtacttaatgtgaagaatcctacttttttgctttcaatggtatacttgctgagatatttctcctattttattgctgcaggttagatactgcgaaaatgaggtggaatgccgacgtttcctacaactagtgcatttgggggaaaaattcgattccacaaactgcaaaaaaacgtgtgataattgttgcagtagtcagagtttgattgacaaagatgtcaccttgatcacaaggcaactggtacagaaatcattagaatgctcactatgtatgtgttatttttggtcacatctcactatcttctgtgcgttgcacaggttgaactggtgaagcaaacaggagaaaggttttcttcagctcatattcttgaagtctacagaggttccttaaaccaaatggtatgcacaaataataattatccatacttccttcaagctttatgagatatttctacacatatattttgtttttcttccagattatgctaattattaaaacctgtttggcctcataaaccatagtctcttttctatacttggtaaagactaattaataatgaaagcgtaatccaaccagtgtgggtcgatctcttgaaaaaataactgttttctttgcatctaggtcaagaaacacagacatgagactttgcagttccatggagctggaaaacatttatcgaaaattgaagtctctcgtatcttgcattatctcgtaacagaggatattcttgtggaagatgttaggaaaagtgatatgtatggatctgtgtcatcgttgctccaggtacttaattgtgaattatttccatttcgcttctccctctcagtaatgattgaggatgatagtaagctaactggaaccctaattgtctctatttacctatttgtatctaggtgaataacgcaaaggctaccatactattttctggaagccagactatagtgatgaagtatgactttgcgcttatatctttctttatggtttataggaactaggtttaagcaaatcattgcaattacctgtattttatgtgttaacggcttgttaaaattactttagctaagacttccataatctgttgcaggttcccttcttctgtaaaagtattaaagccaagtaaacagggggcaaccgcagcaaaaggtccgctaacatcagagaagcaaagtactcttccacttacaacagaagatgctcctccaaaagatgtggtatagttctgtttagttcagtctctttttttcttgtcgacatgaatctaccactctgaattgctgaggttggttccttgatctttttctctagaatctctctgccaacatgtacacagccttgaggaagcttcgtacagctcttgtcaaagaagcccctgatggtgtcatggcatatcatatattcatgtatgtctgaaaaaccattccgcttttcattttccaagctttgtacttgatcatggtcaattcgattctttcctcacagtctctgtgtttgtggtggcagcaattcaacgcttcagcagataagcagacggatacccagaaccaaagaggaactccttgaaatcaatggccttgggaagtaagtagttctttatcttaaaacctctactcaaaatgaagaaaagtccaaaagtgtttgatgatggtgtgtatctttaaactctctttcagggccaaagtaagcaagtacggtgatcagttgttggaaacaatagaaacaacggtgaacgagtactatggaaccaataagaaagactccatcatcagcaacgatagtcccgattcagggaagagaagaagagacgagaacattagtccaaatgtagccgaggatgatgatttcgaagtaagcccaagccagtcctgcaaaaaaacagtgagaaacaaaagcaatgaggttcttcatggtgaatgtatagatggagatagaagaggcatggagcttgattttgatttcaaagacgaagatgggtcagagatacgaccggagggaagagtattaccgtggtgaagttgtgaccactgaaattttagttgtaaagaaattttgatgtaatattttgttaacttctatggcctactcaatgtaccttaattttcagtagattgaagaaactagttattaaatgctgacttctttgatgatctcttttttttttttaatcaatcatatattgagatttgattagaatgaagaacctacaggtggcgatggatcattaataatataagagattaataatataagagatattattgtgaagaaaccacttcagccaatggattggttagctagacaaggttgactttgggtcaaccctctcactggacttttatctgaggctcttcttgtcgtgaccacacaagctcttttttgcttcacagaaggtaaattcttgtctgcttgttttgctttgatccgtcgtttatactttgttgtggtgagtggaatttgcttcaaaataaatcctgaaattattacgagattctgaaccagttccatttgatataatataataatataaacaatacctgaatctttaagtcaatacttactacaggtttgttatctaaacaagttcttctctgttttagtaaatgtttcttctgtctcagtctcactagaacgatctgtccatgaaattttctcgtaaagggttattatggctgaaggagttgtgttgtttggagttcataagctttgggagcttctgaatcgagaatctgcgcgattgaatggaattggtgaacaagttgatggactaaagcgtcagctgggaaggttacagtcattgctgaaagatgccgatgccaagaaacatgaaagtgaaagggtgagaaactttctggaagatgtcagggacattgtttatgatgctgaggatataatcgaatcctttcttctgaacgaatttagaacaaaagaaaaagggatcaagaagcatgcgagaagacttgcttgcttcttagtggatcgccggaaatttgcttcagatatcaaaggcataacttagaagatttccgaggtgattgggggaatgaagagtttaggaatacaagagattatcgatggtgctagttcgatgtcgctgcaagaaagacaaagggagcaaaaggagatccggcaaacgtttgctaacagttctgaaagcgaccttgtgggggtggaacagagtgttgaagcattggctggtcacttggtggagaatgataacattcaagtggtttctatatctgggatgggtggtattggtaaaaccactctcgcaagacaagtctttcatcatgacatggtacaacgccattttgatggattcgcatgggtctttgtttcgcaacagtttacgcagaagcatgtttggcagaggatctggcaagaacttcaaccacaaaatggggacatttcacatatggacgagcatatactccagggtaaactctttaaattgttagaaaccggtagatatttggttgttcttgatgacgtatggaaagaagaagactgggaccgaattaaagcagtgtttccgcggaaaagaggtgagctcttatggtccatacttaaggcacttattgtttaaattttactagtgactggggaaagagagatatgaaagcaagcaagacgcacacacacactggtcgcaaatgccttttgttctctaagatgtaactggaaatgttttccaggttggaagatgcttctcacttctcgcaatgaaggtgttggaatacatgcagatccaaaaagttttggctttaaaacaagaatccttactcctgaagaaagttggaagctatgtgagaagatagtgtttcataggagagacgaaactggtacactttcaggtataaaattaatatcaagaatcttgtgaattttatcctgcagttcacttcttgaaggtttatttaccttatgatgatatgcagaagtaagggttgatgaagatatggaagccatgggaaaggaaatggtcacgtgttgtggaggactaccattggccgttaaagttttgggaggcttattagctacgaaacatacagttcccgagtggaaaagagtatatgacaatattggaccccatctcgcaggaagatctagcttagatgacaatctcaattcgatttatcgagtattgtctctgagctatgaaaatttgccaatgtgtttaaagcattgcttcctttacctagcccattttcccgaatattacgaaatacatgtgaagagattgttcaattatttagcggcagaaggaataataacgtcatctgacgatggaacaaccatccaagataagggagaagactacctagaagagctagcgaggagaaatatgattactatcgacaaaaactatatgtttttgagaaagaaacattgtcaaatgcatgacatgatgagagaagtatgtttatcaaaagccaaagaggagaacttcctagaaatcttcaaagtctctacagccacctctgccatcaatgctcgatctcttagcaaatctcgcagactctccgtacatggtggtaatgcccttccaagtttgggacaaacaatcaataaaaaagtcagatctcttttgtattttgctttcgaggatgagttttgtatactagagtcaacaaccccatgcttccgaagtttaccattgcttagggtgttggatctttctcgggtaaagtttgaaggagggaagttaccttccagcattggagatctcatccacttgagattcttgagcttacaccgggcatggatatctcatctaccttcttctctgcggaatcttaagcttctgctctatttgaacttgggcttcaatgggatggttcatgtgccaaatgttttgaaagagatgcaagaactgaggtaccttcagttacctatgtcaatgcatgataaaacaaagttggaattgagtgacctagtgaacctggagtctttgatgaatttttcaacaaagtacgctagtgtgatggacctcctccatatgactaagctaagggagctcagtctatttattactgacgggtctagtgacactctatcgtcatctcttggtcaattgagatccctggaggtgcttcatttatatgataggcaagaacctcgtgtagcttatcatgggggagaaattgttctgaattgtattcacctaaaggaattagagttggcgatacatatgccaaggtttcctgatcaatatctattccatccccacctttcacacatatatctatggtgttgcagcatggaggaggatccaatcccgattcttgaaaggctgctgcatttgaagtcagttatattaacatttggtgctttcgtcggaaggagaatggtgtgctcaaaaggcggttttcctcaattatgttttttaaaactagaagaactagaggagttggaagagtggatagtagaagaagggcgatgccacttcttcgtgctttgactatatgtaattgcagaaagttgaagcttccgggtgggatcaattacataacctccttaaaggaattgacaattgtaggaatgaagtggaaggagaaactggtaccgggtggagaagattactacaaagtccaaaacattcccaatgttcaatttatcaactgtgacgaataaggagaataaccagtagcaagtaaaacaatttgatattctgtttactctgtttatttgcagatgaaactcagtaagaatcataacaaacaatgtcttcaaatataaaaacacatcacaaaacaatacaacacttattttttgctcacttgtgcacacctcaagcatcacttcattgtttgattaagtatggatataaatcaacgaacaagaaaaactgtagcatgagtgatcaggaccaaaattgagagaaatattaatcatcattcgctcgtaagtttttagtcaagaaagtagaagccctctcatagtatgtaagattcgataaaatttggcacatctacaaattagactctcatctatttcatgaactacgtacatacatttttctcattccaaacgacgggccacaaaaaaaaaaagaaacagaaaatttacattcttatttacatctaaatttttgctctggtcgtgattttatcatcggtcttgaagcgacatgatgctttgacaagatctctgcaatgagtagccgaccaaacatatgagagttcttgagaatgaggtttcttgtggaggagtcaacaacatatccttgaccaggcatccattgtagaagttgaagaagcaattcctttttatcgggctgcgaaatgtatcgagaaatcgcaatctcaaactgaacctgaaaacaaaagtacacagtgaaggcaagaaatgagattcagtatgattaaagaacgaaattttccttatttctcaactgtaatgaaaattatttccaagtaaaacgttggcaaaatagcatcaaattgttaccggttggctatttacctgatcgattttgtggccagaaccatgcaatactttcagaacatcattcactaaattaatattacccgagatcataaaagctctgccaaatttctttaaagtaggctgtgagatcatcttcgcattgtcctgaaacagaatgatgaccaaattagaccattaacgcaatggacggaatattaaaatttgcctgagagagggatttcacaccttcactacaatgtatgcatcttttaggagattcccttggattagaatgtgaagaattttctcatgcagctctttgcagatagttcttttgctgtatcgcaacatattgtagactgagaatgcttccgcttgagctctaatcttgccgagatgatatatcaaggacgagcaaagttcctgcaagtttttcataaatcgggtctggttaatgcaaatttttcattatctcgcattacttaacgagcaatgcctcgatgctgcttgttacctcctcaagcctgtggcctttgctgtgcatgtccagtgtggtttggtacgcaagcaggtgcaatttctccttgatgaagtatttgatcaagatatggaaagtattatagtcgggactaacggcttgctcatccattttcttcatcattcgcataacactttccatctctcctgctctgcaataggcacagagcattgtgtttaacattaccaagtcgcatttttcataagtggtttcagagtcccttgacagttcttttgcctccttaaaacgcttacttcgacataaagcagatatcatgatgctgttggcatagccatctgaaacaagaaaactgacatcattgttctgaaaaatctgagaaaatatctaaccataaagacacccctagttgtagcaaattgctgactcataagagataggtcttcaaggacagaatgaatttttcaatccaagttattgacaaatcttgaattaaatcaatgaatagtgtttatctcaagatatcattgcaatatattccgatcctatactgaacagcagtgaaagcagcaaccattaaagaggcaagaatgaaatatgaaagctaacttgctaacaaatcatcagcttaataaacacataccagatctaacacctttccctttcatatcatcaaagattgacctcgcttcttctaactttcccgcctttgaaagaccatccatcaacatacaatacggcatctagagaagaaaacaaatttttgactataagataattgccaaataaataggaacagtatatgagctctacttataaaagtaaatgtttagtaaattcaacattttgcacaaatttatatttccagccaggtttatattgctcttttctagaatatatacagccagatctactgaaaaaataatatagcctaattacctcgttctcggcgtacccagcagattcaagttcagaaagtaattctcttgatctatcaaacaaccctcctttgatataaaccttaagtaaagttgtcatcatcacctgcaaatatttgcagctagagttaatcaagcgagaaggaatctaaattactgagggaaccaatctctaatataataacaaagtataatgaatcatgttaaaaaaaaccttcaattaaacaagaatatccaaaaagaagaactacgaaaaaacaataagaggaagcctgaaagaatatggaggaatgcattcagagaagctgataggatctggtattatgtgttcagccattccaatccatctacctataatcaaagtttctctttaattctactatattttgccctttacacagagctcaaacgatgattacaaaaatgagaatggacctacgtcagatatatgttaaatctgaaccatgcttaaacgaattgacgtctaaaccatgattagagagaattgacatctaaagcacttcttcatttttttcttaatgtgcacttcttagggtgtgtttctgcatataatggttgtgttaagtcatatcaagtcattcacacaaatccatctatcacataagatgagaaaaacaaaccttgtttggcactaatcctattgatttcatctcggtcatcagctcatcagctttcttgtaatctcctttccaagaatatgaattgagtaaagagctgtaatgatatatgttgggcgaatgaccttcaactttcatctgctggataaagttttcagcttcttcacttcgaccatttgaagcacaaatggccaagacagtcccatacatcacactgtccatttgtattccattatgaggcagctctccaatgagttcaatagccttagggtatccattttttaccttaatgcaacctgcaagcaactaagacatcaaagataagatataattcagaagccaaacgaaacgagatgttgcatatgcagtcatggttctttcacctatataattctaaatgcagaaacgtatcagcaagtctcaataagctaaaggatctaaatcataagtgaaagggggaataatcgttctaagcttcaagggaagaaaatatgcgaaatattttgacactcactaaagtgacgaaaacttcagctggcataccgtgttatatgtaaccacatctggtttcagaccatcgcgcttcatctgatcaaacaatttgatgcagctgtcaagctttccattcttgaccagacaactaagaatggagttacatatatagacattgattttggtagactcgtctggaatgctttggtatatttctagagccttggagacatttttggccccaacaaactttatgcagctactgtaagttgaaacactaatctttccatgttgttgcatccattcaaagagctacaaaaagaaaaacactttgattgactatgcacatcttggaactcttgttcctcaggaaacaatgaaacatacaatagtttttatgaaaccatgttcaaagcaacagacctgtataagatcctgccatcttccagagattccaaaatcacgcaaaattacattcaaatcttgtaccttcaaaactgttgctaatctgcagaggggacagttacatcgtgagaaactacagtatccagatcctgaacactcttgacgacggagtataaagattacggcatgctcattaatcgaatcttggatacaagaattcttatgtatctctagtaatgatgtggtcaattaactttccccaatttgaatcaatttaacattctatagagtatagaccaattccattagcaggcactactacatctacttcagaactgagcattctagagatttttgtttacttctgttaagaacaaaatacgtttttaaagacaaatttttgaaatgttgactgaagtaaaatgaatcacagaatttgaagataagtgataagtaatagatagtaagacctctgcagagaagagagaaaatccgaggagcgttgaacttcagaaatggcggattttctcgccaggtatgaattggaatggcgtttggaacgaggagcttctgctacgttcgccggtaattcaataacagcggaagatgtcgttgccgccgtcggcgtgaggattcgtaaggataaggcgggaatggagagagatgaagagggacgagagtgagtgttgaagagatgaggaggacaacgtagttcgagtcccacaagaagtggcgtctccattgttttttcgagctaaccgagccagagcctacgaaagtatccatccatctttgaacatgttcttgtttcttttaccaaagtatccccgcgtttttaattgtaatctagtgctagtttgagaagtgaagggtagtatagtaaattagaaaaaagttctaatcccaaatggccaaatctcatcctcaacaacgcaaggacaaacgccgttttatgatgggcttttcgggagagacaaatgggcttttaggcaaaccattaatttgaaaggattatctaacgggccatattgttaaaaaaagtgcaacaccaaattttgtaatgttgtccatatccaaattggtgacgaaaattctgagaggaacagtaacaaaatctttgacaaacaaaaaaagaggtacagtaacaaaatagtttttctggacaaatattcccatgcgcacgcacttgtcacatcatgcactgttctttgtgcgtcctatgtattgctccatgcactttcatacaagaaaaataataacttgtcatcactgacatgtttttcaacaaaatggcgtttctattgaacctagtttctctaaattacatatgtattgtagaagaaagaattcaaaaacagaaaacagattctttgcatcggcttgtacggcaggagaccgacaaggaacaagcacagccccactccccttctcttcatacgtttcgtgacacccacttcaccatttttttttgtttttttttgaatttttaaccacttcaccatttcttctcgctttggtcaattttttttatggaattcttaacctacaaagttggtatttaaaaaaaaaaaaaactattaactcatatattactttttgatatacccctattaactcatatatgtaacatgtaaaattatactatttcatactacgctaggactatctagaccagtattttgctaatcacacattcaaattatatgcgagtaactttatcttcttcttttttggtaacatatgcgagtagcttaccactatcacaatacttaacttacaccgtcattggaatcgaatctcgtagtataatattagtcattggattatagaatacacatacaagcacaatgaaattcgatagtttccaatcgttaaattattttcatacggatttaaacacatattagttgaacagaagaaaagacaaagatttgaactccatactaataataaccaataagcattgaagcagaagcaacaaaaataactagcaatatagtaagggtcctatcaatatcatttgtcttgttttgttgtgttgtcacgattcaccaagtccctatcacttggaatcgcgattaacaacatcgtccatatctcttttatatatatcttccgacgtcaacatcgttaatcgcatctaaatttagttatttaaaaaatcatcagcagaacaatattttagtggtcgggcttttttatttattcagcgatatctgaatctgatcctggacggtgtgcaacgtctttttccgatttaaaatcatttttttgcattagtgcgatttaattgtgtttctaaaacctatcacacaaaaatgcatacgttttactatttcatcaaaccaacaaaaaagtttgagaggagctcctcgaggttggtccgattcggatatataaacagaaggtgggtttccctcaagatttcgagaagttatcgttattgttcacatctttgtggagttaggattagtcaacgtcaataaatactttggtttatttgatagtatataggtgcgatgtaatagtcaacgtaagaattcgaagatgtaaatatgatcgatattggttgacctactttatcgaggaatacaatttctgcaatttttctgacatttgaaaataatttgttgaattttgacggaaacaaatttatggttgaactgacaccactttttaagaaattcaaatccaataactaattaactacacaaaggcacacatattcaacgccaccacatactatatacaatatagtgtctgaagaaaatgcttttatctcgatggaataaaggttttattcgaccaagagccctggtgggttaatggccactgatcaaccacatgtgattcagtactcaaatatgaaagtttaataagtctcatttttgctaagattatgtaaagtgttaaggctacatgtgaaaatgtttccacacgatcgaagatgataatattgtattctaatacatttttttgtatataacattaggtcattagctagaacagttcgcgtattttgtgaatacccttttttttgtaacatgagctagacgtgtgttatatgtggaatagtcaaatataatgaacgttgcaataaaatatggatttgagagtcctgaatgatatgacagtctgaccattatatgcgatcctaattattgatttcgttttgaacttatgattatttggttgactgtaacgagaaaacagaaattaggttggtaataaattaagaatttacttaatatgttttatattttcgtataaaattgtatttagccaaagcttctcatattattaatctgtcgttattttcgtctgaataaaatcgttttttctttttttcttttcttaaagtatgtgtccgtatttattaccagacagtcgatatgtaataaaatattatataaggaaaaaaataaaaaaaaatggaggtgagcataaattcgctaaaaaagaaaagaaagaaaggtgtttgaatggaacttggtgcaatgggggcaacaacacaaattcaaagaataaattctcagcagcaatagcttctcaacgcaacaaagcaaagcttttgctctatcaatcttcagccttttcttcttcgatttcacaagtttcatcatctcggtaagcaagtctcctgcgaatccaggtccgattttgttttcttctttgaaattgtttacttgtaagagtcatcttctgaagattcgacctctagattcttacttctgtgtatgacttactcaaatcacaaattaaagattacttcttttttgttttcttaatcaatctgcttcgcaatagctatttcttcgtaatgctgatatttgactactaagttgctttctgactttaatggctatttattttctggggaaaactggatttgagacaaatcactgataaacttctattgcttgaaccttattttagttgaccctcaagtttaggctctggtttttcagtcaaaatgagtgatggaatctccaggagaatctctcgtcttctgcatcattaattcattctctggaaactttttgattcataatctgtatgcttgtggataacaaattgtgatgacttgagttaaagaatggatttttatcttaggaatcttgttgttttttcttagcttatgcagaaaattgtatcatgtgcacaagaggacaggttacaaatcatatgtaagttgcggaacaatgttctaggatcaccaaaagctaatcccagatggatatgaggtgtttttttttattgttaatcaatcttcctgaaagttagtatttttacctccttcagtgaaatgatactttgtgtatcttcaggtctggagatagagaattcccaaatggtgatttctattctggggaagtgaaaggaataattcctaatgggaagggaaagtatgcatggtcagatggaactatctacgagggtgattgggatgaaggcaaaatctctggtaaagggaagcttatttggtcatctggagctaaatatgagggagatttctctggtggataccttcatggttttggcaccatgacctcacctgatgagtctgtctacagcggagcctggagaatgaatgtgaggcatgggcttggcaggaaagagtattgtaactcagatctatatgacggtttgtggaaagaaggattacaagacgggcgtggtagttattcttggaccaatggaaataggtacatagggaactggaaaaagggtaagatgtgtgagagaggagttatgagatgggaaaacggtgatctttatgacggtttttggttgaatggctttagacatggctctggagtttataagtttgctgatggatgtttatattatggtacctggtcccgaggcctaaaagacgggaagggagtcttttatcctgctggaactaaacaaccatctctaaagaagtggtgtcgctctcttgaatatgatgacactggaaagtttgtactttctcgcagtgcatcggtaaatgttgaggagctaaggagtttaaacactgtgacacaaagtctttctgtgaaaacttcagctggtgaaaccacctgtgatcctccaagagactttacatgtcatgggccagtatctaagtctgcacggttttctggctcaggccaaagcgagggacaagataagaaccgtattgtttatgaaagggaatacatgcaaggagttttgattagagaaactattatgagttccgttgacaggtcacacaaaattaaacctccaaatcgtccaagagaagtcagggctaggtctttaatgacctttcttaggggggaacacaattattacttaatgctaaatctccaacttggtatcaggtaaactaaatcaacaacctaagccacttctttttaatatgttaaaatattcttcttcgtcaaacatagcaagctggagagctttacgtaaaaccacttcttttaaatatgtttctcaattttcatgattcttgagactgctctgttatagcctatgacacattatgagtattatttctgcaatatggcttgattttagactcagatccgtatacaggccaagagacaacctgcttgcatatttatatgatggccttgtatatctactgcaaacgtcactaagattggtttataattagttcttcctctaacacaacaatcttttgaggttcacaggtatactgtaggaaaaattacaccagtgccgaggcgagaagtgcgtgcttctgactttggtaagaacgctagaacaaagatgttcttccctagagacggctccaattttacccctccacacaaatctgtcgacttctcctggaaagactattgtcccatggttttcaggtaaaccagctttcttctggctgattaccaaagaactttagaatcagagtagataatctttgaatgtgtatattagttcttggatactgttctcaagttagatgtattttgtaaaaattacgaactacttagctctgtgtgatccctcagttgttcctttggtcggatagaacacctttcttaaataaagtagtttaattaacgataaaccgtatagattgggtaacatagcaagtaagttttgtagagaggtgcatcttttttacgctttgagttccatgttatctgctttaggcagaaagttttaaccaaaaggattattttcttcatagacatgattcttagtgcatcctagaaaatcttactttttgagaaagccagaactttcgatttgggttgtttacctcccaaacgcaatgagtgcaatccattacttttttggattacgtagccgtgggacgaaaaaatatgaaacaagtgattatggaacctgttctttgaattgatagactgtgcgtgattttcaatggaatgtttcaggaatttaaggcagatgttcaagttagatgctgcagagtacatgatgtctatttgtggtgatgatggcctgacagaaatttcttcccccgggaaaagtggcagtatcttctacctttctcatgacgacagatttgtgatcaagactttaaaaaagtctgagttgcaggtttgaactaactgaacaaatctgtgatttgactttttctcgtctttaccgatagtattggtttagagtgatgttataagcccctcttgctatgtcgcagaaacaatgtctatattgttgaactctttagtatttggtggtaacgttctaaatgtctatataacagatactaatgactaaaaccatccagctttttttgtttctaggttctactcagaatgttgcctaagtactatgaacatgtaggcgaccatgaaaacacacttataaccaaattttttggagttcacagaataaccctcaagtggggtaaaaaggtaagaacttctctcgtcccttttatagcttatattccattatgtttccaccttttttagcataagctttgtggtcttttgataggtacgctttgtagtcatggggaatatgttttgcacagaattgaagattcatcgtcgttatgatctaaagggttcaactcaagggagatttactgaaaagatcaaaatccaagagaagaccacattgaaagatcttgatctagcttatgaatttcatatggacaagctgttacgggaagcccttttcaagtgagtgcaatacctttttctttatatcatttatcttgctaaagtgaagctctaactttatgtggcacggctattttctacataaatctgctttctgaaatcgcttacaatctcttggagcatcaaatcataaacaacgattaaacagctgtgttttgcatttgaaagtttctaattgtttgtggaaccttcttgttgtccccaaatggcaggcaaatttacttagactgctcgtttttggaatcgctgaacatcattgactacagtcttttactgggattacattttagagctcctggccaacttaatgatatccttgagcctccaaatgcaatgtcagatcaagaaagcgtttcttcagtagatggtaggtgccagtgtttcaagcggatacctttttcacatcatattatagtttttcgatggcttaggtaattcagccgtgagcttgaattctatcagtatcctaacgacaagcttttaagccacttcatgtctttatttaagaagatgattacacaactgagaaatgaaggaatggggcatgtttgacttacagtttcatgtttatttttgtttcagtcggtttgactcaggaacactccattcctccaaaaggattgcttttggtaactcatgaacccaattccgtgaatactgcaccgggtcctcacatcagagggagcacactcagagcattttccgttggcgagcaggaagttgatcttattcttcctggaactgcaaggttacttatttcctcttttgctttcttcatttgaccagtacttatagctgaagaatgtcattggaactatttttttaggctgcgggtacaattaggagtgaacatgccggcacaagctcatcacaagcttattgaggacaaggaagagtcagcgacaattgagctttttgaagtatacgatgtggttgtgtacatgggaatcatagatattttgcaggagtataacaccaagaagaaagtggaacatacttgcaaatctttgcagtatgatccgatgacaatatctgtgaccgaaccttctacttactcaaaacgctttgtcaattttctacacaaggtgttcccagaagaaaggtaggatcaacaattttcttctcaatgcctttgtttacacatccttgatgtacattgacatttcaaaagcctcataatagtgaaaatgtttgtaattttgatatgattaaaattctctgtaaaatcaatttgcctcctatcatggatgacatgatgaaatgcttttacacatgataagcagagcagcagacatcagtcttgaaatttgaaaaacgaaaggaagtaaaaagagatgcaagaaacataattatgaaaactttgaaactagctaacctatctgcactaaacttggaacataagaggagcacacaggcgggatacaagacgtggtgtcagcatatccaacgctgccaggtatccagagatttggaacttctccgatattaacagagttgaagtatcctccatattcttgtccaatgatgtaagctgtttggtagcgacaaatctgggatgggtcaagatcaaaaaccacggcgactttgttctcctggtcaatgaagaaactcccagccatatcgttaaactgaaaaccagtgagtggtctcatatccactttcaaaaaaatgctccacgacactgcattgggctggatattagtggaaacccaaatctccaagatctcagatggttccgagggctggcgctggcacaagacggagagctggtcttctttaacacaagagagagtcacagtctctgcgtaataagagtgaaaaggcagaggaagacgcggtccaaatctctcagccgtaaaatcaaaacagagtaaaaagtcttcagtctctgttatatctatttcttccggtccctttccttcaaatatatatctctctttagcgaaaaagtaagtgtttcccctgagagacacgccacgttgaaaacactatatgtcccagtcgggagtgacatcaagaaccctccatgaatcaaggctaaagtcgtagatttcgtacccgaaaaccacgttttctacagggaggaaatcatccacaaacctcaagattttgtgcttacggtttttgtcatgtccgatagcataacagtctaatatgtggaaattgtgtctgggttggatccacctcgtttgctccaaatacggattccagaccaagagcctcgtcgtgtcgtttttgattatgcataacaataaaccgtcgctgtgaaagattttagatacctctatttgatcaagtatacttacctgctttatagatggtggctcgaccaccaagtccttgcggagatcaaatctcaaggaacaaaccctagaatccatcatcatgaatccaagaaactgcttcgctttaccaaaaaaaaaccattttttggataaagcattccactttttgcaaacagatcgcactgttttcagacatgtcatcggagtcctgcaaagtatctcagctaccataatttcgtcaagatcagacatcgtcgtcattctaaccaacaacaatgctctaacctaaatctcaagagttttttttaactaaactaaacaaagcttcccaactttcacgcttgccaaatttttacgtatataacaagaaaatatgtaaatatcctcaagtgataattattaaataatccaggatttttgttttttagttgttttattggtgatggagtgataaattttctgaatcattgctatattatcattcatcaccattaacctaacgtaaaattacaaaacgagaaaaatagaattacaaaaaattaaaagccataaaagagtttaagctccaacaagaagcactaataacaataatcataaagcatctttgagaggaagaagatgcatatcatcatccatcacatcaatccttttatcttcatgcatgcacgcatttacttggagcttaaggcaaaggataatttaggccgtgatttgtttttacccaacagtttcatctgtttgagacgttcttcttcctcttcagctttcttccttcgcatcgcttcttctttctgtcgttgcagctcctctagctctcgataccgttcctcctctttcctttgcctctccattgcttcttttctctgagcttcttccactctctttaggttctcctctgctattctctccctctcttctttctcttgttgctctctttcctgtgacaaacaccgcataacaccctgaaacaaaggctctcttttcaaaatgctctatgatggacagatttataataccaaatttaatatgcaattcgaattcattttaatatgccacaagcaaagtttttccggaccatctgattgtgtaacaaggtattcaaaaatctccacctagaaaactaaggtctaaaaagtagctcatagacattacctctttttctttagcctcaataagagaagcctctttctcctcctcaagttgagccgcgacttcttcattaagtctctttcgcccttcctccaacagcgttagaatttccattttgattttctcagactgtaagctttcttcgaccttctttcgaatagcttcttcaacccgtttcacagtttcttcctctattagcttcagttctgcttcacgctgtcgcctggtagcaaatacagtgaaaaattagaggacatccacagcaggttcagaatattgaatatcacctgaactttctcatttcctgatgtcttcaatcttgaacagcaaaagaccaaaattttattgcaaatccgtaaaaaatgttgagatcgtttccattttcactcctcccaataccaatggtaaatttcgtgaagaaatttcttttttgtcaccataacacaagcaaaccttcaccaagattattcttgtgctttggacatatttacatctctaagtcaatcatgatccatgtaatgacaaacggtaactcatcaaatcgagatagtacgaacatttgtgccagaggatcaaatataaacaaatcgaaatatagcttatcttccataagcaaagcctgtgagagaataccataaaacctgtcgcacttttgagactaacaatcaaggacttccacactacactaaaataacatttgagaacaaaaaaccttaatttcaccataacatccatcttacttcaaaattttgtattgatttacctttttcgttcttcctcttctcttttaagtttttctccattcctatttttggctgactcaagggttgcggcgggagatctttttgcaggagatggagttgaactcctactcttttgtcttttgtaacgttttggggttggagaacgtctcttaggagtaacagatcgacttcgatggcgcctaggagaaatagaacgactttttcgcctgaacattacccaaaataaagtagtaagcaaaaagatggaactaatgaagtaccacgcacgtgaagactaggcatcaggtagcccacagttacacataaagaaaacaaaagtatgtgcagttacctcatacactgtaaagaattatcagctccaacttttatcacacgaagagaagctaacgagacaagggatcaatgaaagaacacctaagagcaatccatcagctgctcatttcccctcccgtgggaacgggaagaaactgagctattttataatggtaagcgcatgtatcattttcctagcttctcagccatgttctcaacaaattactatattatcttacctaaggaatagtggtggttttgtatcactattgctaacaaactccatttaaaagaacataatatagtcgctcttaaaactgattctaactaataatctacagatacaattaaaatataaactagatcagactatcagtagtgctattatcccagcttaacttatgtctttaccgaatatacaggtttcattctaaaaatcacaaagctcaggtcataaaacatattctcttgcaacaaatttaatcacaacagccaaataaacacgatatatttccaatacgcagcatcactcaaaaaaacgcttacgatacagagccagcagcatccagacattgcactctcttttagagaagggtagaaaatatatctataagtaggaactttactaaaagcaattcttgagtctgtaaactttacatgtctatctataaccgtgttccaccaatgtttcttacagttcgtataaacgaatgataactaaggcaaacgaatagcggaaaaaacaaacactaggggtatcacctgctatacgaatgagatgagtatggagaagggcttctgtctcttctactcctcctgctatgcctctgccttacgggagacctcgagtgctttctacgacgtgaaggtgatggagacggtgacctcgatcttgacaagtcccgaggcatctctcaaaattccgtagaacaagcagtatcttcctttataaggagaagctcagctcagctttaatctctctgaacggattggtcctgcaaattccagattcaacaactcatgttaataattgaaacagcctatcagaatctaaataggtataacaaacagaaacctagcagcaactttcagattgcggacacacaatctattaaatatcttctgcataaacccaaaattgaaaccatcctggaaaatcagctgaaatcgtatgactacttaccctcgagaatcgcggcgttgttgttgttgtttgttggatcgcctcaagagtcaacacggagagagaagatgaggaagatgtatgggtaaaaattatgcagcagcgaaccaaaattcgtcgggtttgggatacatagagcaacgtttaagaagatgaagccagcttttgtaaattattggaattggtcttgttcgttatgaacattgaaagccttttgggcttattaaacattgaagccttttgggcttattaaattcgacatgggttttgagcccttccaagtttttaagttttgttaaggttaaagaaaaaacagttaacattttaacctttttagcatacccataattttacatagccgcaaattccatgctcttcttctcttctttttcacttgactaaatcacgtttcactaaacccacaattcccatgcacatttcttctcacaccatgcacgtccatcatgtatacacatcacaattcacacatcatgcctaggtttactaatcctgagtatatggatcaattacatgatcctatttttctattaattattataagtatatattaaagaatcaacataattgattgtgaactttcgattcctttataggcttattttgtggccaaaacggtaatctcattctacaatatactttagcaccactttggagacgcgttcttaatatgcactataaatgcatacacttattcacacacaaaataggacttcaacgacgcaagccaaagaacctagactaaaatcaatagacacaagaaaggaaaatgaagaagcaaaagattacaacctttgttaaagaactcaacttacggatgaattcgaagaaagaaccgataagtctccgatacattcacatccttggcaccgttgtcttcttctcctctgtctcctctctcgtcatcctccttgctttttaccttaaccaacgcctccaaacatcactcttcctcgtcgaagattatcacactctctcctcaaatcctctcacttctccttccctctctcctcctccttctccttctcctcgcagctctggtagtaatattgcagacgaagagctgatgtggcgagcagcgatggccccacgcagccccatgaagaatgagacccatccaaaggttgcgttcatgtttctaacgaggtggaatttgccgttgtcccctctttgggaaatgttcttcaaaggtcatgaagggttttattccatctacgttcatacctcgccggagttcactcaagagccgccggaatcttcagtattttacaagaaacggataccaagcaaggtatatgattatatatttacattcattaattaggtttaatttgttgccttgttggttaacatattattgtattttacaagataacattgcgatactttgacatttgtaaaatattgtaggccgttgaatggggaaaatgttcgatgatggatgcagagaagcgtcttatatctcatgccctactagaaccttccaacgcacgcttcgtcctcctctccgagacttgtatccctctcttcaacttcaccacaatctacacttacctcacgcgctccactcgctctttcctcggctcattcgacgacccaaggcccatgggccgaggccgttacacccctaaaatgctcccacacgtgtcgctctctgactggcggaaaggaaaccaatggttcgaaatctcacgtagagtcgccgccgagatcgtctctgatcgccggtactacgccgtctttaaggatcactgccgaccgccgtgttatatcgacgagcattatcttccgacgttagttaacaagatttgtccggagatgaattcgaaccggacagtgacgtgggttgattggtcaagaggtgggtcccatccagcgaggtttgtgaggaaagatattcgggtcgggttcttggatcggatccggttcggttcgaattgtagctacgaaggtgaggtgacgaatgtgtgttttcttttcgggaggaagtttcatgtgagcaccctcgagcctctcatgaagattgctccatatttgtttggaatttaattaagactttaatttttcattttaaacacacaaataattcattcatatactaatatacttgtgatgagactgttaatttattcattcgaatacacaatctactccaatatgtgcaaatatataaaacttgtaggtatttctcaacttagaaaatagtactactttatagtgtggttggattaaactaagcaaataaaaaggtggcaaaatggccaacttccttggagtgcaaaccaaattccaaataagttaattttaaaattgtatagagagacaactaagtttatatcaatgtctcaaccctctgcattttaaactcaagcaactttcttccattttgtaaaccttgattgaaaaaccttttttccatttctcaatctaaaattttccgaggctatggaggtcgcaaagattggaagaaagaaaactagtcgaaatgtaggacatcatgatattgttggatccaagaggaatcaataccactatgcgaagtcaatagaagagaacgagaatatggtaaaagagatgcaacaacaaatgcttcaaatcgacaaagaaatcagagagaaaacggtatgtttgttatgaaatcgttgattctatatttattattgtggatcaaattaactaagctggtgaatgttactctcaagcacagcttgttcttgaacagtacatatcaggactagaatacaacttgaaccatagatggagaccgattgaggattaccagccgatagtgtactttcgatcaaagtgccctgagaagatggtgctagacaaactaacttttgctaacaacgcatatcgtgacaagaaggctgttatatcatttgcgtctggggaacgagagattaatatccatgtgagaaacccttatcacatatatatccttagtttgatctatgattattaatgatttcaaagtgttatacaaacagatcttcttttactatataatacagaatctaaaccatcagatgttacacaatgcgcattgtatggatggtggtgagagacgccttcttaagatgctgaatccaaataaggatatcgactctggttcatcgcttgcacaagttgaagaacaggttaattagtgtaacaaatttctattatactattaaaaattgaaggtgtcgttgtactttgcatgtgttttaccaagttcgatgtttttctaattaatctgtttattattgatctagagcagatgtggaatttatatactttcaagaaatggccatatttaaataccacaagcacaatcacaatcgatgaagaaacatatagtaggaagcaaagggaatttgaatgtgagagagatcaagtgtttgttaatgctccttctaaagcctctctgtggaaatcgttaccttctaccaaggacttacgcgaccagattcaggtctaaccggatttcttgattccattttattatgaatatatgatttaccgaattagccaattctgtaatatactatacaggcaatggagttaaaaggtgaacaaaagaggaagaaagttgtgggaagaaggaagaagatagagtcaagggaaagaaagataaagaaaacagagaatgagattaagtctatgagaaagactatggagaggattctcaacagaatgcacaaagctttggaaaccatttcacatgaaaggacttgtttagagaagaaaatcacaattctatataatggttgacttattgtgaataagtgtaaaaataatttcagaaagctcccaacaaattaagaaattgaaaatttatttcattactataagttaaattttctttttgtttttgagaattaatttgaatttttagaaaatatttgactcaaaactctttatttatttatttaagttaatgacacataaaaaaagatttgtttttaaaataaagatacgaagaagggtatattggaaaatatgaattagttgtggattctagtagctatgtccagagcaatcaatcactatcatattcatcaccaaccgaaaacgcctctggatctcgccagatccaattcggaccaaatcagaacccaaaattcgactcacttgtctcactcgactcgaatctccattctttgtctgaaagtttcttcctttttgtttaaccaatggcgacctttatcaatctggaggattccccaatgtttcagaaacaggtaaaattgaaaagctatggtgtgtaattaccttctgcggatttcagattcagggtttttgttataaattgtgagactttatcaccaaaattgttgtcttgtgcctgttctaattggtttgatcaggtttgttccttggaggggacagctgacgagcttaaagatcgttgtcagaagctatacaaaggtgttaagaagtttatgtatgtctacatctgcctttttctttctactgttttactctgatctttctgttgactgaagattcttagagtatcaattgtggaatgttttctgagagtgacatatattctgaaagtggaagttggaattaccaatttgtatcttcttttacttaattagcaaatgtggattgaccattaaagctttctcgattgttttaccattctcatgtaaatcttagattatgtgataagttaacatcgtaacattgttttgttgctactgcacttttgtcattgtatctatgtggccagacatgttattggttgctgatacgaatgaaatttactttgctttctagggggactttgggagaggcatctaaaggagaaagtgcttttgcagcttgtctggaagaatttgggggtggacctgatgatcctatcagtctttcaattggaggtctgtggtcttgctcatttgttgaattatgactctatttgctatgatttaacttatttgattcttattattttgagtgacaccagggcccgttatatccaaattcataaatgcacttcgagagcttgcctcttataaggagtttctttgctcacaggtatgctcatagtatcttgtgagctattataaatgccagtaaagattcaaagatccctatcatcattaagagcatagttttgtttggtaatttaaatgaagatctgattcagagtgtcccgttttgattattttctggaaatgtccgtttgagcttctaatcaactctgtgagcaatgaaagaaatataagatagttttgagtataaaatgccaaatatgcaatttattaaagtgcatatgccttaacaatgtctcactttatataacaattgtggtattttatgtgaaattttttctaggtggagcatgtgctacttgagaggttgatgaactttattagtgttgatctacaagaagctaaggtattcattttctctgctaaatttgatcaatttgtttttttttcccagtgtactgagtttctcaacttttatagattcgactttgatcaataaactggagatttgttttttttttttttttttttttttttttgcattccagactgtcgaaatactttactctttattattgtgtgaaaattctacagtcatttggaatttggatatgaatttcaaaaggatacggctttcaaggtctttagactgaccatatttaaaaaaaaaatgtttcatatgtcatgcactgcaattatatgatcgacaactcatgcttatcattccaaccaaccctatgctgtttctacttttgcaggagtctcgccatcgatttgataaagctgctcattcgtatgatcaggtacttgcttatggagtgtataacacctttaatatcttgtatatgcagttgtacacccttattcttcgcctaaaataagtatgttttataggctggtgttaccaccacaagaatgcacagcactgaaaactttgtctgatattcttcatctgaactggtttaatgagttttcttatctgcttgtagtcgcgcgaaaagtttgtgtctttaaagaagaatacaagaggagaaattgtggcagagttggaagaggtagaacatttattcttatgtatatctttttgtttgctttctcttcgtggctacaaaggaaagtgaagcaaaattacagcgaaggaatgtgccagcccgtatgcgcatatgaatatacacatatttctagactgtctagttcaatagatgtccgtacgtcctataggtgtatgtgtacatgatgcatataagaatgtttgcgcatatgtagtctaggaaactgtccagtaggaaaagtagtaaagcaaagctactctttaatttgacaagccaagatgtagatgttgtcgttacttaatactatttgacatgctctgtgcttgtttttcccagcatggtaactaacttgtgctgtcatattttaatgacaggatctggagaattcaaagtcaacatttgagaagagccgtttcaatctagtatgcacactctactaacataagcctttgctatttactttcaatatacctacttttaagtaaatttttgcattggttgaagagtgcaggtgaattcactgatgactattgaagcgaaaaagaagtatgagtttttagaatctattagcgcaattatggatgcccatctgagatatttcaaacttgtaagggctctaatttcacatttgaagtacttaccatgtaagaccaactaagtttgagatttgtgtcatgttgtgatccttaatttggcctctttatgtttcagggatatgacttgttgaatcaactggaaccatttatccatcaggtacaaacttgtagtcaacttgatgtctcaatattttagatgtgcaaaacaaatatgagcttctatagttcccacagggactttaaacgtgcaaatggggaagtaataattaggttagaaggactgaggtcttgaagagactttttaggcttttggaagcccaaagtcatctaattcatcgatttaagttttaatgtttacatttccttacataaaatttgaaagataactttttgtttaaaatcaaagaagactttcccaatcttttagttccaaaaacttggtttatctggatttaaaaagaacacccataggtaaaagcctctcctgtccaagatttagtttttgctctagtaaaatgtgatgtgaaatagccaaagtttcatgatctctaatgaaatccactgatgctgacttgtgattgttcttcttatagatattaacatatgctcagcaatcaaaagaacagtctaagattgaacaagatcgactagcaagacgcattcaagaattcaggacccagtctgaattagacagccaacagctggtcgctaatgcagagtcgtctggtgctaacgggaaccgtgttggtgggaatatcccttacaaaaataccgaaacaagtttaacagcagacaaggaagtaagcgtttctgatttcattcttgcaagaattgcgagcaattcacgttttaccttttggttccgtagctcttaaatctggcttattactgttttttactacctgcaacacaattattttaagccactcattgttgtacatctgttgatacattttagattatgtcaatttcctgatagcccctacaaaattactcctagcatcttgtgcgccaatgcgattatgcaacatatagagactcgttttgtaatcattttacacttagttttcagaacaggctgaattcttattgttttacagagttcctttgtactgatgcaggtaattaaacaggggtatctattaaagcgttcgtcaagtttgagaactgattggaaaagaaagttttttgtccttgatagtcatggctccatgtactattacagaactaatggtaataaatcaatggtacgcgtgcaaacctctttttcctgcctcatttccatgagagacctccattagttctttcaaatttgcgttatagttcaacatgccaattggtacaatttcttaaatctcattaatcgtttcataagtccttcttttcccctgaaatgaataatagatttgttatgaaataacgggaaaatatatgtgaagaaatagataagtaaatgatgagattgctgtatcagctttcagatttaactctgtgatatcttgtgataggaaatttctaaaattatagtggattttgatataagcctatcaggtccaggaatattaagcctttaatgagtagttgcacgtaaaatttacctggcacttcctcatgctgttgtttttatctatagaagtatagattctggaactaaccatctatttagcagtttagcagatcctttatctttctttatatttatagtttatgtttgtttataatggttgactttatctgctattcgtgttctcagggatctcatcatcactatagtggatcatctgaccataatactggagtttttggtcgatttcgggcaagacataatcgatcaggttcgctcactgagggcagcttaggctataatactattgatcttcgcacttctttgataaaactagacgcagaagacatggatcttcgtctctgtttcagaattatttctcctcaaaaaacttacacacttcaggtacccagtttactcgctatagactaggttgcaagtcaccgggcttacttagtctgaatttttcctgttgggtttttccaaattcattatatgaaaaagagagctgtgccttgtagacaacctgcatggaccctcttagcaattgatacttaagtatctctatactaattccttcttcccctgatccaagtacttcagaatgctgacaacaattatgctaccttaccaggctgaaaatggagcagataggatggactgggtaaataagatcacaaaagctatagggacgcttctcaattctcattttctgcaacaggttggttgacacaataagcctctggctttcagttacaaactaaattgatagcaaagccttattagtaatacatatcgtttctgcagtcacctgtgcgatacttggataaagacaactccagttctgctcctgctaatgctgtcgtctccggggatcaaattcgacataatgattcaagacaaaatatcggggatgatgtctcaacaatactcagaggacttccgggaaataatgcatgtgcagagtgcaatgctcctgagcccgattgggcatcgttaaatcttggagttttgttgtgcattcaatgctctggtgttcacaggaatctcggggttcatatatccaaggtatgaagtatgaaatattcttggaacaatttttttaaacatcttcccttgagatttcttgctgtatgagctggcttgtcttataccacgtcggtaaattctctcttcgtcatccagaatttgtagaactcaatgtggtattctgaagtttctttgtaaaactaactccaccaacgtttaaattttttgcaaaaaagtcaacatcactgtagttataacctttggagggttcaagtatccggattaagttggttaatggaattttctttggtgtcagtcctatatctctaagctgatttcataaatgttgtaccccacaaactgcaggtgaggtccctctcattagatgtgaaagtgtgggagccaacgatcttggacttatttagaaatttgggtaatgtatactgtaattcactgtgggagggactacttcaccttgacgatgactggtatgatctctaaggataaaacatttgttttgtattttgaagtatagaccaattatcatacactctatcttccaacattctcctgtttcatatatcatgcatgtagctgatgaggtacatcgtgataaacagtgtggctttttgcagcgaagacggatcagcattgtcgcatgcttcagtttcaaaaccatgtccagaagattcctttagtgtgaaggagaaatacattctaggaaaggtatgacattagttgttactttctaatgtccaagttgtgaaatgtatcttcacggggatgattgatcattttactcatttattgaactagattatgctttgtgaaaaggcaaagatgtaaaaagcaactaatactaaaccttgattgatgttttgtgtttgggccagtacctggagaaagcattagtcatcaaggatgaaagtgaagcaaacctttctgctgcgagtagaatatgggaagctgttcaaagcagaaacatacgagaaatctatcgacttatagttactactggggatgtaaatatcatcaataccaagtttgatgatataactgatatcgatgcatatcaccatattgatgcagcagagaaagcagtaaagaaaagacatgatccaactgtatgtcagagaattaaagaatccaacgaaccaagaagctgtcttcaaggatgctccttgctccatgtggcttgtcacattggtgactctgtcttgcttgaattgttgttgcagtttggtgctgacctaaacataagagattatcacggaaggactccgttgcaccattgcatatcatcagggaaccacaaatttgcaaagattctactgcgaaggtatattttaactcttaagaaacgcactcttaatgaatgttaggactcaaactaaaacctcctagctccacttccccttgattccatgactctgtttctttggtagcttggctcttccattgcatttttcttgaattagtcgttggtagttttggctcataatgcggttgtatttatattttcttaaattgtttttgaaaacgcagaggagcacgtccgtcgatagaggacgatggagggctaagcgttctagaaagagcgatggaaatgggagcgataactgatgaagagctctttcttctcttagccgagtgcgcataaaccttcactgcacaccgacatgcacagcttctttagaaacacctttggaagaccctaaaacgcaaaacaaggaggtggtacaagctactagattccgtaaaggcatgatgaaacagccttttgagtcgttgtttgtcaatgtacaagggatatgattttactgacctacagtttatctctactcacttttcaagtttcggaagttttgatttttttttttaaacttcacttttgcatttacatttgagttttacatatgaaaaacaatttcaataaacatcattcttaaatatacaaaaaaaaaaaaattgttaaatatatttctactaactgaaggcagcatattttttttttttaatgcttttgaagagtaagtttacaacttaacaaatttgtttagtaacataaaatagctgtaattggaaaaaaatacatcataacatttttgtcatcgtaaattttattttaaaattggttaatgctaaacacacacaaagaaagaaaaaagaaaaaacgaatcaaaacgtttggttaataatgttcttgagcctgctcagaccgggaagagagctggaacataattgaattttaaacccgcatttaattgagaatccgatcaaaccaaattatatcggattttacccggttaatttgttaaaccgaaccaaaattgagttgaccgatgggcagagagagagccacgcggcccacgcgttattcggcaaaggccaaattgaagaaaaccaaaccctttggaaaaacctccgtctttcgggtcttcgtcgacattgatccgttttttactcaccgtcgccggtaagtcggtaaccgtcaatcttctttctttagatcatctttgttgtattgctctgtaattttggctcttgatcatattcttttgagacaagaatgagtctttagcgaaaaatagaacagaggaatcagatggtttatctgtgattgaaagagaaatattttcctgtggagaaatcgggattttttccaaggatttatcataagtttgagattcttagaaaggggagttctttagattcttcgtgatcatcaaatgaagaaaggaagtattttatgtttattgaaacgggacttttggattgttcccaataggcaaaagcaaagctttcttcttttgtgaagctcaactgcaatttgttgttttgagttcgatgcttgatacttgtgatttctactaagtgaaaccattcatagttacttacacacgtgggcagttgttcgtgtgtttggagggattttcagatgatgtgtacttgttgagtattatactagagctcatttttcttcacaacactcccttttgaggctctgcggtgaagctttgtagtacctcgaaaactaatttgttaagaacatgctctgattcattggttgccttttggcgagattcctggactatgcatttgttgattgtttactgtagatcccatatcttcttgtatcttcataataaatccttgacacactgcagtttagcatcacaatatcctgaaagctcatttcatttgttagaaacatgctctcatgtattggttgcctttttgcatatgaacagttgaaatggcgaagtcttgtaagggccttgctgaagagcttgtcaaatgtctcagtgaatcgatttgtgtcaaggtaatataaaatgtctgaagatgaagctattataagtgtattcattacctgttaactaattaccagttcacttcatttgttttctgattgtgttatagggcgagaaacgatcaattagggactgcactggtgaaaaaagcccatgtataccgagtgagtgtgttggcctaagagaaacctacttcaactgtaaaagaggacaggtatgttttgctctcaccacttgaaaagcctcaatttgttcactaaacccattgtgataatgtagctttgaaatcatccatcatgtttaaaagatacgaaccatacctgccgtggaataagattaagcatgcttgcgaacacttaagagttacattcaccttacagtctcttggtctcattggatgtcgaattgtgttttctctaggtagacatgagagccaggattcgaggaaacaaaggctactaacagaagggcacctgcatatccgatatcacattttcattttgttgtttttgcgttctttttatcaatcctttgatttctaatagttggagcacaatatgaagggacatgcaacttagttacttgccatgtcaatgtcaagttaggcttgttcctatactatacttgatttcttttcctccttaaagttgtattacatgtcaatgaaaagatgctattgaatgtcgtgttatttaaagaaagagtaagaatgaaaaaaaaaagattcttctgttcttcaactactcaatgccagcatctcaattcaatagatcttatgcaagtcctacaaggtcgatgaatcaaaatggcgttacaaaataaaaaagaagctttacactatgaaccctacttcaagaatcacacgtgtcattctatgaaagcaatgaagaaggcccacccaatttctctaaatgctcacttgatcatcccttggcaagctctgaacggtatccgaccatctcccgggcgaatgttcgctactgttagacgagaatggtgcttcagcccttgcatccctcaccatcttcaacacctctctcatcacaggccggttatcgggttgaatggtcacacaaaccgttgcgatacttaaaagtgcctgaagtttctcctctgatgcttcgttgcctgaagaagtcggttcctcacctgattcagtctcttcctctctcactgcacgcacccatcttgagatatctgacccatattcttgaacaaggtcctggaatggtgttctacctgttagaagctcgagaagaagaaccccaaagctatacacatcagcgggctgtgtagaggctttccgtgggtctctgcactctggagctttgtaaaagagagacactgcgcttgtttcttcaactgagtcagggtcatggagagtgctgaggccgtaatccgtgaggcaggactcaaaatcaggacctaacaagacattggacgatttcaaattcccatgagtcaagccaggattctgatgtatgtagagcagagctgaggccaagtcctcagctattttcaggcatgaagtccagtgaagaggcttcccacttccagaagccctagttcctacagacaaacacacacataaaacacaatgaagctggctaatgtatccaagtttcgattcaacccatcaaatctctgcattgctatataaaacaggaaccttgaaagaagctaaggtacataccgtgaataagagtaaagagactgccattagggaagtaatcgtagacgagcaagcgttcttccttggcttgaaaataggctctgagaggcaccagatttgggtgtttgagctgtccaaggatctcaacatgtctcttgaactcctccatgcgaggataccttgcgttcttgagcctcttcacagtgacaatgaacccagactccatcacagccttgtacgtgctccccaacgttcctcttcccaatgtctctgccgaagcttttagcagatcttccatggtgtatctcactaccgtctcgcctgaatcactggttccaaggaaaaccagagttcccactgcaccttcttcgcctctttcccatgagaatcctctgtctttcctctcaatgtctctctctgtctctgcagttgttgctccttctgcttccgctattcctttaccttttctatcttccctcggtgcctggttccgccgcttccgtcgccagcagacgataagcaacgtcaatagcaagataaggactagtactccgccggcaacgcttccggcgataatcccgatcagttcgctttgctcttcttagacttaggtataggcgttggtttcgcagacggcgcaggtgagattccgcatggacttccaatctgatcgccgcaaagagcgacgtttccggtaaacgatgactcatcaaactgcttcaaagctcgtgtcagtggaatttgaccagagagcttattgttggatacattgaagtatctgagacttgtctggttaagaggaggaatcgaaccagtgaagagattgtcctcaacattgagcgtgtaaagacgagagagacgaagcaacgagctagggattcgaccggacagtctgtttccggagaggaaaatagttttcaatcggtgaagagacgtgagagactccgggaagtcgccggagaagttgttatcgttaagataaaccgatttgaggttaaccaaaccggagaggttagggattgaaccggagagagagttagctttgaaactaagaaccctaagttgatccaactggttcaaactcttctcgttaagtgagccggtgagattcaagtactcaagaacaagcttggagactcttccattcatacattctctaacaccttgccagttgcagagatctgttcctctccaagaaatcgaattagatggatcgattgaagatttcaagctt

(The sequence listing continues in the following parts.)
